United States Patent Application Publication US 2026/0240958 A1 - sequence listing, part 14

SEQ ID NO: 12838 - RNA, 5785 nt, synthetic construct
  source 1..5785: mol_type = other RNA
aggaaataagagagaaaagaagagtaagaagaaatataagagccaccatggcccctaagaagaagcgtaaagtgagccggatggaacgcctcgtctacgaggtgcggcagaagtgcagaaacatcgaggacatctgcatctcctgcggatctctgaacgtgaccctggagcacccactgttcatcggcggcatgtgccagaactgtaaaaactgttttctggagtgtgcctatcaatacgacgatgacggctaccagagctactgcaccatctgttgcggcggaagagaggtgctgatgtgtggaaataacaactgctgccggtgcttctgcgtggaatgcgtggacctgctggtgggccccggcgccgcccaggccgctattaaggaagatccttggaactgctacatgtgcggccacaagggcacatacggcctgctgagacggagagaggactggcctagcagactgcagatgttcttcgccaataaccacgaccaggagttcgacccccctaaggtgtaccctcccgtccccgccgagaagagaaagcccatccgggtcctgagcctgttcgatggcatcgccaccggtctgctggtgctgaaggacctgggcatccaggtggataggtacattgcctccgaggtgtgcgaggactccatcaccgtgggaatggtgcgtcatcagggcaagatcatgtacgtgggcgacgtgcggagcgtgacacagaagcatatccaggagtggggccctttcgacctggtgatcggcggcagcccttgcaatgacctgagcatcgtgaacccagcccggaagggcctgtacgagggaaccggcagactgttcttcgagttttacagactgctgcacgacgcccggcctaaggaaggcgacgaccggcccttcttttggctgttcgagaatgtggtggccatgggagtcagcgacaagcgggatattagccggttcctggagagcaaccccgtgatgatcgatgccaaggaagtgagcgccgcccaccgggccagatacttctggggcaatctgcctggcatgaacagacccctggccagcaccgtgaacgacaagctggagctgcaggagtgcctggagcacggccggatcgccaagttcagcaaggtgagaaccatcaccacccgaagcaacagcatcaaacaaggcaaggaccagcactttcctgtgttcatgaacgagaaggaggacatcctgtggtgtaccgagatggagagagtgttcgggttcccagtccactacacagatgtcagcaacatgtctagactggccagacagagactgctgggaagaagctggtccgtccctgtgatcagacacctgttcgcccctctgaaggagtacttcgcctgcgtgagcagcggcaacagcaacgccaacagccggggccccagcttctctagcggcctggtgccactgtccctgagagggagccacatgggccccatggagatctacaaaaccgtgagcgcctggaagcggcagcctgtgcgcgtgctgagcctgtttcggaatatcgataaagtcctgaaaagcctgggattcctggagagcggctctggctccggcggtggcaccctgaagtacgtggaggatgtgacaaacgtggtcagacgggatgtggagaagtggggccccttcgatctggtgtacggcagcacccaacccctgggcagctcttgtgaccggtgccctggctggtacatgtttcagttccaccggatcctgcagtacgccctgccgagacaggagtcccagcggccattcttttggattttcatggacaacttgctgctgaccgaggatgaccaggaaactaccactcggttcctgcagaccgaagccgtgaccctgcaggacgtgagaggccgggactaccagaacgccatgcgggtgtggtccaacatccctggactgaaaagcaagcacgcacctctgacccctaaagaagaggagtacctgcaggcccaggtgcggagcagaagcaagctggacgcccctaaggtggatctgctggtgaagaattgcctcctgcccctgagagagtacttcaagtatttcagccagaatagtctgcccctgggaggcagcggcggcggcctgcaggtgagcgtgagcttcgaggacgtggccgtggacttcagcagggaggagtggcagcagctggacagcacccagaggaggctgtaccaggacgtgatgctggagaactacagccacctgctgagcctgggctgcgagatccccaagcccgaggtgatcttcaagctggagcagggcgaggagccctggaccctggaggaggagaccccccaccagagctgcagcgacgagaagttcggcggcggcccaagcagcggcgcccctcctcccagcggcggcagcccagccggctccccaacctctaccgaggagggcacctctgagtccgccacccccgagagcggccctggcacctccaccgagcccagcgagggcagcgcacccggcagccctgccggcagccccacctccacagaggagggaaccagcaccgagcccagcgaaggcagcgccccaggcaccagcaccgagcctagtgagcaggagattaaacggatcaacaagatcagaagaagacttgtgaaagacagcaacaccaagaaggccggcaagacaggccccatgaaaaccctgctggttagagtgatgacacccgatctgagagagcggctggaaaacctgagaaagaagcctgaaaatatcccccagcccatcagcaatacatctagagccaacctgaataagctgctgaccgattacaccgaaatgaagaaggcgatcctgcatgtgtactgggaagagttccagaaggaccctgtgggcctgatgagccgggtggcccagcctgccagcaagaagatcgatcagaacaagctgaaacctgagatggacgagaagggcaacctgaccaccgccggctttgcctgctctcagtgtggccagcccctgttcgtgtacaagctggagcaggtgtctgagaagggcaaggcttacaccaactacttcggacggtgcaatgtggccgagcacgaaaagctgatcctgctggcccagctgaagcccgagaaggatagcgacgaagccgtgacatatagcctgggaaagtttgggcagagggccctggatttctacagcattcatgtgaccaaggagtccacccaccccgtgaagcccctggcccagatcgccggaaacagatacgcctccggacctgtgggaaaggccctgagcgacgcatgtatgggcacaatcgcctccttcctgtctaagtaccaggacatcatcatcgaacaccagaaggtggtgaagggcaaccagaagagactggagagcctgcgggagctggccggcaaggaaaacctggaataccctagcgtgaccctgccacctcagcctcacaccaaggagggcgttgatgcctacaacgaagtgatcgcccgggtgcgaatgtgggtgaacctgaacctgtggcagaagctgaagctaagcagagatgatgccaagcctctgctgagactgaagggattcccttcctttcctctggtcgagagacaggccaacgaagtggactggtgggacatggtgtgtaacgtgaagaagctgatcaacgagaaaaaggaggatggcaaggtgttttggcagaatctggctggctacaagagacaggaagccctgagaccatacctgagcagcgaggaagatcggaagaagggaaagaaattcgctcggtaccagctgggcgacctgctgctgcacctggaaaagaagcacggcgaggactggggaaaggtgtacgacgaggcctgggagcggattgacaagaaagtggaaggcctgagcaagcacatcaagctggaagaggaacggagaagcgaggacgcccagagcaaggccgccctgaccgactggctgcgggctaaggccagcttcgtgatcgagggcctgaaggaggccgacaaggacgagttctgcagatgcgagctgaagctgcagaagtggtacggggacctgcggggaaagcccttcgccatcgaagccgagaacagcatcctggacatcagcggcttcagcaagcagtacaactgtgccttcatctggcagaaggacggcgtgaagaagctgaacctgtacctgatcatcaactacttcaagggcggcaagctgcggttcaagaagatcaaacctgaagccttcgaagccaacagattctacaccgtgatcaacaaaaagagcggcgagatcgtgcccatggaggtgaacttcaacttcgacgaccccaacctgatcatcctgcctctggcctttggcaagagacagggcagagaattcatctggaacgacctgctgtccctggaaaccggcagcctgaagctggccaacggaagagtgatcgagaagacactgtacaacagaagaacccggcaggatgagcctgccctgttcgtggccctgaccttcgagcggcgggaggtcctggactcctccaatatcaaaccaatgaacctgatcggcgtggcaagaggcgaaaacatccccgccgtgatcgccctgaccgaccccgagggctgcccactgagccggtttaaggatagcctgggaaacccaacccacatcctgagaatcggcgagagctataaggagaagcagcggaccatccaggccaagaaggaggtggagcagcggagagccggcggctacagccggaagtacgccagcaaagccaagaatctggcagacgatatggtgagaaacaccgctagagatctgctgtactacgccgtgacccaggatgccatgctgatcttcgccaacctgagccggggcttcggccggcagggcaagcggaccttcatggccgagagacagtacacacggatggaggactggctgaccgccaagctggcctacgagggcctgagcaagacctacctgtccaagacactggcccagtacacctccaagacatgcagcaactgtgggtttaccatcaccagcgccgactacgacagggtgctggagaagctgaagaagacagcaacaggctggatgaccacaattaacggcaaggagctgaaggtggagggccagattacctactacaacagatacaagagacagaacgtagtcaaggacctgtccgtcgagctggatagactgagcgaagaatctgtgaacaacgacatctcctcctggacaaagggcagaagcggagaagctctgagcctcctgaagaaaagattctcccatagacccgtgcaggagaagttcgtgtgcctgaactgcggcttcgagacacacgcagccgagcaagccgccctgaacatcgccagatcctggctgttcctgcggagccaggagtacaagaaataccagacaaacaagacaaccggcaacaccgataagagagccttcgtcgagacctggcagtccttttaccggaagaagcttaaggaggtgtggaaacctgccgtgcggtctggcggatctggcggaggctccaccagccccaagaaaaagagaaaagtctaagctgccttctgcggggcttgccttctggccatgcccttcttctctcccttgcacctgtacctcttggtctttgaataaagcctgagtaggaaggctagcaaaaaaaaaaaaaaaaaaaaaaaaaaaaaaaaaaaaaaaaaaaaaaaaaaaaaaaaaaaaaaaaaaaaaaaaaaaaaaaa

SEQ ID NO: 12839 - RNA, 5785 nt, synthetic construct
  source 1..5785: mol_type = other RNA
aggaaataagagagaaaagaagagtaagaagaaatataagagccaccatggcccctaagaagaagcgtaaagtgagccggatggaacgcctcgtctacgaggtgcggcagaagtgcagaaacatcgaggacatctgcatctcctgcggatctctgaacgtgaccctggagcacccactgttcatcggcggcatgtgccagaactgtaaaaactgttttctggagtgtgcctatcaatacgacgatgacggctaccagagctactgcaccatctgttgcggcggaagagaggtgctgatgtgtggaaataacaactgctgccggtgcttctgcgtggaatgcgtggacctgctggtgggccccggcgccgcccaggccgctattaaggaagatccttggaactgctacatgtgcggccacaagggcacatacggcctgctgagacggagagaggactggcctagcagactgcagatgttcttcgccaataaccacgaccaggagttcgacccccctaaggtgtaccctcccgtccccgccgagaagagaaagcccatccgggtcctgagcctgttcgatggcatcgccaccggtctgctggtgctgaaggacctgggcatccaggtggataggtacattgcctccgaggtgtgcgaggactccatcaccgtgggaatggtgcgtcatcagggcaagatcatgtacgtgggcgacgtgcggagcgtgacacagaagcatatccaggagtggggccctttcgacctggtgatcggcggcagcccttgcaatgacctgagcatcgtgaacccagcccggaagggcctgtacgagggaaccggcagactgttcttcgagttttacagactgctgcacgacgcccggcctaaggaaggcgacgaccggcccttcttttggctgttcgagaatgtggtggccatgggagtcagcgacaagcgggatattagccggttcctggagagcaaccccgtgatgatcgatgccaaggaagtgagcgccgcccaccgggccagatacttctggggcaatctgcctggcatgaacagacccctggccagcaccgtgaacgacaagctggagctgcaggagtgcctggagcacggccggatcgccaagttcagcaaggtgagaaccatcaccacccgaagcaacagcatcaaacaaggcaaggaccagcactttcctgtgttcatgaacgagaaggaggacatcctgtggtgtaccgagatggagagagtgttcgggttcccagtccactacacagatgtcagcaacatgtctagactggccagacagagactgctgggaagaagctggtccgtccctgtgatcagacacctgttcgcccctctgaaggagtacttcgcctgcgtgagcagcggcaacagcaacgccaacagccggggccccagcttctctagcggcctggtgccactgtccctgagagggagccacatgggccccatggagatctacaaaaccgtgagcgcctggaagcggcagcctgtgcgcgtgctgagcctgtttcggaatatcgataaagtcctgaaaagcctgggattcctggagagcggctctggctccggcggtggcaccctgaagtacgtggaggatgtgacaaacgtggtcagacgggatgtggagaagtggggccccttcgatctggtgtacggcagcacccaacccctgggcagctcttgtgaccggtgccctggctggtacatgtttcagttccaccggatcctgcagtacgccctgccgagacaggagtcccagcggccattcttttggattttcatggacaacttgctgctgaccgaggatgaccaggaaactaccactcggttcctgcagaccgaagccgtgaccctgcaggacgtgagaggccgggactaccagaacgccatgcgggtgtggtccaacatccctggactgaaaagcaagcacgcacctctgacccctaaagaagaggagtacctgcaggcccaggtgcggagcagaagcaagctggacgcccctaaggtggatctgctggtgaagaattgcctcctgcccctgagagagtacttcaagtatttcagccagaatagtctgcccctgggaggcagcggcggcggcagcgagatgagggtgaccttcgaggaggtggccgtgtacttcaccaagggccagggcgccctgctggacgccaggcagaaggccctgtacagggacgtgatgctggagaactacgaggccgtgaccagcctgggcttccccgtgcccaagcccgagctgatcgccaggctggagaggggcgaggagccctgggtgcccgacctgcaggccggcgaggagagggagatcctgaggggcaccaggggcggcccaagcagcggcgcccctcctcccagcggcggcagcccagccggctccccaacctctaccgaggagggcacctctgagtccgccacccccgagagcggccctggcacctccaccgagcccagcgagggcagcgcacccggcagccctgccggcagccccacctccacagaggagggaaccagcaccgagcccagcgaaggcagcgccccaggcaccagcaccgagcctagtgagcaggagattaaacggatcaacaagatcagaagaagacttgtgaaagacagcaacaccaagaaggccggcaagacaggccccatgaaaaccctgctggttagagtgatgacacccgatctgagagagcggctggaaaacctgagaaagaagcctgaaaatatcccccagcccatcagcaatacatctagagccaacctgaataagctgctgaccgattacaccgaaatgaagaaggcgatcctgcatgtgtactgggaagagttccagaaggaccctgtgggcctgatgagccgggtggcccagcctgccagcaagaagatcgatcagaacaagctgaaacctgagatggacgagaagggcaacctgaccaccgccggctttgcctgctctcagtgtggccagcccctgttcgtgtacaagctggagcaggtgtctgagaagggcaaggcttacaccaactacttcggacggtgcaatgtggccgagcacgaaaagctgatcctgctggcccagctgaagcccgagaaggatagcgacgaagccgtgacatatagcctgggaaagtttgggcagagggccctggatttctacagcattcatgtgaccaaggagtccacccaccccgtgaagcccctggcccagatcgccggaaacagatacgcctccggacctgtgggaaaggccctgagcgacgcatgtatgggcacaatcgcctccttcctgtctaagtaccaggacatcatcatcgaacaccagaaggtggtgaagggcaaccagaagagactggagagcctgcgggagctggccggcaaggaaaacctggaataccctagcgtgaccctgccacctcagcctcacaccaaggagggcgttgatgcctacaacgaagtgatcgcccgggtgcgaatgtgggtgaacctgaacctgtggcagaagctgaagctaagcagagatgatgccaagcctctgctgagactgaagggattcccttcctttcctctggtcgagagacaggccaacgaagtggactggtgggacatggtgtgtaacgtgaagaagctgatcaacgagaaaaaggaggatggcaaggtgttttggcagaatctggctggctacaagagacaggaagccctgagaccatacctgagcagcgaggaagatcggaagaagggaaagaaattcgctcggtaccagctgggcgacctgctgctgcacctggaaaagaagcacggcgaggactggggaaaggtgtacgacgaggcctgggagcggattgacaagaaagtggaaggcctgagcaagcacatcaagctggaagaggaacggagaagcgaggacgcccagagcaaggccgccctgaccgactggctgcgggctaaggccagcttcgtgatcgagggcctgaaggaggccgacaaggacgagttctgcagatgcgagctgaagctgcagaagtggtacggggacctgcggggaaagcccttcgccatcgaagccgagaacagcatcctggacatcagcggcttcagcaagcagtacaactgtgccttcatctggcagaaggacggcgtgaagaagctgaacctgtacctgatcatcaactacttcaagggcggcaagctgcggttcaagaagatcaaacctgaagccttcgaagccaacagattctacaccgtgatcaacaaaaagagcggcgagatcgtgcccatggaggtgaacttcaacttcgacgaccccaacctgatcatcctgcctctggcctttggcaagagacagggcagagaattcatctggaacgacctgctgtccctggaaaccggcagcctgaagctggccaacggaagagtgatcgagaagacactgtacaacagaagaacccggcaggatgagcctgccctgttcgtggccctgaccttcgagcggcgggaggtcctggactcctccaatatcaaaccaatgaacctgatcggcgtggcaagaggcgaaaacatccccgccgtgatcgccctgaccgaccccgagggctgcccactgagccggtttaaggatagcctgggaaacccaacccacatcctgagaatcggcgagagctataaggagaagcagcggaccatccaggccaagaaggaggtggagcagcggagagccggcggctacagccggaagtacgccagcaaagccaagaatctggcagacgatatggtgagaaacaccgctagagatctgctgtactacgccgtgacccaggatgccatgctgatcttcgccaacctgagccggggcttcggccggcagggcaagcggaccttcatggccgagagacagtacacacggatggaggactggctgaccgccaagctggcctacgagggcctgagcaagacctacctgtccaagacactggcccagtacacctccaagacatgcagcaactgtgggtttaccatcaccagcgccgactacgacagggtgctggagaagctgaagaagacagcaacaggctggatgaccacaattaacggcaaggagctgaaggtggagggccagattacctactacaacagatacaagagacagaacgtagtcaaggacctgtccgtcgagctggatagactgagcgaagaatctgtgaacaacgacatctcctcctggacaaagggcagaagcggagaagctctgagcctcctgaagaaaagattctcccatagacccgtgcaggagaagttcgtgtgcctgaactgcggcttcgagacacacgcagccgagcaagccgccctgaacatcgccagatcctggctgttcctgcggagccaggagtacaagaaataccagacaaacaagacaaccggcaacaccgataagagagccttcgtcgagacctggcagtccttttaccggaagaagcttaaggaggtgtggaaacctgccgtgcggtctggcggatctggcggaggctccaccagccccaagaaaaagagaaaagtctaagctgccttctgcggggcttgccttctggccatgcccttcttctctcccttgcacctgtacctcttggtctttgaataaagcctgagtaggaaggctagcaaaaaaaaaaaaaaaaaaaaaaaaaaaaaaaaaaaaaaaaaaaaaaaaaaaaaaaaaaaaaaaaaaaaaaaaaaaaaaaa

SEQ ID NO: 12840 - RNA, 5785 nt, synthetic construct
  source 1..5785: mol_type = other RNA
aggaaataagagagaaaagaagagtaagaagaaatataagagccaccatggcccctaagaagaagcgtaaagtgagccggatggaacgcctcgtctacgaggtgcggcagaagtgcagaaacatcgaggacatctgcatctcctgcggatctctgaacgtgaccctggagcacccactgttcatcggcggcatgtgccagaactgtaaaaactgttttctggagtgtgcctatcaatacgacgatgacggctaccagagctactgcaccatctgttgcggcggaagagaggtgctgatgtgtggaaataacaactgctgccggtgcttctgcgtggaatgcgtggacctgctggtgggccccggcgccgcccaggccgctattaaggaagatccttggaactgctacatgtgcggccacaagggcacatacggcctgctgagacggagagaggactggcctagcagactgcagatgttcttcgccaataaccacgaccaggagttcgacccccctaaggtgtaccctcccgtccccgccgagaagagaaagcccatccgggtcctgagcctgttcgatggcatcgccaccggtctgctggtgctgaaggacctgggcatccaggtggataggtacattgcctccgaggtgtgcgaggactccatcaccgtgggaatggtgcgtcatcagggcaagatcatgtacgtgggcgacgtgcggagcgtgacacagaagcatatccaggagtggggccctttcgacctggtgatcggcggcagcccttgcaatgacctgagcatcgtgaacccagcccggaagggcctgtacgagggaaccggcagactgttcttcgagttttacagactgctgcacgacgcccggcctaaggaaggcgacgaccggcccttcttttggctgttcgagaatgtggtggccatgggagtcagcgacaagcgggatattagccggttcctggagagcaaccccgtgatgatcgatgccaaggaagtgagcgccgcccaccgggccagatacttctggggcaatctgcctggcatgaacagacccctggccagcaccgtgaacgacaagctggagctgcaggagtgcctggagcacggccggatcgccaagttcagcaaggtgagaaccatcaccacccgaagcaacagcatcaaacaaggcaaggaccagcactttcctgtgttcatgaacgagaaggaggacatcctgtggtgtaccgagatggagagagtgttcgggttcccagtccactacacagatgtcagcaacatgtctagactggccagacagagactgctgggaagaagctggtccgtccctgtgatcagacacctgttcgcccctctgaaggagtacttcgcctgcgtgagcagcggcaacagcaacgccaacagccggggccccagcttctctagcggcctggtgccactgtccctgagagggagccacatgggccccatggagatctacaaaaccgtgagcgcctggaagcggcagcctgtgcgcgtgctgagcctgtttcggaatatcgataaagtcctgaaaagcctgggattcctggagagcggctctggctccggcggtggcaccctgaagtacgtggaggatgtgacaaacgtggtcagacgggatgtggagaagtggggccccttcgatctggtgtacggcagcacccaacccctgggcagctcttgtgaccggtgccctggctggtacatgtttcagttccaccggatcctgcagtacgccctgccgagacaggagtcccagcggccattcttttggattttcatggacaacttgctgctgaccgaggatgaccaggaaactaccactcggttcctgcagaccgaagccgtgaccctgcaggacgtgagaggccgggactaccagaacgccatgcgggtgtggtccaacatccctggactgaaaagcaagcacgcacctctgacccctaaagaagaggagtacctgcaggcccaggtgcggagcagaagcaagctggacgcccctaaggtggatctgctggtgaagaattgcctcctgcccctgagagagtacttcaagtatttcagccagaatagtctgcccctgggaggcagcggcggcggcggccacgccctgctgaccttcagggacgtggccatcgagttcagccaggaggagtggggctgcctgaaccacacccagagggagctgtacagggacgtgatgctggagaactacggccacctgctgttcctgggcctgatcgtgagcaagcccgacctggtgagcttcctggagcagaccaaggacccctgggacggcaagaggaagaagaccgtggccttccaccccggcctggccctgagcggcggcccaagcagcggcgcccctcctcccagcggcggcagcccagccggctccccaacctctaccgaggagggcacctctgagtccgccacccccgagagcggccctggcacctccaccgagcccagcgagggcagcgcacccggcagccctgccggcagccccacctccacagaggagggaaccagcaccgagcccagcgaaggcagcgccccaggcaccagcaccgagcctagtgagcaggagattaaacggatcaacaagatcagaagaagacttgtgaaagacagcaacaccaagaaggccggcaagacaggccccatgaaaaccctgctggttagagtgatgacacccgatctgagagagcggctggaaaacctgagaaagaagcctgaaaatatcccccagcccatcagcaatacatctagagccaacctgaataagctgctgaccgattacaccgaaatgaagaaggcgatcctgcatgtgtactgggaagagttccagaaggaccctgtgggcctgatgagccgggtggcccagcctgccagcaagaagatcgatcagaacaagctgaaacctgagatggacgagaagggcaacctgaccaccgccggctttgcctgctctcagtgtggccagcccctgttcgtgtacaagctggagcaggtgtctgagaagggcaaggcttacaccaactacttcggacggtgcaatgtggccgagcacgaaaagctgatcctgctggcccagctgaagcccgagaaggatagcgacgaagccgtgacatatagcctgggaaagtttgggcagagggccctggatttctacagcattcatgtgaccaaggagtccacccaccccgtgaagcccctggcccagatcgccggaaacagatacgcctccggacctgtgggaaaggccctgagcgacgcatgtatgggcacaatcgcctccttcctgtctaagtaccaggacatcatcatcgaacaccagaaggtggtgaagggcaaccagaagagactggagagcctgcgggagctggccggcaaggaaaacctggaataccctagcgtgaccctgccacctcagcctcacaccaaggagggcgttgatgcctacaacgaagtgatcgcccgggtgcgaatgtgggtgaacctgaacctgtggcagaagctgaagctaagcagagatgatgccaagcctctgctgagactgaagggattcccttcctttcctctggtcgagagacaggccaacgaagtggactggtgggacatggtgtgtaacgtgaagaagctgatcaacgagaaaaaggaggatggcaaggtgttttggcagaatctggctggctacaagagacaggaagccctgagaccatacctgagcagcgaggaagatcggaagaagggaaagaaattcgctcggtaccagctgggcgacctgctgctgcacctggaaaagaagcacggcgaggactggggaaaggtgtacgacgaggcctgggagcggattgacaagaaagtggaaggcctgagcaagcacatcaagctggaagaggaacggagaagcgaggacgcccagagcaaggccgccctgaccgactggctgcgggctaaggccagcttcgtgatcgagggcctgaaggaggccgacaaggacgagttctgcagatgcgagctgaagctgcagaagtggtacggggacctgcggggaaagcccttcgccatcgaagccgagaacagcatcctggacatcagcggcttcagcaagcagtacaactgtgccttcatctggcagaaggacggcgtgaagaagctgaacctgtacctgatcatcaactacttcaagggcggcaagctgcggttcaagaagatcaaacctgaagccttcgaagccaacagattctacaccgtgatcaacaaaaagagcggcgagatcgtgcccatggaggtgaacttcaacttcgacgaccccaacctgatcatcctgcctctggcctttggcaagagacagggcagagaattcatctggaacgacctgctgtccctggaaaccggcagcctgaagctggccaacggaagagtgatcgagaagacactgtacaacagaagaacccggcaggatgagcctgccctgttcgtggccctgaccttcgagcggcgggaggtcctggactcctccaatatcaaaccaatgaacctgatcggcgtggcaagaggcgaaaacatccccgccgtgatcgccctgaccgaccccgagggctgcccactgagccggtttaaggatagcctgggaaacccaacccacatcctgagaatcggcgagagctataaggagaagcagcggaccatccaggccaagaaggaggtggagcagcggagagccggcggctacagccggaagtacgccagcaaagccaagaatctggcagacgatatggtgagaaacaccgctagagatctgctgtactacgccgtgacccaggatgccatgctgatcttcgccaacctgagccggggcttcggccggcagggcaagcggaccttcatggccgagagacagtacacacggatggaggactggctgaccgccaagctggcctacgagggcctgagcaagacctacctgtccaagacactggcccagtacacctccaagacatgcagcaactgtgggtttaccatcaccagcgccgactacgacagggtgctggagaagctgaagaagacagcaacaggctggatgaccacaattaacggcaaggagctgaaggtggagggccagattacctactacaacagatacaagagacagaacgtagtcaaggacctgtccgtcgagctggatagactgagcgaagaatctgtgaacaacgacatctcctcctggacaaagggcagaagcggagaagctctgagcctcctgaagaaaagattctcccatagacccgtgcaggagaagttcgtgtgcctgaactgcggcttcgagacacacgcagccgagcaagccgccctgaacatcgccagatcctggctgttcctgcggagccaggagtacaagaaataccagacaaacaagacaaccggcaacaccgataagagagccttcgtcgagacctggcagtccttttaccggaagaagcttaaggaggtgtggaaacctgccgtgcggtctggcggatctggcggaggctccaccagccccaagaaaaagagaaaagtctaagctgccttctgcggggcttgccttctggccatgcccttcttctctcccttgcacctgtacctcttggtctttgaataaagcctgagtaggaaggctagcaaaaaaaaaaaaaaaaaaaaaaaaaaaaaaaaaaaaaaaaaaaaaaaaaaaaaaaaaaaaaaaaaaaaaaaaaaaaaaaa

SEQ ID NO: 12841 - RNA, 5785 nt, synthetic construct
  source 1..5785: mol_type = other RNA
aggaaataagagagaaaagaagagtaagaagaaatataagagccaccatggcccctaagaagaagcgtaaagtgagccggatggaacgcctcgtctacgaggtgcggcagaagtgcagaaacatcgaggacatctgcatctcctgcggatctctgaacgtgaccctggagcacccactgttcatcggcggcatgtgccagaactgtaaaaactgttttctggagtgtgcctatcaatacgacgatgacggctaccagagctactgcaccatctgttgcggcggaagagaggtgctgatgtgtggaaataacaactgctgccggtgcttctgcgtggaatgcgtggacctgctggtgggccccggcgccgcccaggccgctattaaggaagatccttggaactgctacatgtgcggccacaagggcacatacggcctgctgagacggagagaggactggcctagcagactgcagatgttcttcgccaataaccacgaccaggagttcgacccccctaaggtgtaccctcccgtccccgccgagaagagaaagcccatccgggtcctgagcctgttcgatggcatcgccaccggtctgctggtgctgaaggacctgggcatccaggtggataggtacattgcctccgaggtgtgcgaggactccatcaccgtgggaatggtgcgtcatcagggcaagatcatgtacgtgggcgacgtgcggagcgtgacacagaagcatatccaggagtggggccctttcgacctggtgatcggcggcagcccttgcaatgacctgagcatcgtgaacccagcccggaagggcctgtacgagggaaccggcagactgttcttcgagttttacagactgctgcacgacgcccggcctaaggaaggcgacgaccggcccttcttttggctgttcgagaatgtggtggccatgggagtcagcgacaagcgggatattagccggttcctggagagcaaccccgtgatgatcgatgccaaggaagtgagcgccgcccaccgggccagatacttctggggcaatctgcctggcatgaacagacccctggccagcaccgtgaacgacaagctggagctgcaggagtgcctggagcacggccggatcgccaagttcagcaaggtgagaaccatcaccacccgaagcaacagcatcaaacaaggcaaggaccagcactttcctgtgttcatgaacgagaaggaggacatcctgtggtgtaccgagatggagagagtgttcgggttcccagtccactacacagatgtcagcaacatgtctagactggccagacagagactgctgggaagaagctggtccgtccctgtgatcagacacctgttcgcccctctgaaggagtacttcgcctgcgtgagcagcggcaacagcaacgccaacagccggggccccagcttctctagcggcctggtgccactgtccctgagagggagccacatgggccccatggagatctacaaaaccgtgagcgcctggaagcggcagcctgtgcgcgtgctgagcctgtttcggaatatcgataaagtcctgaaaagcctgggattcctggagagcggctctggctccggcggtggcaccctgaagtacgtggaggatgtgacaaacgtggtcagacgggatgtggagaagtggggccccttcgatctggtgtacggcagcacccaacccctgggcagctcttgtgaccggtgccctggctggtacatgtttcagttccaccggatcctgcagtacgccctgccgagacaggagtcccagcggccattcttttggattttcatggacaacttgctgctgaccgaggatgaccaggaaactaccactcggttcctgcagaccgaagccgtgaccctgcaggacgtgagaggccgggactaccagaacgccatgcgggtgtggtccaacatccctggactgaaaagcaagcacgcacctctgacccctaaagaagaggagtacctgcaggcccaggtgcggagcagaagcaagctggacgcccctaaggtggatctgctggtgaagaattgcctcctgcccctgagagagtacttcaagtatttcagccagaatagtctgcccctgggaggcagcggcggcggcttccaggagctggtgaccttcagggacgtggccatcgacttcagcggccaggagtgggagtacctggacccccaccagagggacctgtacagggacgtgatgctggagaactacaggaacctggtgagcctgggccacagcatcagcaagcccgtgctggtggacctgctggagcagggcaaggagccctggatgatcctgagggaggagacccagttccccggcaaggaggacaggggccacggcggcccaagcagcggcgcccctcctcccagcggcggcagcccagccggctccccaacctctaccgaggagggcacctctgagtccgccacccccgagagcggccctggcacctccaccgagcccagcgagggcagcgcacccggcagccctgccggcagccccacctccacagaggagggaaccagcaccgagcccagcgaaggcagcgccccaggcaccagcaccgagcctagtgagcaggagattaaacggatcaacaagatcagaagaagacttgtgaaagacagcaacaccaagaaggccggcaagacaggccccatgaaaaccctgctggttagagtgatgacacccgatctgagagagcggctggaaaacctgagaaagaagcctgaaaatatcccccagcccatcagcaatacatctagagccaacctgaataagctgctgaccgattacaccgaaatgaagaaggcgatcctgcatgtgtactgggaagagttccagaaggaccctgtgggcctgatgagccgggtggcccagcctgccagcaagaagatcgatcagaacaagctgaaacctgagatggacgagaagggcaacctgaccaccgccggctttgcctgctctcagtgtggccagcccctgttcgtgtacaagctggagcaggtgtctgagaagggcaaggcttacaccaactacttcggacggtgcaatgtggccgagcacgaaaagctgatcctgctggcccagctgaagcccgagaaggatagcgacgaagccgtgacatatagcctgggaaagtttgggcagagggccctggatttctacagcattcatgtgaccaaggagtccacccaccccgtgaagcccctggcccagatcgccggaaacagatacgcctccggacctgtgggaaaggccctgagcgacgcatgtatgggcacaatcgcctccttcctgtctaagtaccaggacatcatcatcgaacaccagaaggtggtgaagggcaaccagaagagactggagagcctgcgggagctggccggcaaggaaaacctggaataccctagcgtgaccctgccacctcagcctcacaccaaggagggcgttgatgcctacaacgaagtgatcgcccgggtgcgaatgtgggtgaacctgaacctgtggcagaagctgaagctaagcagagatgatgccaagcctctgctgagactgaagggattcccttcctttcctctggtcgagagacaggccaacgaagtggactggtgggacatggtgtgtaacgtgaagaagctgatcaacgagaaaaaggaggatggcaaggtgttttggcagaatctggctggctacaagagacaggaagccctgagaccatacctgagcagcgaggaagatcggaagaagggaaagaaattcgctcggtaccagctgggcgacctgctgctgcacctggaaaagaagcacggcgaggactggggaaaggtgtacgacgaggcctgggagcggattgacaagaaagtggaaggcctgagcaagcacatcaagctggaagaggaacggagaagcgaggacgcccagagcaaggccgccctgaccgactggctgcgggctaaggccagcttcgtgatcgagggcctgaaggaggccgacaaggacgagttctgcagatgcgagctgaagctgcagaagtggtacggggacctgcggggaaagcccttcgccatcgaagccgagaacagcatcctggacatcagcggcttcagcaagcagtacaactgtgccttcatctggcagaaggacggcgtgaagaagctgaacctgtacctgatcatcaactacttcaagggcggcaagctgcggttcaagaagatcaaacctgaagccttcgaagccaacagattctacaccgtgatcaacaaaaagagcggcgagatcgtgcccatggaggtgaacttcaacttcgacgaccccaacctgatcatcctgcctctggcctttggcaagagacagggcagagaattcatctggaacgacctgctgtccctggaaaccggcagcctgaagctggccaacggaagagtgatcgagaagacactgtacaacagaagaacccggcaggatgagcctgccctgttcgtggccctgaccttcgagcggcgggaggtcctggactcctccaatatcaaaccaatgaacctgatcggcgtggcaagaggcgaaaacatccccgccgtgatcgccctgaccgaccccgagggctgcccactgagccggtttaaggatagcctgggaaacccaacccacatcctgagaatcggcgagagctataaggagaagcagcggaccatccaggccaagaaggaggtggagcagcggagagccggcggctacagccggaagtacgccagcaaagccaagaatctggcagacgatatggtgagaaacaccgctagagatctgctgtactacgccgtgacccaggatgccatgctgatcttcgccaacctgagccggggcttcggccggcagggcaagcggaccttcatggccgagagacagtacacacggatggaggactggctgaccgccaagctggcctacgagggcctgagcaagacctacctgtccaagacactggcccagtacacctccaagacatgcagcaactgtgggtttaccatcaccagcgccgactacgacagggtgctggagaagctgaagaagacagcaacaggctggatgaccacaattaacggcaaggagctgaaggtggagggccagattacctactacaacagatacaagagacagaacgtagtcaaggacctgtccgtcgagctggatagactgagcgaagaatctgtgaacaacgacatctcctcctggacaaagggcagaagcggagaagctctgagcctcctgaagaaaagattctcccatagacccgtgcaggagaagttcgtgtgcctgaactgcggcttcgagacacacgcagccgagcaagccgccctgaacatcgccagatcctggctgttcctgcggagccaggagtacaagaaataccagacaaacaagacaaccggcaacaccgataagagagccttcgtcgagacctggcagtccttttaccggaagaagcttaaggaggtgtggaaacctgccgtgcggtctggcggatctggcggaggctccaccagccccaagaaaaagagaaaagtctaagctgccttctgcggggcttgccttctggccatgcccttcttctctcccttgcacctgtacctcttggtctttgaataaagcctgagtaggaaggctagcaaaaaaaaaaaaaaaaaaaaaaaaaaaaaaaaaaaaaaaaaaaaaaaaaaaaaaaaaaaaaaaaaaaaaaaaaaaaaaaa

SEQ ID NO: 12842 - RNA, 5785 nt, synthetic construct
  source 1..5785: mol_type = other RNA
aggaaataagagagaaaagaagagtaagaagaaatataagagccaccatggcccctaagaagaagcgtaaagtgagccggatggaacgcctcgtctacgaggtgcggcagaagtgcagaaacatcgaggacatctgcatctcctgcggatctctgaacgtgaccctggagcacccactgttcatcggcggcatgtgccagaactgtaaaaactgttttctggagtgtgcctatcaatacgacgatgacggctaccagagctactgcaccatctgttgcggcggaagagaggtgctgatgtgtggaaataacaactgctgccggtgcttctgcgtggaatgcgtggacctgctggtgggccccggcgccgcccaggccgctattaaggaagatccttggaactgctacatgtgcggccacaagggcacatacggcctgctgagacggagagaggactggcctagcagactgcagatgttcttcgccaataaccacgaccaggagttcgacccccctaaggtgtaccctcccgtccccgccgagaagagaaagcccatccgggtcctgagcctgttcgatggcatcgccaccggtctgctggtgctgaaggacctgggcatccaggtggataggtacattgcctccgaggtgtgcgaggactccatcaccgtgggaatggtgcgtcatcagggcaagatcatgtacgtgggcgacgtgcggagcgtgacacagaagcatatccaggagtggggccctttcgacctggtgatcggcggcagcccttgcaatgacctgagcatcgtgaacccagcccggaagggcctgtacgagggaaccggcagactgttcttcgagttttacagactgctgcacgacgcccggcctaaggaaggcgacgaccggcccttcttttggctgttcgagaatgtggtggccatgggagtcagcgacaagcgggatattagccggttcctggagagcaaccccgtgatgatcgatgccaaggaagtgagcgccgcccaccgggccagatacttctggggcaatctgcctggcatgaacagacccctggccagcaccgtgaacgacaagctggagctgcaggagtgcctggagcacggccggatcgccaagttcagcaaggtgagaaccatcaccacccgaagcaacagcatcaaacaaggcaaggaccagcactttcctgtgttcatgaacgagaaggaggacatcctgtggtgtaccgagatggagagagtgttcgggttcccagtccactacacagatgtcagcaacatgtctagactggccagacagagactgctgggaagaagctggtccgtccctgtgatcagacacctgttcgcccctctgaaggagtacttcgcctgcgtgagcagcggcaacagcaacgccaacagccggggccccagcttctctagcggcctggtgccactgtccctgagagggagccacatgggccccatggagatctacaaaaccgtgagcgcctggaagcggcagcctgtgcgcgtgctgagcctgtttcggaatatcgataaagtcctgaaaagcctgggattcctggagagcggctctggctccggcggtggcaccctgaagtacgtggaggatgtgacaaacgtggtcagacgggatgtggagaagtggggccccttcgatctggtgtacggcagcacccaacccctgggcagctcttgtgaccggtgccctggctggtacatgtttcagttccaccggatcctgcagtacgccctgccgagacaggagtcccagcggccattcttttggattttcatggacaacttgctgctgaccgaggatgaccaggaaactaccactcggttcctgcagaccgaagccgtgaccctgcaggacgtgagaggccgggactaccagaacgccatgcgggtgtggtccaacatccctggactgaaaagcaagcacgcacctctgacccctaaagaagaggagtacctgcaggcccaggtgcggagcagaagcaagctggacgcccctaaggtggatctgctggtgaagaattgcctcctgcccctgagagagtacttcaagtatttcagccagaatagtctgcccctgggaggcagcggcggcggcctgctgaccttcgaggacgtggccgtgtacttcaccgaggaggagtgggccctgctggaccccaaccagaagatcctgtacaacgacgtgatgcaggagaactacgagaacgtgatctgcctgggcctgaagctgaagaacgacaccggcaacgaccagcccaccagcgtgagcaccctggagatccaggccagcggctgcaaggtgctgaggaaggccaggatcaaggtggcccagaagaccggcggcccaagcagcggcgcccctcctcccagcggcggcagcccagccggctccccaacctctaccgaggagggcacctctgagtccgccacccccgagagcggccctggcacctccaccgagcccagcgagggcagcgcacccggcagccctgccggcagccccacctccacagaggagggaaccagcaccgagcccagcgaaggcagcgccccaggcaccagcaccgagcctagtgagcaggagattaaacggatcaacaagatcagaagaagacttgtgaaagacagcaacaccaagaaggccggcaagacaggccccatgaaaaccctgctggttagagtgatgacacccgatctgagagagcggctggaaaacctgagaaagaagcctgaaaatatcccccagcccatcagcaatacatctagagccaacctgaataagctgctgaccgattacaccgaaatgaagaaggcgatcctgcatgtgtactgggaagagttccagaaggaccctgtgggcctgatgagccgggtggcccagcctgccagcaagaagatcgatcagaacaagctgaaacctgagatggacgagaagggcaacctgaccaccgccggctttgcctgctctcagtgtggccagcccctgttcgtgtacaagctggagcaggtgtctgagaagggcaaggcttacaccaactacttcggacggtgcaatgtggccgagcacgaaaagctgatcctgctggcccagctgaagcccgagaaggatagcgacgaagccgtgacatatagcctgggaaagtttgggcagagggccctggatttctacagcattcatgtgaccaaggagtccacccaccccgtgaagcccctggcccagatcgccggaaacagatacgcctccggacctgtgggaaaggccctgagcgacgcatgtatgggcacaatcgcctccttcctgtctaagtaccaggacatcatcatcgaacaccagaaggtggtgaagggcaaccagaagagactggagagcctgcgggagctggccggcaaggaaaacctggaataccctagcgtgaccctgccacctcagcctcacaccaaggagggcgttgatgcctacaacgaagtgatcgcccgggtgcgaatgtgggtgaacctgaacctgtggcagaagctgaagctaagcagagatgatgccaagcctctgctgagactgaagggattcccttcctttcctctggtcgagagacaggccaacgaagtggactggtgggacatggtgtgtaacgtgaagaagctgatcaacgagaaaaaggaggatggcaaggtgttttggcagaatctggctggctacaagagacaggaagccctgagaccatacctgagcagcgaggaagatcggaagaagggaaagaaattcgctcggtaccagctgggcgacctgctgctgcacctggaaaagaagcacggcgaggactggggaaaggtgtacgacgaggcctgggagcggattgacaagaaagtggaaggcctgagcaagcacatcaagctggaagaggaacggagaagcgaggacgcccagagcaaggccgccctgaccgactggctgcgggctaaggccagcttcgtgatcgagggcctgaaggaggccgacaaggacgagttctgcagatgcgagctgaagctgcagaagtggtacggggacctgcggggaaagcccttcgccatcgaagccgagaacagcatcctggacatcagcggcttcagcaagcagtacaactgtgccttcatctggcagaaggacggcgtgaagaagctgaacctgtacctgatcatcaactacttcaagggcggcaagctgcggttcaagaagatcaaacctgaagccttcgaagccaacagattctacaccgtgatcaacaaaaagagcggcgagatcgtgcccatggaggtgaacttcaacttcgacgaccccaacctgatcatcctgcctctggcctttggcaagagacagggcagagaattcatctggaacgacctgctgtccctggaaaccggcagcctgaagctggccaacggaagagtgatcgagaagacactgtacaacagaagaacccggcaggatgagcctgccctgttcgtggccctgaccttcgagcggcgggaggtcctggactcctccaatatcaaaccaatgaacctgatcggcgtggcaagaggcgaaaacatccccgccgtgatcgccctgaccgaccccgagggctgcccactgagccggtttaaggatagcctgggaaacccaacccacatcctgagaatcggcgagagctataaggagaagcagcggaccatccaggccaagaaggaggtggagcagcggagagccggcggctacagccggaagtacgccagcaaagccaagaatctggcagacgatatggtgagaaacaccgctagagatctgctgtactacgccgtgacccaggatgccatgctgatcttcgccaacctgagccggggcttcggccggcagggcaagcggaccttcatggccgagagacagtacacacggatggaggactggctgaccgccaagctggcctacgagggcctgagcaagacctacctgtccaagacactggcccagtacacctccaagacatgcagcaactgtgggtttaccatcaccagcgccgactacgacagggtgctggagaagctgaagaagacagcaacaggctggatgaccacaattaacggcaaggagctgaaggtggagggccagattacctactacaacagatacaagagacagaacgtagtcaaggacctgtccgtcgagctggatagactgagcgaagaatctgtgaacaacgacatctcctcctggacaaagggcagaagcggagaagctctgagcctcctgaagaaaagattctcccatagacccgtgcaggagaagttcgtgtgcctgaactgcggcttcgagacacacgcagccgagcaagccgccctgaacatcgccagatcctggctgttcctgcggagccaggagtacaagaaataccagacaaacaagacaaccggcaacaccgataagagagccttcgtcgagacctggcagtccttttaccggaagaagcttaaggaggtgtggaaacctgccgtgcggtctggcggatctggcggaggctccaccagccccaagaaaaagagaaaagtctaagctgccttctgcggggcttgccttctggccatgcccttcttctctcccttgcacctgtacctcttggtctttgaataaagcctgagtaggaaggctagcaaaaaaaaaaaaaaaaaaaaaaaaaaaaaaaaaaaaaaaaaaaaaaaaaaaaaaaaaaaaaaaaaaaaaaaaaaaaaaaa

SEQ ID NO: 12843 - RNA, 5785 nt, synthetic construct
  source 1..5785: mol_type = other RNA
aggaaataagagagaaaagaagagtaagaagaaatataagagccaccatggcccctaagaagaagcgtaaagtgagccggatggaacgcctcgtctacgaggtgcggcagaagtgcagaaacatcgaggacatctgcatctcctgcggatctctgaacgtgaccctggagcacccactgttcatcggcggcatgtgccagaactgtaaaaactgttttctggagtgtgcctatcaatacgacgatgacggctaccagagctactgcaccatctgttgcggcggaagagaggtgctgatgtgtggaaataacaactgctgccggtgcttctgcgtggaatgcgtggacctgctggtgggccccggcgccgcccaggccgctattaaggaagatccttggaactgctacatgtgcggccacaagggcacatacggcctgctgagacggagagaggactggcctagcagactgcagatgttcttcgccaataaccacgaccaggagttcgacccccctaaggtgtaccctcccgtccccgccgagaagagaaagcccatccgggtcctgagcctgttcgatggcatcgccaccggtctgctggtgctgaaggacctgggcatccaggtggataggtacattgcctccgaggtgtgcgaggactccatcaccgtgggaatggtgcgtcatcagggcaagatcatgtacgtgggcgacgtgcggagcgtgacacagaagcatatccaggagtggggccctttcgacctggtgatcggcggcagcccttgcaatgacctgagcatcgtgaacccagcccggaagggcctgtacgagggaaccggcagactgttcttcgagttttacagactgctgcacgacgcccggcctaaggaaggcgacgaccggcccttcttttggctgttcgagaatgtggtggccatgggagtcagcgacaagcgggatattagccggttcctggagagcaaccccgtgatgatcgatgccaaggaagtgagcgccgcccaccgggccagatacttctggggcaatctgcctggcatgaacagacccctggccagcaccgtgaacgacaagctggagctgcaggagtgcctggagcacggccggatcgccaagttcagcaaggtgagaaccatcaccacccgaagcaacagcatcaaacaaggcaaggaccagcactttcctgtgttcatgaacgagaaggaggacatcctgtggtgtaccgagatggagagagtgttcgggttcccagtccactacacagatgtcagcaacatgtctagactggccagacagagactgctgggaagaagctggtccgtccctgtgatcagacacctgttcgcccctctgaaggagtacttcgcctgcgtgagcagcggcaacagcaacgccaacagccggggccccagcttctctagcggcctggtgccactgtccctgagagggagccacatgggccccatggagatctacaaaaccgtgagcgcctggaagcggcagcctgtgcgcgtgctgagcctgtttcggaatatcgataaagtcctgaaaagcctgggattcctggagagcggctctggctccggcggtggcaccctgaagtacgtggaggatgtgacaaacgtggtcagacgggatgtggagaagtggggccccttcgatctggtgtacggcagcacccaacccctgggcagctcttgtgaccggtgccctggctggtacatgtttcagttccaccggatcctgcagtacgccctgccgagacaggagtcccagcggccattcttttggattttcatggacaacttgctgctgaccgaggatgaccaggaaactaccactcggttcctgcagaccgaagccgtgaccctgcaggacgtgagaggccgggactaccagaacgccatgcgggtgtggtccaacatccctggactgaaaagcaagcacgcacctctgacccctaaagaagaggagtacctgcaggcccaggtgcggagcagaagcaagctggacgcccctaaggtggatctgctggtgaagaattgcctcctgcccctgagagagtacttcaagtatttcagccagaatagtctgcccctgggaggcagcggcggcggcagccagggcctggtgaccttcagggacgtggccctggacttcagccaggaggagtgggagtggctggaccagagccagaaggacctgtacagggacgtgatgctggagaactacaggaacctggtgtggctgggcctgagcatcagcaagcccaacatgatcagcctgctggagcagggcaaggagccctggatggtggagaaggagatgagcgacggccagtgcgccgactgggacagctggggcggcccaagcagcggcgcccctcctcccagcggcggcagcccagccggctccccaacctctaccgaggagggcacctctgagtccgccacccccgagagcggccctggcacctccaccgagcccagcgagggcagcgcacccggcagccctgccggcagccccacctccacagaggagggaaccagcaccgagcccagcgaaggcagcgccccaggcaccagcaccgagcctagtgagcaggagattaaacggatcaacaagatcagaagaagacttgtgaaagacagcaacaccaagaaggccggcaagacaggccccatgaaaaccctgctggttagagtgatgacacccgatctgagagagcggctggaaaacctgagaaagaagcctgaaaatatcccccagcccatcagcaatacatctagagccaacctgaataagctgctgaccgattacaccgaaatgaagaaggcgatcctgcatgtgtactgggaagagttccagaaggaccctgtgggcctgatgagccgggtggcccagcctgccagcaagaagatcgatcagaacaagctgaaacctgagatggacgagaagggcaacctgaccaccgccggctttgcctgctctcagtgtggccagcccctgttcgtgtacaagctggagcaggtgtctgagaagggcaaggcttacaccaactacttcggacggtgcaatgtggccgagcacgaaaagctgatcctgctggcccagctgaagcccgagaaggatagcgacgaagccgtgacatatagcctgggaaagtttgggcagagggccctggatttctacagcattcatgtgaccaaggagtccacccaccccgtgaagcccctggcccagatcgccggaaacagatacgcctccggacctgtgggaaaggccctgagcgacgcatgtatgggcacaatcgcctccttcctgtctaagtaccaggacatcatcatcgaacaccagaaggtggtgaagggcaaccagaagagactggagagcctgcgggagctggccggcaaggaaaacctggaataccctagcgtgaccctgccacctcagcctcacaccaaggagggcgttgatgcctacaacgaagtgatcgcccgggtgcgaatgtgggtgaacctgaacctgtggcagaagctgaagctaagcagagatgatgccaagcctctgctgagactgaagggattcccttcctttcctctggtcgagagacaggccaacgaagtggactggtgggacatggtgtgtaacgtgaagaagctgatcaacgagaaaaaggaggatggcaaggtgttttggcagaatctggctggctacaagagacaggaagccctgagaccatacctgagcagcgaggaagatcggaagaagggaaagaaattcgctcggtaccagctgggcgacctgctgctgcacctggaaaagaagcacggcgaggactggggaaaggtgtacgacgaggcctgggagcggattgacaagaaagtggaaggcctgagcaagcacatcaagctggaagaggaacggagaagcgaggacgcccagagcaaggccgccctgaccgactggctgcgggctaaggccagcttcgtgatcgagggcctgaaggaggccgacaaggacgagttctgcagatgcgagctgaagctgcagaagtggtacggggacctgcggggaaagcccttcgccatcgaagccgagaacagcatcctggacatcagcggcttcagcaagcagtacaactgtgccttcatctggcagaaggacggcgtgaagaagctgaacctgtacctgatcatcaactacttcaagggcggcaagctgcggttcaagaagatcaaacctgaagccttcgaagccaacagattctacaccgtgatcaacaaaaagagcggcgagatcgtgcccatggaggtgaacttcaacttcgacgaccccaacctgatcatcctgcctctggcctttggcaagagacagggcagagaattcatctggaacgacctgctgtccctggaaaccggcagcctgaagctggccaacggaagagtgatcgagaagacactgtacaacagaagaacccggcaggatgagcctgccctgttcgtggccctgaccttcgagcggcgggaggtcctggactcctccaatatcaaaccaatgaacctgatcggcgtggcaagaggcgaaaacatccccgccgtgatcgccctgaccgaccccgagggctgcccactgagccggtttaaggatagcctgggaaacccaacccacatcctgagaatcggcgagagctataaggagaagcagcggaccatccaggccaagaaggaggtggagcagcggagagccggcggctacagccggaagtacgccagcaaagccaagaatctggcagacgatatggtgagaaacaccgctagagatctgctgtactacgccgtgacccaggatgccatgctgatcttcgccaacctgagccggggcttcggccggcagggcaagcggaccttcatggccgagagacagtacacacggatggaggactggctgaccgccaagctggcctacgagggcctgagcaagacctacctgtccaagacactggcccagtacacctccaagacatgcagcaactgtgggtttaccatcaccagcgccgactacgacagggtgctggagaagctgaagaagacagcaacaggctggatgaccacaattaacggcaaggagctgaaggtggagggccagattacctactacaacagatacaagagacagaacgtagtcaaggacctgtccgtcgagctggatagactgagcgaagaatctgtgaacaacgacatctcctcctggacaaagggcagaagcggagaagctctgagcctcctgaagaaaagattctcccatagacccgtgcaggagaagttcgtgtgcctgaactgcggcttcgagacacacgcagccgagcaagccgccctgaacatcgccagatcctggctgttcctgcggagccaggagtacaagaaataccagacaaacaagacaaccggcaacaccgataagagagccttcgtcgagacctggcagtccttttaccggaagaagcttaaggaggtgtggaaacctgccgtgcggtctggcggatctggcggaggctccaccagccccaagaaaaagagaaaagtctaagctgccttctgcggggcttgccttctggccatgcccttcttctctcccttgcacctgtacctcttggtctttgaataaagcctgagtaggaaggctagcaaaaaaaaaaaaaaaaaaaaaaaaaaaaaaaaaaaaaaaaaaaaaaaaaaaaaaaaaaaaaaaaaaaaaaaaaaaaaaaa

SEQ ID NO: 12844 - RNA, 5785 nt, synthetic construct
  source 1..5785: mol_type = other RNA
aggaaataagagagaaaagaagagtaagaagaaatataagagccaccatggcccctaagaagaagcgtaaagtgagccggatggaacgcctcgtctacgaggtgcggcagaagtgcagaaacatcgaggacatctgcatctcctgcggatctctgaacgtgaccctggagcacccactgttcatcggcggcatgtgccagaactgtaaaaactgttttctggagtgtgcctatcaatacgacgatgacggctaccagagctactgcaccatctgttgcggcggaagagaggtgctgatgtgtggaaataacaactgctgccggtgcttctgcgtggaatgcgtggacctgctggtgggccccggcgccgcccaggccgctattaaggaagatccttggaactgctacatgtgcggccacaagggcacatacggcctgctgagacggagagaggactggcctagcagactgcagatgttcttcgccaataaccacgaccaggagttcgacccccctaaggtgtaccctcccgtccccgccgagaagagaaagcccatccgggtcctgagcctgttcgatggcatcgccaccggtctgctggtgctgaaggacctgggcatccaggtggataggtacattgcctccgaggtgtgcgaggactccatcaccgtgggaatggtgcgtcatcagggcaagatcatgtacgtgggcgacgtgcggagcgtgacacagaagcatatccaggagtggggccctttcgacctggtgatcggcggcagcccttgcaatgacctgagcatcgtgaacccagcccggaagggcctgtacgagggaaccggcagactgttcttcgagttttacagactgctgcacgacgcccggcctaaggaaggcgacgaccggcccttcttttggctgttcgagaatgtggtggccatgggagtcagcgacaagcgggatattagccggttcctggagagcaaccccgtgatgatcgatgccaaggaagtgagcgccgcccaccgggccagatacttctggggcaatctgcctggcatgaacagacccctggccagcaccgtgaacgacaagctggagctgcaggagtgcctggagcacggccggatcgccaagttcagcaaggtgagaaccatcaccacccgaagcaacagcatcaaacaaggcaaggaccagcactttcctgtgttcatgaacgagaaggaggacatcctgtggtgtaccgagatggagagagtgttcgggttcccagtccactacacagatgtcagcaacatgtctagactggccagacagagactgctgggaagaagctggtccgtccctgtgatcagacacctgttcgcccctctgaaggagtacttcgcctgcgtgagcagcggcaacagcaacgccaacagccggggccccagcttctctagcggcctggtgccactgtccctgagagggagccacatgggccccatggagatctacaaaaccgtgagcgcctggaagcggcagcctgtgcgcgtgctgagcctgtttcggaatatcgataaagtcctgaaaagcctgggattcctggagagcggctctggctccggcggtggcaccctgaagtacgtggaggatgtgacaaacgtggtcagacgggatgtggagaagtggggccccttcgatctggtgtacggcagcacccaacccctgggcagctcttgtgaccggtgccctggctggtacatgtttcagttccaccggatcctgcagtacgccctgccgagacaggagtcccagcggccattcttttggattttcatggacaacttgctgctgaccgaggatgaccaggaaactaccactcggttcctgcagaccgaagccgtgaccctgcaggacgtgagaggccgggactaccagaacgccatgcgggtgtggtccaacatccctggactgaaaagcaagcacgcacctctgacccctaaagaagaggagtacctgcaggcccaggtgcggagcagaagcaagctggacgcccctaaggtggatctgctggtgaagaattgcctcctgcccctgagagagtacttcaagtatttcagccagaatagtctgcccctgggaggcagcggcggcggccaggccgaggtgaccttcgaggacgtggccgtgttcctgagccaggaggagtggggcctgctgggccccgcccagaagggcctgtacagggaggtgatgctggagacctacaggaacctggtgagcctgggcgccggcctggccggccccaagcccgaggtgatcgtgcacctggagaggggcgacgagctgtgggtgctggacatgaggggcgccgagcagcccagcgtggacggcagcgccggcggcccaagcagcggcgcccctcctcccagcggcggcagcccagccggctccccaacctctaccgaggagggcacctctgagtccgccacccccgagagcggccctggcacctccaccgagcccagcgagggcagcgcacccggcagccctgccggcagccccacctccacagaggagggaaccagcaccgagcccagcgaaggcagcgccccaggcaccagcaccgagcctagtgagcaggagattaaacggatcaacaagatcagaagaagacttgtgaaagacagcaacaccaagaaggccggcaagacaggccccatgaaaaccctgctggttagagtgatgacacccgatctgagagagcggctggaaaacctgagaaagaagcctgaaaatatcccccagcccatcagcaatacatctagagccaacctgaataagctgctgaccgattacaccgaaatgaagaaggcgatcctgcatgtgtactgggaagagttccagaaggaccctgtgggcctgatgagccgggtggcccagcctgccagcaagaagatcgatcagaacaagctgaaacctgagatggacgagaagggcaacctgaccaccgccggctttgcctgctctcagtgtggccagcccctgttcgtgtacaagctggagcaggtgtctgagaagggcaaggcttacaccaactacttcggacggtgcaatgtggccgagcacgaaaagctgatcctgctggcccagctgaagcccgagaaggatagcgacgaagccgtgacatatagcctgggaaagtttgggcagagggccctggatttctacagcattcatgtgaccaaggagtccacccaccccgtgaagcccctggcccagatcgccggaaacagatacgcctccggacctgtgggaaaggccctgagcgacgcatgtatgggcacaatcgcctccttcctgtctaagtaccaggacatcatcatcgaacaccagaaggtggtgaagggcaaccagaagagactggagagcctgcgggagctggccggcaaggaaaacctggaataccctagcgtgaccctgccacctcagcctcacaccaaggagggcgttgatgcctacaacgaagtgatcgcccgggtgcgaatgtgggtgaacctgaacctgtggcagaagctgaagctaagcagagatgatgccaagcctctgctgagactgaagggattcccttcctttcctctggtcgagagacaggccaacgaagtggactggtgggacatggtgtgtaacgtgaagaagctgatcaacgagaaaaaggaggatggcaaggtgttttggcagaatctggctggctacaagagacaggaagccctgagaccatacctgagcagcgaggaagatcggaagaagggaaagaaattcgctcggtaccagctgggcgacctgctgctgcacctggaaaagaagcacggcgaggactggggaaaggtgtacgacgaggcctgggagcggattgacaagaaagtggaaggcctgagcaagcacatcaagctggaagaggaacggagaagcgaggacgcccagagcaaggccgccctgaccgactggctgcgggctaaggccagcttcgtgatcgagggcctgaaggaggccgacaaggacgagttctgcagatgcgagctgaagctgcagaagtggtacggggacctgcggggaaagcccttcgccatcgaagccgagaacagcatcctggacatcagcggcttcagcaagcagtacaactgtgccttcatctggcagaaggacggcgtgaagaagctgaacctgtacctgatcatcaactacttcaagggcggcaagctgcggttcaagaagatcaaacctgaagccttcgaagccaacagattctacaccgtgatcaacaaaaagagcggcgagatcgtgcccatggaggtgaacttcaacttcgacgaccccaacctgatcatcctgcctctggcctttggcaagagacagggcagagaattcatctggaacgacctgctgtccctggaaaccggcagcctgaagctggccaacggaagagtgatcgagaagacactgtacaacagaagaacccggcaggatgagcctgccctgttcgtggccctgaccttcgagcggcgggaggtcctggactcctccaatatcaaaccaatgaacctgatcggcgtggcaagaggcgaaaacatccccgccgtgatcgccctgaccgaccccgagggctgcccactgagccggtttaaggatagcctgggaaacccaacccacatcctgagaatcggcgagagctataaggagaagcagcggaccatccaggccaagaaggaggtggagcagcggagagccggcggctacagccggaagtacgccagcaaagccaagaatctggcagacgatatggtgagaaacaccgctagagatctgctgtactacgccgtgacccaggatgccatgctgatcttcgccaacctgagccggggcttcggccggcagggcaagcggaccttcatggccgagagacagtacacacggatggaggactggctgaccgccaagctggcctacgagggcctgagcaagacctacctgtccaagacactggcccagtacacctccaagacatgcagcaactgtgggtttaccatcaccagcgccgactacgacagggtgctggagaagctgaagaagacagcaacaggctggatgaccacaattaacggcaaggagctgaaggtggagggccagattacctactacaacagatacaagagacagaacgtagtcaaggacctgtccgtcgagctggatagactgagcgaagaatctgtgaacaacgacatctcctcctggacaaagggcagaagcggagaagctctgagcctcctgaagaaaagattctcccatagacccgtgcaggagaagttcgtgtgcctgaactgcggcttcgagacacacgcagccgagcaagccgccctgaacatcgccagatcctggctgttcctgcggagccaggagtacaagaaataccagacaaacaagacaaccggcaacaccgataagagagccttcgtcgagacctggcagtccttttaccggaagaagcttaaggaggtgtggaaacctgccgtgcggtctggcggatctggcggaggctccaccagccccaagaaaaagagaaaagtctaagctgccttctgcggggcttgccttctggccatgcccttcttctctcccttgcacctgtacctcttggtctttgaataaagcctgagtaggaaggctagcaaaaaaaaaaaaaaaaaaaaaaaaaaaaaaaaaaaaaaaaaaaaaaaaaaaaaaaaaaaaaaaaaaaaaaaaaaaaaaaa

SEQ ID NO: 12845 - RNA, 5785 nt, synthetic construct
  source 1..5785: mol_type = other RNA
aggaaataagagagaaaagaagagtaagaagaaatataagagccaccatggcccctaagaagaagcgtaaagtgagccggatggaacgcctcgtctacgaggtgcggcagaagtgcagaaacatcgaggacatctgcatctcctgcggatctctgaacgtgaccctggagcacccactgttcatcggcggcatgtgccagaactgtaaaaactgttttctggagtgtgcctatcaatacgacgatgacggctaccagagctactgcaccatctgttgcggcggaagagaggtgctgatgtgtggaaataacaactgctgccggtgcttctgcgtggaatgcgtggacctgctggtgggccccggcgccgcccaggccgctattaaggaagatccttggaactgctacatgtgcggccacaagggcacatacggcctgctgagacggagagaggactggcctagcagactgcagatgttcttcgccaataaccacgaccaggagttcgacccccctaaggtgtaccctcccgtccccgccgagaagagaaagcccatccgggtcctgagcctgttcgatggcatcgccaccggtctgctggtgctgaaggacctgggcatccaggtggataggtacattgcctccgaggtgtgcgaggactccatcaccgtgggaatggtgcgtcatcagggcaagatcatgtacgtgggcgacgtgcggagcgtgacacagaagcatatccaggagtggggccctttcgacctggtgatcggcggcagcccttgcaatgacctgagcatcgtgaacccagcccggaagggcctgtacgagggaaccggcagactgttcttcgagttttacagactgctgcacgacgcccggcctaaggaaggcgacgaccggcccttcttttggctgttcgagaatgtggtggccatgggagtcagcgacaagcgggatattagccggttcctggagagcaaccccgtgatgatcgatgccaaggaagtgagcgccgcccaccgggccagatacttctggggcaatctgcctggcatgaacagacccctggccagcaccgtgaacgacaagctggagctgcaggagtgcctggagcacggccggatcgccaagttcagcaaggtgagaaccatcaccacccgaagcaacagcatcaaacaaggcaaggaccagcactttcctgtgttcatgaacgagaaggaggacatcctgtggtgtaccgagatggagagagtgttcgggttcccagtccactacacagatgtcagcaacatgtctagactggccagacagagactgctgggaagaagctggtccgtccctgtgatcagacacctgttcgcccctctgaaggagtacttcgcctgcgtgagcagcggcaacagcaacgccaacagccggggccccagcttctctagcggcctggtgccactgtccctgagagggagccacatgggccccatggagatctacaaaaccgtgagcgcctggaagcggcagcctgtgcgcgtgctgagcctgtttcggaatatcgataaagtcctgaaaagcctgggattcctggagagcggctctggctccggcggtggcaccctgaagtacgtggaggatgtgacaaacgtggtcagacgggatgtggagaagtggggccccttcgatctggtgtacggcagcacccaacccctgggcagctcttgtgaccggtgccctggctggtacatgtttcagttccaccggatcctgcagtacgccctgccgagacaggagtcccagcggccattcttttggattttcatggacaacttgctgctgaccgaggatgaccaggaaactaccactcggttcctgcagaccgaagccgtgaccctgcaggacgtgagaggccgggactaccagaacgccatgcgggtgtggtccaacatccctggactgaaaagcaagcacgcacctctgacccctaaagaagaggagtacctgcaggcccaggtgcggagcagaagcaagctggacgcccctaaggtggatctgctggtgaagaattgcctcctgcccctgagagagtacttcaagtatttcagccagaatagtctgcccctgggaggcagcggcggcggcatgacccccggcccccccggcagcctggagatggagcccctgaccttcaaggacgtggccatcgagttctgcctggaggagtggcagtgcctggacaccgcccagcaggacctgtacaggaacgtgatgctggagaactacaggaacctggtgttcctgggcatcgccgtgagcaagcccgacctgatcacctgcctggagcagggcaaggtgccctggaacaggaagaggcacgagatggtgggcggcccaagcagcggcgcccctcctcccagcggcggcagcccagccggctccccaacctctaccgaggagggcacctctgagtccgccacccccgagagcggccctggcacctccaccgagcccagcgagggcagcgcacccggcagccctgccggcagccccacctccacagaggagggaaccagcaccgagcccagcgaaggcagcgccccaggcaccagcaccgagcctagtgagcaggagattaaacggatcaacaagatcagaagaagacttgtgaaagacagcaacaccaagaaggccggcaagacaggccccatgaaaaccctgctggttagagtgatgacacccgatctgagagagcggctggaaaacctgagaaagaagcctgaaaatatcccccagcccatcagcaatacatctagagccaacctgaataagctgctgaccgattacaccgaaatgaagaaggcgatcctgcatgtgtactgggaagagttccagaaggaccctgtgggcctgatgagccgggtggcccagcctgccagcaagaagatcgatcagaacaagctgaaacctgagatggacgagaagggcaacctgaccaccgccggctttgcctgctctcagtgtggccagcccctgttcgtgtacaagctggagcaggtgtctgagaagggcaaggcttacaccaactacttcggacggtgcaatgtggccgagcacgaaaagctgatcctgctggcccagctgaagcccgagaaggatagcgacgaagccgtgacatatagcctgggaaagtttgggcagagggccctggatttctacagcattcatgtgaccaaggagtccacccaccccgtgaagcccctggcccagatcgccggaaacagatacgcctccggacctgtgggaaaggccctgagcgacgcatgtatgggcacaatcgcctccttcctgtctaagtaccaggacatcatcatcgaacaccagaaggtggtgaagggcaaccagaagagactggagagcctgcgggagctggccggcaaggaaaacctggaataccctagcgtgaccctgccacctcagcctcacaccaaggagggcgttgatgcctacaacgaagtgatcgcccgggtgcgaatgtgggtgaacctgaacctgtggcagaagctgaagctaagcagagatgatgccaagcctctgctgagactgaagggattcccttcctttcctctggtcgagagacaggccaacgaagtggactggtgggacatggtgtgtaacgtgaagaagctgatcaacgagaaaaaggaggatggcaaggtgttttggcagaatctggctggctacaagagacaggaagccctgagaccatacctgagcagcgaggaagatcggaagaagggaaagaaattcgctcggtaccagctgggcgacctgctgctgcacctggaaaagaagcacggcgaggactggggaaaggtgtacgacgaggcctgggagcggattgacaagaaagtggaaggcctgagcaagcacatcaagctggaagaggaacggagaagcgaggacgcccagagcaaggccgccctgaccgactggctgcgggctaaggccagcttcgtgatcgagggcctgaaggaggccgacaaggacgagttctgcagatgcgagctgaagctgcagaagtggtacggggacctgcggggaaagcccttcgccatcgaagccgagaacagcatcctggacatcagcggcttcagcaagcagtacaactgtgccttcatctggcagaaggacggcgtgaagaagctgaacctgtacctgatcatcaactacttcaagggcggcaagctgcggttcaagaagatcaaacctgaagccttcgaagccaacagattctacaccgtgatcaacaaaaagagcggcgagatcgtgcccatggaggtgaacttcaacttcgacgaccccaacctgatcatcctgcctctggcctttggcaagagacagggcagagaattcatctggaacgacctgctgtccctggaaaccggcagcctgaagctggccaacggaagagtgatcgagaagacactgtacaacagaagaacccggcaggatgagcctgccctgttcgtggccctgaccttcgagcggcgggaggtcctggactcctccaatatcaaaccaatgaacctgatcggcgtggcaagaggcgaaaacatccccgccgtgatcgccctgaccgaccccgagggctgcccactgagccggtttaaggatagcctgggaaacccaacccacatcctgagaatcggcgagagctataaggagaagcagcggaccatccaggccaagaaggaggtggagcagcggagagccggcggctacagccggaagtacgccagcaaagccaagaatctggcagacgatatggtgagaaacaccgctagagatctgctgtactacgccgtgacccaggatgccatgctgatcttcgccaacctgagccggggcttcggccggcagggcaagcggaccttcatggccgagagacagtacacacggatggaggactggctgaccgccaagctggcctacgagggcctgagcaagacctacctgtccaagacactggcccagtacacctccaagacatgcagcaactgtgggtttaccatcaccagcgccgactacgacagggtgctggagaagctgaagaagacagcaacaggctggatgaccacaattaacggcaaggagctgaaggtggagggccagattacctactacaacagatacaagagacagaacgtagtcaaggacctgtccgtcgagctggatagactgagcgaagaatctgtgaacaacgacatctcctcctggacaaagggcagaagcggagaagctctgagcctcctgaagaaaagattctcccatagacccgtgcaggagaagttcgtgtgcctgaactgcggcttcgagacacacgcagccgagcaagccgccctgaacatcgccagatcctggctgttcctgcggagccaggagtacaagaaataccagacaaacaagacaaccggcaacaccgataagagagccttcgtcgagacctggcagtccttttaccggaagaagcttaaggaggtgtggaaacctgccgtgcggtctggcggatctggcggaggctccaccagccccaagaaaaagagaaaagtctaagctgccttctgcggggcttgccttctggccatgcccttcttctctcccttgcacctgtacctcttggtctttgaataaagcctgagtaggaaggctagcaaaaaaaaaaaaaaaaaaaaaaaaaaaaaaaaaaaaaaaaaaaaaaaaaaaaaaaaaaaaaaaaaaaaaaaaaaaaaaaa

SEQ ID NO: 12846 - RNA, 5785 nt, synthetic construct
  source 1..5785: mol_type = other RNA
aggaaataagagagaaaagaagagtaagaagaaatataagagccaccatggcccctaagaagaagcgtaaagtgagccggatggaacgcctcgtctacgaggtgcggcagaagtgcagaaacatcgaggacatctgcatctcctgcggatctctgaacgtgaccctggagcacccactgttcatcggcggcatgtgccagaactgtaaaaactgttttctggagtgtgcctatcaatacgacgatgacggctaccagagctactgcaccatctgttgcggcggaagagaggtgctgatgtgtggaaataacaactgctgccggtgcttctgcgtggaatgcgtggacctgctggtgggccccggcgccgcccaggccgctattaaggaagatccttggaactgctacatgtgcggccacaagggcacatacggcctgctgagacggagagaggactggcctagcagactgcagatgttcttcgccaataaccacgaccaggagttcgacccccctaaggtgtaccctcccgtccccgccgagaagagaaagcccatccgggtcctgagcctgttcgatggcatcgccaccggtctgctggtgctgaaggacctgggcatccaggtggataggtacattgcctccgaggtgtgcgaggactccatcaccgtgggaatggtgcgtcatcagggcaagatcatgtacgtgggcgacgtgcggagcgtgacacagaagcatatccaggagtggggccctttcgacctggtgatcggcggcagcccttgcaatgacctgagcatcgtgaacccagcccggaagggcctgtacgagggaaccggcagactgttcttcgagttttacagactgctgcacgacgcccggcctaaggaaggcgacgaccggcccttcttttggctgttcgagaatgtggtggccatgggagtcagcgacaagcgggatattagccggttcctggagagcaaccccgtgatgatcgatgccaaggaagtgagcgccgcccaccgggccagatacttctggggcaatctgcctggcatgaacagacccctggccagcaccgtgaacgacaagctggagctgcaggagtgcctggagcacggccggatcgccaagttcagcaaggtgagaaccatcaccacccgaagcaacagcatcaaacaaggcaaggaccagcactttcctgtgttcatgaacgagaaggaggacatcctgtggtgtaccgagatggagagagtgttcgggttcccagtccactacacagatgtcagcaacatgtctagactggccagacagagactgctgggaagaagctggtccgtccctgtgatcagacacctgttcgcccctctgaaggagtacttcgcctgcgtgagcagcggcaacagcaacgccaacagccggggccccagcttctctagcggcctggtgccactgtccctgagagggagccacatgggccccatggagatctacaaaaccgtgagcgcctggaagcggcagcctgtgcgcgtgctgagcctgtttcggaatatcgataaagtcctgaaaagcctgggattcctggagagcggctctggctccggcggtggcaccctgaagtacgtggaggatgtgacaaacgtggtcagacgggatgtggagaagtggggccccttcgatctggtgtacggcagcacccaacccctgggcagctcttgtgaccggtgccctggctggtacatgtttcagttccaccggatcctgcagtacgccctgccgagacaggagtcccagcggccattcttttggattttcatggacaacttgctgctgaccgaggatgaccaggaaactaccactcggttcctgcagaccgaagccgtgaccctgcaggacgtgagaggccgggactaccagaacgccatgcgggtgtggtccaacatccctggactgaaaagcaagcacgcacctctgacccctaaagaagaggagtacctgcaggcccaggtgcggagcagaagcaagctggacgcccctaaggtggatctgctggtgaagaattgcctcctgcccctgagagagtacttcaagtatttcagccagaatagtctgcccctgggaggcagcggcggcggcatggagctgctgaccttcagggacgtggccatcgagttcagccccgaggagtggaagtgcctggaccccgaccagcagaacctgtacagggacgtgatgctggagaactacaggaacctggtgagcctgggcgtggccatcagcaaccccgacctggtgacctgcctggagcagaggaaggagccctacaacgtgaagatccacaagatcgtggccaggccccccgccgtgtgcagccacagcggcggcccaagcagcggcgcccctcctcccagcggcggcagcccagccggctccccaacctctaccgaggagggcacctctgagtccgccacccccgagagcggccctggcacctccaccgagcccagcgagggcagcgcacccggcagccctgccggcagccccacctccacagaggagggaaccagcaccgagcccagcgaaggcagcgccccaggcaccagcaccgagcctagtgagcaggagattaaacggatcaacaagatcagaagaagacttgtgaaagacagcaacaccaagaaggccggcaagacaggccccatgaaaaccctgctggttagagtgatgacacccgatctgagagagcggctggaaaacctgagaaagaagcctgaaaatatcccccagcccatcagcaatacatctagagccaacctgaataagctgctgaccgattacaccgaaatgaagaaggcgatcctgcatgtgtactgggaagagttccagaaggaccctgtgggcctgatgagccgggtggcccagcctgccagcaagaagatcgatcagaacaagctgaaacctgagatggacgagaagggcaacctgaccaccgccggctttgcctgctctcagtgtggccagcccctgttcgtgtacaagctggagcaggtgtctgagaagggcaaggcttacaccaactacttcggacggtgcaatgtggccgagcacgaaaagctgatcctgctggcccagctgaagcccgagaaggatagcgacgaagccgtgacatatagcctgggaaagtttgggcagagggccctggatttctacagcattcatgtgaccaaggagtccacccaccccgtgaagcccctggcccagatcgccggaaacagatacgcctccggacctgtgggaaaggccctgagcgacgcatgtatgggcacaatcgcctccttcctgtctaagtaccaggacatcatcatcgaacaccagaaggtggtgaagggcaaccagaagagactggagagcctgcgggagctggccggcaaggaaaacctggaataccctagcgtgaccctgccacctcagcctcacaccaaggagggcgttgatgcctacaacgaagtgatcgcccgggtgcgaatgtgggtgaacctgaacctgtggcagaagctgaagctaagcagagatgatgccaagcctctgctgagactgaagggattcccttcctttcctctggtcgagagacaggccaacgaagtggactggtgggacatggtgtgtaacgtgaagaagctgatcaacgagaaaaaggaggatggcaaggtgttttggcagaatctggctggctacaagagacaggaagccctgagaccatacctgagcagcgaggaagatcggaagaagggaaagaaattcgctcggtaccagctgggcgacctgctgctgcacctggaaaagaagcacggcgaggactggggaaaggtgtacgacgaggcctgggagcggattgacaagaaagtggaaggcctgagcaagcacatcaagctggaagaggaacggagaagcgaggacgcccagagcaaggccgccctgaccgactggctgcgggctaaggccagcttcgtgatcgagggcctgaaggaggccgacaaggacgagttctgcagatgcgagctgaagctgcagaagtggtacggggacctgcggggaaagcccttcgccatcgaagccgagaacagcatcctggacatcagcggcttcagcaagcagtacaactgtgccttcatctggcagaaggacggcgtgaagaagctgaacctgtacctgatcatcaactacttcaagggcggcaagctgcggttcaagaagatcaaacctgaagccttcgaagccaacagattctacaccgtgatcaacaaaaagagcggcgagatcgtgcccatggaggtgaacttcaacttcgacgaccccaacctgatcatcctgcctctggcctttggcaagagacagggcagagaattcatctggaacgacctgctgtccctggaaaccggcagcctgaagctggccaacggaagagtgatcgagaagacactgtacaacagaagaacccggcaggatgagcctgccctgttcgtggccctgaccttcgagcggcgggaggtcctggactcctccaatatcaaaccaatgaacctgatcggcgtggcaagaggcgaaaacatccccgccgtgatcgccctgaccgaccccgagggctgcccactgagccggtttaaggatagcctgggaaacccaacccacatcctgagaatcggcgagagctataaggagaagcagcggaccatccaggccaagaaggaggtggagcagcggagagccggcggctacagccggaagtacgccagcaaagccaagaatctggcagacgatatggtgagaaacaccgctagagatctgctgtactacgccgtgacccaggatgccatgctgatcttcgccaacctgagccggggcttcggccggcagggcaagcggaccttcatggccgagagacagtacacacggatggaggactggctgaccgccaagctggcctacgagggcctgagcaagacctacctgtccaagacactggcccagtacacctccaagacatgcagcaactgtgggtttaccatcaccagcgccgactacgacagggtgctggagaagctgaagaagacagcaacaggctggatgaccacaattaacggcaaggagctgaaggtggagggccagattacctactacaacagatacaagagacagaacgtagtcaaggacctgtccgtcgagctggatagactgagcgaagaatctgtgaacaacgacatctcctcctggacaaagggcagaagcggagaagctctgagcctcctgaagaaaagattctcccatagacccgtgcaggagaagttcgtgtgcctgaactgcggcttcgagacacacgcagccgagcaagccgccctgaacatcgccagatcctggctgttcctgcggagccaggagtacaagaaataccagacaaacaagacaaccggcaacaccgataagagagccttcgtcgagacctggcagtccttttaccggaagaagcttaaggaggtgtggaaacctgccgtgcggtctggcggatctggcggaggctccaccagccccaagaaaaagagaaaagtctaagctgccttctgcggggcttgccttctggccatgcccttcttctctcccttgcacctgtacctcttggtctttgaataaagcctgagtaggaaggctagcaaaaaaaaaaaaaaaaaaaaaaaaaaaaaaaaaaaaaaaaaaaaaaaaaaaaaaaaaaaaaaaaaaaaaaaaaaaaaaaa

SEQ ID NO: 12847 - RNA, 5785 nt, synthetic construct
  source 1..5785: mol_type = other RNA
aggaaataagagagaaaagaagagtaagaagaaatataagagccaccatggcccctaagaagaagcgtaaagtgagccggatggaacgcctcgtctacgaggtgcggcagaagtgcagaaacatcgaggacatctgcatctcctgcggatctctgaacgtgaccctggagcacccactgttcatcggcggcatgtgccagaactgtaaaaactgttttctggagtgtgcctatcaatacgacgatgacggctaccagagctactgcaccatctgttgcggcggaagagaggtgctgatgtgtggaaataacaactgctgccggtgcttctgcgtggaatgcgtggacctgctggtgggccccggcgccgcccaggccgctattaaggaagatccttggaactgctacatgtgcggccacaagggcacatacggcctgctgagacggagagaggactggcctagcagactgcagatgttcttcgccaataaccacgaccaggagttcgacccccctaaggtgtaccctcccgtccccgccgagaagagaaagcccatccgggtcctgagcctgttcgatggcatcgccaccggtctgctggtgctgaaggacctgggcatccaggtggataggtacattgcctccgaggtgtgcgaggactccatcaccgtgggaatggtgcgtcatcagggcaagatcatgtacgtgggcgacgtgcggagcgtgacacagaagcatatccaggagtggggccctttcgacctggtgatcggcggcagcccttgcaatgacctgagcatcgtgaacccagcccggaagggcctgtacgagggaaccggcagactgttcttcgagttttacagactgctgcacgacgcccggcctaaggaaggcgacgaccggcccttcttttggctgttcgagaatgtggtggccatgggagtcagcgacaagcgggatattagccggttcctggagagcaaccccgtgatgatcgatgccaaggaagtgagcgccgcccaccgggccagatacttctggggcaatctgcctggcatgaacagacccctggccagcaccgtgaacgacaagctggagctgcaggagtgcctggagcacggccggatcgccaagttcagcaaggtgagaaccatcaccacccgaagcaacagcatcaaacaaggcaaggaccagcactttcctgtgttcatgaacgagaaggaggacatcctgtggtgtaccgagatggagagagtgttcgggttcccagtccactacacagatgtcagcaacatgtctagactggccagacagagactgctgggaagaagctggtccgtccctgtgatcagacacctgttcgcccctctgaaggagtacttcgcctgcgtgagcagcggcaacagcaacgccaacagccggggccccagcttctctagcggcctggtgccactgtccctgagagggagccacatgggccccatggagatctacaaaaccgtgagcgcctggaagcggcagcctgtgcgcgtgctgagcctgtttcggaatatcgataaagtcctgaaaagcctgggattcctggagagcggctctggctccggcggtggcaccctgaagtacgtggaggatgtgacaaacgtggtcagacgggatgtggagaagtggggccccttcgatctggtgtacggcagcacccaacccctgggcagctcttgtgaccggtgccctggctggtacatgtttcagttccaccggatcctgcagtacgccctgccgagacaggagtcccagcggccattcttttggattttcatggacaacttgctgctgaccgaggatgaccaggaaactaccactcggttcctgcagaccgaagccgtgaccctgcaggacgtgagaggccgggactaccagaacgccatgcgggtgtggtccaacatccctggactgaaaagcaagcacgcacctctgacccctaaagaagaggagtacctgcaggcccaggtgcggagcagaagcaagctggacgcccctaaggtggatctgctggtgaagaattgcctcctgcccctgagagagtacttcaagtatttcagccagaatagtctgcccctgggaggcagcggcggcggctggaaggagagcctgagcttcgaggacgtggccctgtacttcaccagggaggagtggagcaggctggactgggcccagaaggacctgtacagggacgtgatgctggagaactacaggaacatgatcgtgctgggcttccagttccccaagcccgaggtgatctgccagctggagcagtgggaggagccctggatcctggacctgcccagggccggcaccaggaaggccagcggcagcgcctgcggcggcccaagcagcggcgcccctcctcccagcggcggcagcccagccggctccccaacctctaccgaggagggcacctctgagtccgccacccccgagagcggccctggcacctccaccgagcccagcgagggcagcgcacccggcagccctgccggcagccccacctccacagaggagggaaccagcaccgagcccagcgaaggcagcgccccaggcaccagcaccgagcctagtgagcaggagattaaacggatcaacaagatcagaagaagacttgtgaaagacagcaacaccaagaaggccggcaagacaggccccatgaaaaccctgctggttagagtgatgacacccgatctgagagagcggctggaaaacctgagaaagaagcctgaaaatatcccccagcccatcagcaatacatctagagccaacctgaataagctgctgaccgattacaccgaaatgaagaaggcgatcctgcatgtgtactgggaagagttccagaaggaccctgtgggcctgatgagccgggtggcccagcctgccagcaagaagatcgatcagaacaagctgaaacctgagatggacgagaagggcaacctgaccaccgccggctttgcctgctctcagtgtggccagcccctgttcgtgtacaagctggagcaggtgtctgagaagggcaaggcttacaccaactacttcggacggtgcaatgtggccgagcacgaaaagctgatcctgctggcccagctgaagcccgagaaggatagcgacgaagccgtgacatatagcctgggaaagtttgggcagagggccctggatttctacagcattcatgtgaccaaggagtccacccaccccgtgaagcccctggcccagatcgccggaaacagatacgcctccggacctgtgggaaaggccctgagcgacgcatgtatgggcacaatcgcctccttcctgtctaagtaccaggacatcatcatcgaacaccagaaggtggtgaagggcaaccagaagagactggagagcctgcgggagctggccggcaaggaaaacctggaataccctagcgtgaccctgccacctcagcctcacaccaaggagggcgttgatgcctacaacgaagtgatcgcccgggtgcgaatgtgggtgaacctgaacctgtggcagaagctgaagctaagcagagatgatgccaagcctctgctgagactgaagggattcccttcctttcctctggtcgagagacaggccaacgaagtggactggtgggacatggtgtgtaacgtgaagaagctgatcaacgagaaaaaggaggatggcaaggtgttttggcagaatctggctggctacaagagacaggaagccctgagaccatacctgagcagcgaggaagatcggaagaagggaaagaaattcgctcggtaccagctgggcgacctgctgctgcacctggaaaagaagcacggcgaggactggggaaaggtgtacgacgaggcctgggagcggattgacaagaaagtggaaggcctgagcaagcacatcaagctggaagaggaacggagaagcgaggacgcccagagcaaggccgccctgaccgactggctgcgggctaaggccagcttcgtgatcgagggcctgaaggaggccgacaaggacgagttctgcagatgcgagctgaagctgcagaagtggtacggggacctgcggggaaagcccttcgccatcgaagccgagaacagcatcctggacatcagcggcttcagcaagcagtacaactgtgccttcatctggcagaaggacggcgtgaagaagctgaacctgtacctgatcatcaactacttcaagggcggcaagctgcggttcaagaagatcaaacctgaagccttcgaagccaacagattctacaccgtgatcaacaaaaagagcggcgagatcgtgcccatggaggtgaacttcaacttcgacgaccccaacctgatcatcctgcctctggcctttggcaagagacagggcagagaattcatctggaacgacctgctgtccctggaaaccggcagcctgaagctggccaacggaagagtgatcgagaagacactgtacaacagaagaacccggcaggatgagcctgccctgttcgtggccctgaccttcgagcggcgggaggtcctggactcctccaatatcaaaccaatgaacctgatcggcgtggcaagaggcgaaaacatccccgccgtgatcgccctgaccgaccccgagggctgcccactgagccggtttaaggatagcctgggaaacccaacccacatcctgagaatcggcgagagctataaggagaagcagcggaccatccaggccaagaaggaggtggagcagcggagagccggcggctacagccggaagtacgccagcaaagccaagaatctggcagacgatatggtgagaaacaccgctagagatctgctgtactacgccgtgacccaggatgccatgctgatcttcgccaacctgagccggggcttcggccggcagggcaagcggaccttcatggccgagagacagtacacacggatggaggactggctgaccgccaagctggcctacgagggcctgagcaagacctacctgtccaagacactggcccagtacacctccaagacatgcagcaactgtgggtttaccatcaccagcgccgactacgacagggtgctggagaagctgaagaagacagcaacaggctggatgaccacaattaacggcaaggagctgaaggtggagggccagattacctactacaacagatacaagagacagaacgtagtcaaggacctgtccgtcgagctggatagactgagcgaagaatctgtgaacaacgacatctcctcctggacaaagggcagaagcggagaagctctgagcctcctgaagaaaagattctcccatagacccgtgcaggagaagttcgtgtgcctgaactgcggcttcgagacacacgcagccgagcaagccgccctgaacatcgccagatcctggctgttcctgcggagccaggagtacaagaaataccagacaaacaagacaaccggcaacaccgataagagagccttcgtcgagacctggcagtccttttaccggaagaagcttaaggaggtgtggaaacctgccgtgcggtctggcggatctggcggaggctccaccagccccaagaaaaagagaaaagtctaagctgccttctgcggggcttgccttctggccatgcccttcttctctcccttgcacctgtacctcttggtctttgaataaagcctgagtaggaaggctagcaaaaaaaaaaaaaaaaaaaaaaaaaaaaaaaaaaaaaaaaaaaaaaaaaaaaaaaaaaaaaaaaaaaaaaaaaaaaaaaa

SEQ ID NO: 12848 - RNA, 5785 nt, synthetic construct
  source 1..5785: mol_type = other RNA
aggaaataagagagaaaagaagagtaagaagaaatataagagccaccatggcccctaagaagaagcgtaaagtgagccggatggaacgcctcgtctacgaggtgcggcagaagtgcagaaacatcgaggacatctgcatctcctgcggatctctgaacgtgaccctggagcacccactgttcatcggcggcatgtgccagaactgtaaaaactgttttctggagtgtgcctatcaatacgacgatgacggctaccagagctactgcaccatctgttgcggcggaagagaggtgctgatgtgtggaaataacaactgctgccggtgcttctgcgtggaatgcgtggacctgctggtgggccccggcgccgcccaggccgctattaaggaagatccttggaactgctacatgtgcggccacaagggcacatacggcctgctgagacggagagaggactggcctagcagactgcagatgttcttcgccaataaccacgaccaggagttcgacccccctaaggtgtaccctcccgtccccgccgagaagagaaagcccatccgggtcctgagcctgttcgatggcatcgccaccggtctgctggtgctgaaggacctgggcatccaggtggataggtacattgcctccgaggtgtgcgaggactccatcaccgtgggaatggtgcgtcatcagggcaagatcatgtacgtgggcgacgtgcggagcgtgacacagaagcatatccaggagtggggccctttcgacctggtgatcggcggcagcccttgcaatgacctgagcatcgtgaacccagcccggaagggcctgtacgagggaaccggcagactgttcttcgagttttacagactgctgcacgacgcccggcctaaggaaggcgacgaccggcccttcttttggctgttcgagaatgtggtggccatgggagtcagcgacaagcgggatattagccggttcctggagagcaaccccgtgatgatcgatgccaaggaagtgagcgccgcccaccgggccagatacttctggggcaatctgcctggcatgaacagacccctggccagcaccgtgaacgacaagctggagctgcaggagtgcctggagcacggccggatcgccaagttcagcaaggtgagaaccatcaccacccgaagcaacagcatcaaacaaggcaaggaccagcactttcctgtgttcatgaacgagaaggaggacatcctgtggtgtaccgagatggagagagtgttcgggttcccagtccactacacagatgtcagcaacatgtctagactggccagacagagactgctgggaagaagctggtccgtccctgtgatcagacacctgttcgcccctctgaaggagtacttcgcctgcgtgagcagcggcaacagcaacgccaacagccggggccccagcttctctagcggcctggtgccactgtccctgagagggagccacatgggccccatggagatctacaaaaccgtgagcgcctggaagcggcagcctgtgcgcgtgctgagcctgtttcggaatatcgataaagtcctgaaaagcctgggattcctggagagcggctctggctccggcggtggcaccctgaagtacgtggaggatgtgacaaacgtggtcagacgggatgtggagaagtggggccccttcgatctggtgtacggcagcacccaacccctgggcagctcttgtgaccggtgccctggctggtacatgtttcagttccaccggatcctgcagtacgccctgccgagacaggagtcccagcggccattcttttggattttcatggacaacttgctgctgaccgaggatgaccaggaaactaccactcggttcctgcagaccgaagccgtgaccctgcaggacgtgagaggccgggactaccagaacgccatgcgggtgtggtccaacatccctggactgaaaagcaagcacgcacctctgacccctaaagaagaggagtacctgcaggcccaggtgcggagcagaagcaagctggacgcccctaaggtggatctgctggtgaagaattgcctcctgcccctgagagagtacttcaagtatttcagccagaatagtctgcccctgggaggcagcggcggcggcgcccccctgcccctgaccttcgaggacgtggccatctacttcagcgagcaggagtggcagcacctggagacctggcagaaggagctgtacaagcaggtgatgaggaccaactacgagaccctgatcagcctggacaacggcctgcccaagcccgagctgatcagctggatggagctgggcagggagaacttcggcagctggggcgagggccagaaggtggacaggggcatcaggtgcagcgtgggcggcccaagcagcggcgcccctcctcccagcggcggcagcccagccggctccccaacctctaccgaggagggcacctctgagtccgccacccccgagagcggccctggcacctccaccgagcccagcgagggcagcgcacccggcagccctgccggcagccccacctccacagaggagggaaccagcaccgagcccagcgaaggcagcgccccaggcaccagcaccgagcctagtgagcaggagattaaacggatcaacaagatcagaagaagacttgtgaaagacagcaacaccaagaaggccggcaagacaggccccatgaaaaccctgctggttagagtgatgacacccgatctgagagagcggctggaaaacctgagaaagaagcctgaaaatatcccccagcccatcagcaatacatctagagccaacctgaataagctgctgaccgattacaccgaaatgaagaaggcgatcctgcatgtgtactgggaagagttccagaaggaccctgtgggcctgatgagccgggtggcccagcctgccagcaagaagatcgatcagaacaagctgaaacctgagatggacgagaagggcaacctgaccaccgccggctttgcctgctctcagtgtggccagcccctgttcgtgtacaagctggagcaggtgtctgagaagggcaaggcttacaccaactacttcggacggtgcaatgtggccgagcacgaaaagctgatcctgctggcccagctgaagcccgagaaggatagcgacgaagccgtgacatatagcctgggaaagtttgggcagagggccctggatttctacagcattcatgtgaccaaggagtccacccaccccgtgaagcccctggcccagatcgccggaaacagatacgcctccggacctgtgggaaaggccctgagcgacgcatgtatgggcacaatcgcctccttcctgtctaagtaccaggacatcatcatcgaacaccagaaggtggtgaagggcaaccagaagagactggagagcctgcgggagctggccggcaaggaaaacctggaataccctagcgtgaccctgccacctcagcctcacaccaaggagggcgttgatgcctacaacgaagtgatcgcccgggtgcgaatgtgggtgaacctgaacctgtggcagaagctgaagctaagcagagatgatgccaagcctctgctgagactgaagggattcccttcctttcctctggtcgagagacaggccaacgaagtggactggtgggacatggtgtgtaacgtgaagaagctgatcaacgagaaaaaggaggatggcaaggtgttttggcagaatctggctggctacaagagacaggaagccctgagaccatacctgagcagcgaggaagatcggaagaagggaaagaaattcgctcggtaccagctgggcgacctgctgctgcacctggaaaagaagcacggcgaggactggggaaaggtgtacgacgaggcctgggagcggattgacaagaaagtggaaggcctgagcaagcacatcaagctggaagaggaacggagaagcgaggacgcccagagcaaggccgccctgaccgactggctgcgggctaaggccagcttcgtgatcgagggcctgaaggaggccgacaaggacgagttctgcagatgcgagctgaagctgcagaagtggtacggggacctgcggggaaagcccttcgccatcgaagccgagaacagcatcctggacatcagcggcttcagcaagcagtacaactgtgccttcatctggcagaaggacggcgtgaagaagctgaacctgtacctgatcatcaactacttcaagggcggcaagctgcggttcaagaagatcaaacctgaagccttcgaagccaacagattctacaccgtgatcaacaaaaagagcggcgagatcgtgcccatggaggtgaacttcaacttcgacgaccccaacctgatcatcctgcctctggcctttggcaagagacagggcagagaattcatctggaacgacctgctgtccctggaaaccggcagcctgaagctggccaacggaagagtgatcgagaagacactgtacaacagaagaacccggcaggatgagcctgccctgttcgtggccctgaccttcgagcggcgggaggtcctggactcctccaatatcaaaccaatgaacctgatcggcgtggcaagaggcgaaaacatccccgccgtgatcgccctgaccgaccccgagggctgcccactgagccggtttaaggatagcctgggaaacccaacccacatcctgagaatcggcgagagctataaggagaagcagcggaccatccaggccaagaaggaggtggagcagcggagagccggcggctacagccggaagtacgccagcaaagccaagaatctggcagacgatatggtgagaaacaccgctagagatctgctgtactacgccgtgacccaggatgccatgctgatcttcgccaacctgagccggggcttcggccggcagggcaagcggaccttcatggccgagagacagtacacacggatggaggactggctgaccgccaagctggcctacgagggcctgagcaagacctacctgtccaagacactggcccagtacacctccaagacatgcagcaactgtgggtttaccatcaccagcgccgactacgacagggtgctggagaagctgaagaagacagcaacaggctggatgaccacaattaacggcaaggagctgaaggtggagggccagattacctactacaacagatacaagagacagaacgtagtcaaggacctgtccgtcgagctggatagactgagcgaagaatctgtgaacaacgacatctcctcctggacaaagggcagaagcggagaagctctgagcctcctgaagaaaagattctcccatagacccgtgcaggagaagttcgtgtgcctgaactgcggcttcgagacacacgcagccgagcaagccgccctgaacatcgccagatcctggctgttcctgcggagccaggagtacaagaaataccagacaaacaagacaaccggcaacaccgataagagagccttcgtcgagacctggcagtccttttaccggaagaagcttaaggaggtgtggaaacctgccgtgcggtctggcggatctggcggaggctccaccagccccaagaaaaagagaaaagtctaagctgccttctgcggggcttgccttctggccatgcccttcttctctcccttgcacctgtacctcttggtctttgaataaagcctgagtaggaaggctagcaaaaaaaaaaaaaaaaaaaaaaaaaaaaaaaaaaaaaaaaaaaaaaaaaaaaaaaaaaaaaaaaaaaaaaaaaaaaaaaa

SEQ ID NO: 12849 - RNA, 5785 nt, synthetic construct
  source 1..5785: mol_type = other RNA
aggaaataagagagaaaagaagagtaagaagaaatataagagccaccatggcccctaagaagaagcgtaaagtgagccggatggaacgcctcgtctacgaggtgcggcagaagtgcagaaacatcgaggacatctgcatctcctgcggatctctgaacgtgaccctggagcacccactgttcatcggcggcatgtgccagaactgtaaaaactgttttctggagtgtgcctatcaatacgacgatgacggctaccagagctactgcaccatctgttgcggcggaagagaggtgctgatgtgtggaaataacaactgctgccggtgcttctgcgtggaatgcgtggacctgctggtgggccccggcgccgcccaggccgctattaaggaagatccttggaactgctacatgtgcggccacaagggcacatacggcctgctgagacggagagaggactggcctagcagactgcagatgttcttcgccaataaccacgaccaggagttcgacccccctaaggtgtaccctcccgtccccgccgagaagagaaagcccatccgggtcctgagcctgttcgatggcatcgccaccggtctgctggtgctgaaggacctgggcatccaggtggataggtacattgcctccgaggtgtgcgaggactccatcaccgtgggaatggtgcgtcatcagggcaagatcatgtacgtgggcgacgtgcggagcgtgacacagaagcatatccaggagtggggccctttcgacctggtgatcggcggcagcccttgcaatgacctgagcatcgtgaacccagcccggaagggcctgtacgagggaaccggcagactgttcttcgagttttacagactgctgcacgacgcccggcctaaggaaggcgacgaccggcccttcttttggctgttcgagaatgtggtggccatgggagtcagcgacaagcgggatattagccggttcctggagagcaaccccgtgatgatcgatgccaaggaagtgagcgccgcccaccgggccagatacttctggggcaatctgcctggcatgaacagacccctggccagcaccgtgaacgacaagctggagctgcaggagtgcctggagcacggccggatcgccaagttcagcaaggtgagaaccatcaccacccgaagcaacagcatcaaacaaggcaaggaccagcactttcctgtgttcatgaacgagaaggaggacatcctgtggtgtaccgagatggagagagtgttcgggttcccagtccactacacagatgtcagcaacatgtctagactggccagacagagactgctgggaagaagctggtccgtccctgtgatcagacacctgttcgcccctctgaaggagtacttcgcctgcgtgagcagcggcaacagcaacgccaacagccggggccccagcttctctagcggcctggtgccactgtccctgagagggagccacatgggccccatggagatctacaaaaccgtgagcgcctggaagcggcagcctgtgcgcgtgctgagcctgtttcggaatatcgataaagtcctgaaaagcctgggattcctggagagcggctctggctccggcggtggcaccctgaagtacgtggaggatgtgacaaacgtggtcagacgggatgtggagaagtggggccccttcgatctggtgtacggcagcacccaacccctgggcagctcttgtgaccggtgccctggctggtacatgtttcagttccaccggatcctgcagtacgccctgccgagacaggagtcccagcggccattcttttggattttcatggacaacttgctgctgaccgaggatgaccaggaaactaccactcggttcctgcagaccgaagccgtgaccctgcaggacgtgagaggccgggactaccagaacgccatgcgggtgtggtccaacatccctggactgaaaagcaagcacgcacctctgacccctaaagaagaggagtacctgcaggcccaggtgcggagcagaagcaagctggacgcccctaaggtggatctgctggtgaagaattgcctcctgcccctgagagagtacttcaagtatttcagccagaatagtctgcccctgggaggcagcggcggcggctaccagacccccgtgagcttcaaggacgtggtggtgggcttcacccaggaggagtggcacaggctgagccccgcccagagggccctgtacagggacgtgatgctggagacctacagcaacctgctgagcgtgggctacgagggcaccaagcccgacgtgatcctgaggctggagcaggaggaggccccctggatcggcgaggccgcctgccccggctgccactgctgggaggacatctggcagggcggcccaagcagcggcgcccctcctcccagcggcggcagcccagccggctccccaacctctaccgaggagggcacctctgagtccgccacccccgagagcggccctggcacctccaccgagcccagcgagggcagcgcacccggcagccctgccggcagccccacctccacagaggagggaaccagcaccgagcccagcgaaggcagcgccccaggcaccagcaccgagcctagtgagcaggagattaaacggatcaacaagatcagaagaagacttgtgaaagacagcaacaccaagaaggccggcaagacaggccccatgaaaaccctgctggttagagtgatgacacccgatctgagagagcggctggaaaacctgagaaagaagcctgaaaatatcccccagcccatcagcaatacatctagagccaacctgaataagctgctgaccgattacaccgaaatgaagaaggcgatcctgcatgtgtactgggaagagttccagaaggaccctgtgggcctgatgagccgggtggcccagcctgccagcaagaagatcgatcagaacaagctgaaacctgagatggacgagaagggcaacctgaccaccgccggctttgcctgctctcagtgtggccagcccctgttcgtgtacaagctggagcaggtgtctgagaagggcaaggcttacaccaactacttcggacggtgcaatgtggccgagcacgaaaagctgatcctgctggcccagctgaagcccgagaaggatagcgacgaagccgtgacatatagcctgggaaagtttgggcagagggccctggatttctacagcattcatgtgaccaaggagtccacccaccccgtgaagcccctggcccagatcgccggaaacagatacgcctccggacctgtgggaaaggccctgagcgacgcatgtatgggcacaatcgcctccttcctgtctaagtaccaggacatcatcatcgaacaccagaaggtggtgaagggcaaccagaagagactggagagcctgcgggagctggccggcaaggaaaacctggaataccctagcgtgaccctgccacctcagcctcacaccaaggagggcgttgatgcctacaacgaagtgatcgcccgggtgcgaatgtgggtgaacctgaacctgtggcagaagctgaagctaagcagagatgatgccaagcctctgctgagactgaagggattcccttcctttcctctggtcgagagacaggccaacgaagtggactggtgggacatggtgtgtaacgtgaagaagctgatcaacgagaaaaaggaggatggcaaggtgttttggcagaatctggctggctacaagagacaggaagccctgagaccatacctgagcagcgaggaagatcggaagaagggaaagaaattcgctcggtaccagctgggcgacctgctgctgcacctggaaaagaagcacggcgaggactggggaaaggtgtacgacgaggcctgggagcggattgacaagaaagtggaaggcctgagcaagcacatcaagctggaagaggaacggagaagcgaggacgcccagagcaaggccgccctgaccgactggctgcgggctaaggccagcttcgtgatcgagggcctgaaggaggccgacaaggacgagttctgcagatgcgagctgaagctgcagaagtggtacggggacctgcggggaaagcccttcgccatcgaagccgagaacagcatcctggacatcagcggcttcagcaagcagtacaactgtgccttcatctggcagaaggacggcgtgaagaagctgaacctgtacctgatcatcaactacttcaagggcggcaagctgcggttcaagaagatcaaacctgaagccttcgaagccaacagattctacaccgtgatcaacaaaaagagcggcgagatcgtgcccatggaggtgaacttcaacttcgacgaccccaacctgatcatcctgcctctggcctttggcaagagacagggcagagaattcatctggaacgacctgctgtccctggaaaccggcagcctgaagctggccaacggaagagtgatcgagaagacactgtacaacagaagaacccggcaggatgagcctgccctgttcgtggccctgaccttcgagcggcgggaggtcctggactcctccaatatcaaaccaatgaacctgatcggcgtggcaagaggcgaaaacatccccgccgtgatcgccctgaccgaccccgagggctgcccactgagccggtttaaggatagcctgggaaacccaacccacatcctgagaatcggcgagagctataaggagaagcagcggaccatccaggccaagaaggaggtggagcagcggagagccggcggctacagccggaagtacgccagcaaagccaagaatctggcagacgatatggtgagaaacaccgctagagatctgctgtactacgccgtgacccaggatgccatgctgatcttcgccaacctgagccggggcttcggccggcagggcaagcggaccttcatggccgagagacagtacacacggatggaggactggctgaccgccaagctggcctacgagggcctgagcaagacctacctgtccaagacactggcccagtacacctccaagacatgcagcaactgtgggtttaccatcaccagcgccgactacgacagggtgctggagaagctgaagaagacagcaacaggctggatgaccacaattaacggcaaggagctgaaggtggagggccagattacctactacaacagatacaagagacagaacgtagtcaaggacctgtccgtcgagctggatagactgagcgaagaatctgtgaacaacgacatctcctcctggacaaagggcagaagcggagaagctctgagcctcctgaagaaaagattctcccatagacccgtgcaggagaagttcgtgtgcctgaactgcggcttcgagacacacgcagccgagcaagccgccctgaacatcgccagatcctggctgttcctgcggagccaggagtacaagaaataccagacaaacaagacaaccggcaacaccgataagagagccttcgtcgagacctggcagtccttttaccggaagaagcttaaggaggtgtggaaacctgccgtgcggtctggcggatctggcggaggctccaccagccccaagaaaaagagaaaagtctaagctgccttctgcggggcttgccttctggccatgcccttcttctctcccttgcacctgtacctcttggtctttgaataaagcctgagtaggaaggctagcaaaaaaaaaaaaaaaaaaaaaaaaaaaaaaaaaaaaaaaaaaaaaaaaaaaaaaaaaaaaaaaaaaaaaaaaaaaaaaaa

SEQ ID NO: 12850 - RNA, 5785 nt, synthetic construct
  source 1..5785: mol_type = other RNA
aggaaataagagagaaaagaagagtaagaagaaatataagagccaccatggcccctaagaagaagcgtaaagtgagccggatggaacgcctcgtctacgaggtgcggcagaagtgcagaaacatcgaggacatctgcatctcctgcggatctctgaacgtgaccctggagcacccactgttcatcggcggcatgtgccagaactgtaaaaactgttttctggagtgtgcctatcaatacgacgatgacggctaccagagctactgcaccatctgttgcggcggaagagaggtgctgatgtgtggaaataacaactgctgccggtgcttctgcgtggaatgcgtggacctgctggtgggccccggcgccgcccaggccgctattaaggaagatccttggaactgctacatgtgcggccacaagggcacatacggcctgctgagacggagagaggactggcctagcagactgcagatgttcttcgccaataaccacgaccaggagttcgacccccctaaggtgtaccctcccgtccccgccgagaagagaaagcccatccgggtcctgagcctgttcgatggcatcgccaccggtctgctggtgctgaaggacctgggcatccaggtggataggtacattgcctccgaggtgtgcgaggactccatcaccgtgggaatggtgcgtcatcagggcaagatcatgtacgtgggcgacgtgcggagcgtgacacagaagcatatccaggagtggggccctttcgacctggtgatcggcggcagcccttgcaatgacctgagcatcgtgaacccagcccggaagggcctgtacgagggaaccggcagactgttcttcgagttttacagactgctgcacgacgcccggcctaaggaaggcgacgaccggcccttcttttggctgttcgagaatgtggtggccatgggagtcagcgacaagcgggatattagccggttcctggagagcaaccccgtgatgatcgatgccaaggaagtgagcgccgcccaccgggccagatacttctggggcaatctgcctggcatgaacagacccctggccagcaccgtgaacgacaagctggagctgcaggagtgcctggagcacggccggatcgccaagttcagcaaggtgagaaccatcaccacccgaagcaacagcatcaaacaaggcaaggaccagcactttcctgtgttcatgaacgagaaggaggacatcctgtggtgtaccgagatggagagagtgttcgggttcccagtccactacacagatgtcagcaacatgtctagactggccagacagagactgctgggaagaagctggtccgtccctgtgatcagacacctgttcgcccctctgaaggagtacttcgcctgcgtgagcagcggcaacagcaacgccaacagccggggccccagcttctctagcggcctggtgccactgtccctgagagggagccacatgggccccatggagatctacaaaaccgtgagcgcctggaagcggcagcctgtgcgcgtgctgagcctgtttcggaatatcgataaagtcctgaaaagcctgggattcctggagagcggctctggctccggcggtggcaccctgaagtacgtggaggatgtgacaaacgtggtcagacgggatgtggagaagtggggccccttcgatctggtgtacggcagcacccaacccctgggcagctcttgtgaccggtgccctggctggtacatgtttcagttccaccggatcctgcagtacgccctgccgagacaggagtcccagcggccattcttttggattttcatggacaacttgctgctgaccgaggatgaccaggaaactaccactcggttcctgcagaccgaagccgtgaccctgcaggacgtgagaggccgggactaccagaacgccatgcgggtgtggtccaacatccctggactgaaaagcaagcacgcacctctgacccctaaagaagaggagtacctgcaggcccaggtgcggagcagaagcaagctggacgcccctaaggtggatctgctggtgaagaattgcctcctgcccctgagagagtacttcaagtatttcagccagaatagtctgcccctgggaggcagcggcggcggcaaggaggccagcgtggccttcagggacgtggccgtggacttcacccaggaggagtggaggctgctgagccccgcccagaggaccctgcacagggaggtgatgctggagacctacaaccacctggtgagcctggagatccccagcagcaagcccaagctgatcgcccagctggagaggggcgaggagccctggagggaggagaggaagtgcagcctggacctgtgccccgagagcaagcccgagggcggcccaagcagcggcgcccctcctcccagcggcggcagcccagccggctccccaacctctaccgaggagggcacctctgagtccgccacccccgagagcggccctggcacctccaccgagcccagcgagggcagcgcacccggcagccctgccggcagccccacctccacagaggagggaaccagcaccgagcccagcgaaggcagcgccccaggcaccagcaccgagcctagtgagcaggagattaaacggatcaacaagatcagaagaagacttgtgaaagacagcaacaccaagaaggccggcaagacaggccccatgaaaaccctgctggttagagtgatgacacccgatctgagagagcggctggaaaacctgagaaagaagcctgaaaatatcccccagcccatcagcaatacatctagagccaacctgaataagctgctgaccgattacaccgaaatgaagaaggcgatcctgcatgtgtactgggaagagttccagaaggaccctgtgggcctgatgagccgggtggcccagcctgccagcaagaagatcgatcagaacaagctgaaacctgagatggacgagaagggcaacctgaccaccgccggctttgcctgctctcagtgtggccagcccctgttcgtgtacaagctggagcaggtgtctgagaagggcaaggcttacaccaactacttcggacggtgcaatgtggccgagcacgaaaagctgatcctgctggcccagctgaagcccgagaaggatagcgacgaagccgtgacatatagcctgggaaagtttgggcagagggccctggatttctacagcattcatgtgaccaaggagtccacccaccccgtgaagcccctggcccagatcgccggaaacagatacgcctccggacctgtgggaaaggccctgagcgacgcatgtatgggcacaatcgcctccttcctgtctaagtaccaggacatcatcatcgaacaccagaaggtggtgaagggcaaccagaagagactggagagcctgcgggagctggccggcaaggaaaacctggaataccctagcgtgaccctgccacctcagcctcacaccaaggagggcgttgatgcctacaacgaagtgatcgcccgggtgcgaatgtgggtgaacctgaacctgtggcagaagctgaagctaagcagagatgatgccaagcctctgctgagactgaagggattcccttcctttcctctggtcgagagacaggccaacgaagtggactggtgggacatggtgtgtaacgtgaagaagctgatcaacgagaaaaaggaggatggcaaggtgttttggcagaatctggctggctacaagagacaggaagccctgagaccatacctgagcagcgaggaagatcggaagaagggaaagaaattcgctcggtaccagctgggcgacctgctgctgcacctggaaaagaagcacggcgaggactggggaaaggtgtacgacgaggcctgggagcggattgacaagaaagtggaaggcctgagcaagcacatcaagctggaagaggaacggagaagcgaggacgcccagagcaaggccgccctgaccgactggctgcgggctaaggccagcttcgtgatcgagggcctgaaggaggccgacaaggacgagttctgcagatgcgagctgaagctgcagaagtggtacggggacctgcggggaaagcccttcgccatcgaagccgagaacagcatcctggacatcagcggcttcagcaagcagtacaactgtgccttcatctggcagaaggacggcgtgaagaagctgaacctgtacctgatcatcaactacttcaagggcggcaagctgcggttcaagaagatcaaacctgaagccttcgaagccaacagattctacaccgtgatcaacaaaaagagcggcgagatcgtgcccatggaggtgaacttcaacttcgacgaccccaacctgatcatcctgcctctggcctttggcaagagacagggcagagaattcatctggaacgacctgctgtccctggaaaccggcagcctgaagctggccaacggaagagtgatcgagaagacactgtacaacagaagaacccggcaggatgagcctgccctgttcgtggccctgaccttcgagcggcgggaggtcctggactcctccaatatcaaaccaatgaacctgatcggcgtggcaagaggcgaaaacatccccgccgtgatcgccctgaccgaccccgagggctgcccactgagccggtttaaggatagcctgggaaacccaacccacatcctgagaatcggcgagagctataaggagaagcagcggaccatccaggccaagaaggaggtggagcagcggagagccggcggctacagccggaagtacgccagcaaagccaagaatctggcagacgatatggtgagaaacaccgctagagatctgctgtactacgccgtgacccaggatgccatgctgatcttcgccaacctgagccggggcttcggccggcagggcaagcggaccttcatggccgagagacagtacacacggatggaggactggctgaccgccaagctggcctacgagggcctgagcaagacctacctgtccaagacactggcccagtacacctccaagacatgcagcaactgtgggtttaccatcaccagcgccgactacgacagggtgctggagaagctgaagaagacagcaacaggctggatgaccacaattaacggcaaggagctgaaggtggagggccagattacctactacaacagatacaagagacagaacgtagtcaaggacctgtccgtcgagctggatagactgagcgaagaatctgtgaacaacgacatctcctcctggacaaagggcagaagcggagaagctctgagcctcctgaagaaaagattctcccatagacccgtgcaggagaagttcgtgtgcctgaactgcggcttcgagacacacgcagccgagcaagccgccctgaacatcgccagatcctggctgttcctgcggagccaggagtacaagaaataccagacaaacaagacaaccggcaacaccgataagagagccttcgtcgagacctggcagtccttttaccggaagaagcttaaggaggtgtggaaacctgccgtgcggtctggcggatctggcggaggctccaccagccccaagaaaaagagaaaagtctaagctgccttctgcggggcttgccttctggccatgcccttcttctctcccttgcacctgtacctcttggtctttgaataaagcctgagtaggaaggctagcaaaaaaaaaaaaaaaaaaaaaaaaaaaaaaaaaaaaaaaaaaaaaaaaaaaaaaaaaaaaaaaaaaaaaaaaaaaaaaaa

SEQ ID NO: 12851 - RNA, 5785 nt, synthetic construct
  source 1..5785: mol_type = other RNA
aggaaataagagagaaaagaagagtaagaagaaatataagagccaccatggcccctaagaagaagcgtaaagtgagccggatggaacgcctcgtctacgaggtgcggcagaagtgcagaaacatcgaggacatctgcatctcctgcggatctctgaacgtgaccctggagcacccactgttcatcggcggcatgtgccagaactgtaaaaactgttttctggagtgtgcctatcaatacgacgatgacggctaccagagctactgcaccatctgttgcggcggaagagaggtgctgatgtgtggaaataacaactgctgccggtgcttctgcgtggaatgcgtggacctgctggtgggccccggcgccgcccaggccgctattaaggaagatccttggaactgctacatgtgcggccacaagggcacatacggcctgctgagacggagagaggactggcctagcagactgcagatgttcttcgccaataaccacgaccaggagttcgacccccctaaggtgtaccctcccgtccccgccgagaagagaaagcccatccgggtcctgagcctgttcgatggcatcgccaccggtctgctggtgctgaaggacctgggcatccaggtggataggtacattgcctccgaggtgtgcgaggactccatcaccgtgggaatggtgcgtcatcagggcaagatcatgtacgtgggcgacgtgcggagcgtgacacagaagcatatccaggagtggggccctttcgacctggtgatcggcggcagcccttgcaatgacctgagcatcgtgaacccagcccggaagggcctgtacgagggaaccggcagactgttcttcgagttttacagactgctgcacgacgcccggcctaaggaaggcgacgaccggcccttcttttggctgttcgagaatgtggtggccatgggagtcagcgacaagcgggatattagccggttcctggagagcaaccccgtgatgatcgatgccaaggaagtgagcgccgcccaccgggccagatacttctggggcaatctgcctggcatgaacagacccctggccagcaccgtgaacgacaagctggagctgcaggagtgcctggagcacggccggatcgccaagttcagcaaggtgagaaccatcaccacccgaagcaacagcatcaaacaaggcaaggaccagcactttcctgtgttcatgaacgagaaggaggacatcctgtggtgtaccgagatggagagagtgttcgggttcccagtccactacacagatgtcagcaacatgtctagactggccagacagagactgctgggaagaagctggtccgtccctgtgatcagacacctgttcgcccctctgaaggagtacttcgcctgcgtgagcagcggcaacagcaacgccaacagccggggccccagcttctctagcggcctggtgccactgtccctgagagggagccacatgggccccatggagatctacaaaaccgtgagcgcctggaagcggcagcctgtgcgcgtgctgagcctgtttcggaatatcgataaagtcctgaaaagcctgggattcctggagagcggctctggctccggcggtggcaccctgaagtacgtggaggatgtgacaaacgtggtcagacgggatgtggagaagtggggccccttcgatctggtgtacggcagcacccaacccctgggcagctcttgtgaccggtgccctggctggtacatgtttcagttccaccggatcctgcagtacgccctgccgagacaggagtcccagcggccattcttttggattttcatggacaacttgctgctgaccgaggatgaccaggaaactaccactcggttcctgcagaccgaagccgtgaccctgcaggacgtgagaggccgggactaccagaacgccatgcgggtgtggtccaacatccctggactgaaaagcaagcacgcacctctgacccctaaagaagaggagtacctgcaggcccaggtgcggagcagaagcaagctggacgcccctaaggtggatctgctggtgaagaattgcctcctgcccctgagagagtacttcaagtatttcagccagaatagtctgcccctgggaggcagcggcggcggccacagcgagggcaggctgaccttccaggacgtggccatcgacttcacccaggaggagtgggagtgcctggaccccggccagaggaagctgtacagggacgtgatggtggagaactacaggaacctggccagcctgggcctggtgagcaaggtggacctggtgaccttcctggagctgctgaaggaccccaggaacatcaggaggatgaagaccaccgccatctaccccgccgtgagcccccagggcggcccaagcagcggcgcccctcctcccagcggcggcagcccagccggctccccaacctctaccgaggagggcacctctgagtccgccacccccgagagcggccctggcacctccaccgagcccagcgagggcagcgcacccggcagccctgccggcagccccacctccacagaggagggaaccagcaccgagcccagcgaaggcagcgccccaggcaccagcaccgagcctagtgagcaggagattaaacggatcaacaagatcagaagaagacttgtgaaagacagcaacaccaagaaggccggcaagacaggccccatgaaaaccctgctggttagagtgatgacacccgatctgagagagcggctggaaaacctgagaaagaagcctgaaaatatcccccagcccatcagcaatacatctagagccaacctgaataagctgctgaccgattacaccgaaatgaagaaggcgatcctgcatgtgtactgggaagagttccagaaggaccctgtgggcctgatgagccgggtggcccagcctgccagcaagaagatcgatcagaacaagctgaaacctgagatggacgagaagggcaacctgaccaccgccggctttgcctgctctcagtgtggccagcccctgttcgtgtacaagctggagcaggtgtctgagaagggcaaggcttacaccaactacttcggacggtgcaatgtggccgagcacgaaaagctgatcctgctggcccagctgaagcccgagaaggatagcgacgaagccgtgacatatagcctgggaaagtttgggcagagggccctggatttctacagcattcatgtgaccaaggagtccacccaccccgtgaagcccctggcccagatcgccggaaacagatacgcctccggacctgtgggaaaggccctgagcgacgcatgtatgggcacaatcgcctccttcctgtctaagtaccaggacatcatcatcgaacaccagaaggtggtgaagggcaaccagaagagactggagagcctgcgggagctggccggcaaggaaaacctggaataccctagcgtgaccctgccacctcagcctcacaccaaggagggcgttgatgcctacaacgaagtgatcgcccgggtgcgaatgtgggtgaacctgaacctgtggcagaagctgaagctaagcagagatgatgccaagcctctgctgagactgaagggattcccttcctttcctctggtcgagagacaggccaacgaagtggactggtgggacatggtgtgtaacgtgaagaagctgatcaacgagaaaaaggaggatggcaaggtgttttggcagaatctggctggctacaagagacaggaagccctgagaccatacctgagcagcgaggaagatcggaagaagggaaagaaattcgctcggtaccagctgggcgacctgctgctgcacctggaaaagaagcacggcgaggactggggaaaggtgtacgacgaggcctgggagcggattgacaagaaagtggaaggcctgagcaagcacatcaagctggaagaggaacggagaagcgaggacgcccagagcaaggccgccctgaccgactggctgcgggctaaggccagcttcgtgatcgagggcctgaaggaggccgacaaggacgagttctgcagatgcgagctgaagctgcagaagtggtacggggacctgcggggaaagcccttcgccatcgaagccgagaacagcatcctggacatcagcggcttcagcaagcagtacaactgtgccttcatctggcagaaggacggcgtgaagaagctgaacctgtacctgatcatcaactacttcaagggcggcaagctgcggttcaagaagatcaaacctgaagccttcgaagccaacagattctacaccgtgatcaacaaaaagagcggcgagatcgtgcccatggaggtgaacttcaacttcgacgaccccaacctgatcatcctgcctctggcctttggcaagagacagggcagagaattcatctggaacgacctgctgtccctggaaaccggcagcctgaagctggccaacggaagagtgatcgagaagacactgtacaacagaagaacccggcaggatgagcctgccctgttcgtggccctgaccttcgagcggcgggaggtcctggactcctccaatatcaaaccaatgaacctgatcggcgtggcaagaggcgaaaacatccccgccgtgatcgccctgaccgaccccgagggctgcccactgagccggtttaaggatagcctgggaaacccaacccacatcctgagaatcggcgagagctataaggagaagcagcggaccatccaggccaagaaggaggtggagcagcggagagccggcggctacagccggaagtacgccagcaaagccaagaatctggcagacgatatggtgagaaacaccgctagagatctgctgtactacgccgtgacccaggatgccatgctgatcttcgccaacctgagccggggcttcggccggcagggcaagcggaccttcatggccgagagacagtacacacggatggaggactggctgaccgccaagctggcctacgagggcctgagcaagacctacctgtccaagacactggcccagtacacctccaagacatgcagcaactgtgggtttaccatcaccagcgccgactacgacagggtgctggagaagctgaagaagacagcaacaggctggatgaccacaattaacggcaaggagctgaaggtggagggccagattacctactacaacagatacaagagacagaacgtagtcaaggacctgtccgtcgagctggatagactgagcgaagaatctgtgaacaacgacatctcctcctggacaaagggcagaagcggagaagctctgagcctcctgaagaaaagattctcccatagacccgtgcaggagaagttcgtgtgcctgaactgcggcttcgagacacacgcagccgagcaagccgccctgaacatcgccagatcctggctgttcctgcggagccaggagtacaagaaataccagacaaacaagacaaccggcaacaccgataagagagccttcgtcgagacctggcagtccttttaccggaagaagcttaaggaggtgtggaaacctgccgtgcggtctggcggatctggcggaggctccaccagccccaagaaaaagagaaaagtctaagctgccttctgcggggcttgccttctggccatgcccttcttctctcccttgcacctgtacctcttggtctttgaataaagcctgagtaggaaggctagcaaaaaaaaaaaaaaaaaaaaaaaaaaaaaaaaaaaaaaaaaaaaaaaaaaaaaaaaaaaaaaaaaaaaaaaaaaaaaaaa

SEQ ID NO: 12852 - RNA, 5785 nt, synthetic construct
  source 1..5785: mol_type = other RNA
aggaaataagagagaaaagaagagtaagaagaaatataagagccaccatggcccctaagaagaagcgtaaagtgagccggatggaacgcctcgtctacgaggtgcggcagaagtgcagaaacatcgaggacatctgcatctcctgcggatctctgaacgtgaccctggagcacccactgttcatcggcggcatgtgccagaactgtaaaaactgttttctggagtgtgcctatcaatacgacgatgacggctaccagagctactgcaccatctgttgcggcggaagagaggtgctgatgtgtggaaataacaactgctgccggtgcttctgcgtggaatgcgtggacctgctggtgggccccggcgccgcccaggccgctattaaggaagatccttggaactgctacatgtgcggccacaagggcacatacggcctgctgagacggagagaggactggcctagcagactgcagatgttcttcgccaataaccacgaccaggagttcgacccccctaaggtgtaccctcccgtccccgccgagaagagaaagcccatccgggtcctgagcctgttcgatggcatcgccaccggtctgctggtgctgaaggacctgggcatccaggtggataggtacattgcctccgaggtgtgcgaggactccatcaccgtgggaatggtgcgtcatcagggcaagatcatgtacgtgggcgacgtgcggagcgtgacacagaagcatatccaggagtggggccctttcgacctggtgatcggcggcagcccttgcaatgacctgagcatcgtgaacccagcccggaagggcctgtacgagggaaccggcagactgttcttcgagttttacagactgctgcacgacgcccggcctaaggaaggcgacgaccggcccttcttttggctgttcgagaatgtggtggccatgggagtcagcgacaagcgggatattagccggttcctggagagcaaccccgtgatgatcgatgccaaggaagtgagcgccgcccaccgggccagatacttctggggcaatctgcctggcatgaacagacccctggccagcaccgtgaacgacaagctggagctgcaggagtgcctggagcacggccggatcgccaagttcagcaaggtgagaaccatcaccacccgaagcaacagcatcaaacaaggcaaggaccagcactttcctgtgttcatgaacgagaaggaggacatcctgtggtgtaccgagatggagagagtgttcgggttcccagtccactacacagatgtcagcaacatgtctagactggccagacagagactgctgggaagaagctggtccgtccctgtgatcagacacctgttcgcccctctgaaggagtacttcgcctgcgtgagcagcggcaacagcaacgccaacagccggggccccagcttctctagcggcctggtgccactgtccctgagagggagccacatgggccccatggagatctacaaaaccgtgagcgcctggaagcggcagcctgtgcgcgtgctgagcctgtttcggaatatcgataaagtcctgaaaagcctgggattcctggagagcggctctggctccggcggtggcaccctgaagtacgtggaggatgtgacaaacgtggtcagacgggatgtggagaagtggggccccttcgatctggtgtacggcagcacccaacccctgggcagctcttgtgaccggtgccctggctggtacatgtttcagttccaccggatcctgcagtacgccctgccgagacaggagtcccagcggccattcttttggattttcatggacaacttgctgctgaccgaggatgaccaggaaactaccactcggttcctgcagaccgaagccgtgaccctgcaggacgtgagaggccgggactaccagaacgccatgcgggtgtggtccaacatccctggactgaaaagcaagcacgcacctctgacccctaaagaagaggagtacctgcaggcccaggtgcggagcagaagcaagctggacgcccctaaggtggatctgctggtgaagaattgcctcctgcccctgagagagtacttcaagtatttcagccagaatagtctgcccctgggaggcagcggcggcggcatgaacatggagggcctggtgatgttccaggacctgagcatcgacttcagccaggaggagtgggagtgcctggacgccgcccagaaggacctgtacagggacgtgatgatggagaactacagcagcctggtgagcctgggcctgagcatccccaagcccgacgtgatcagcctgctggagcagggcaaggagccctggatggtgagcagggacgtgctgggcggctggtgcaggggcctggagggcggcccaagcagcggcgcccctcctcccagcggcggcagcccagccggctccccaacctctaccgaggagggcacctctgagtccgccacccccgagagcggccctggcacctccaccgagcccagcgagggcagcgcacccggcagccctgccggcagccccacctccacagaggagggaaccagcaccgagcccagcgaaggcagcgccccaggcaccagcaccgagcctagtgagcaggagattaaacggatcaacaagatcagaagaagacttgtgaaagacagcaacaccaagaaggccggcaagacaggccccatgaaaaccctgctggttagagtgatgacacccgatctgagagagcggctggaaaacctgagaaagaagcctgaaaatatcccccagcccatcagcaatacatctagagccaacctgaataagctgctgaccgattacaccgaaatgaagaaggcgatcctgcatgtgtactgggaagagttccagaaggaccctgtgggcctgatgagccgggtggcccagcctgccagcaagaagatcgatcagaacaagctgaaacctgagatggacgagaagggcaacctgaccaccgccggctttgcctgctctcagtgtggccagcccctgttcgtgtacaagctggagcaggtgtctgagaagggcaaggcttacaccaactacttcggacggtgcaatgtggccgagcacgaaaagctgatcctgctggcccagctgaagcccgagaaggatagcgacgaagccgtgacatatagcctgggaaagtttgggcagagggccctggatttctacagcattcatgtgaccaaggagtccacccaccccgtgaagcccctggcccagatcgccggaaacagatacgcctccggacctgtgggaaaggccctgagcgacgcatgtatgggcacaatcgcctccttcctgtctaagtaccaggacatcatcatcgaacaccagaaggtggtgaagggcaaccagaagagactggagagcctgcgggagctggccggcaaggaaaacctggaataccctagcgtgaccctgccacctcagcctcacaccaaggagggcgttgatgcctacaacgaagtgatcgcccgggtgcgaatgtgggtgaacctgaacctgtggcagaagctgaagctaagcagagatgatgccaagcctctgctgagactgaagggattcccttcctttcctctggtcgagagacaggccaacgaagtggactggtgggacatggtgtgtaacgtgaagaagctgatcaacgagaaaaaggaggatggcaaggtgttttggcagaatctggctggctacaagagacaggaagccctgagaccatacctgagcagcgaggaagatcggaagaagggaaagaaattcgctcggtaccagctgggcgacctgctgctgcacctggaaaagaagcacggcgaggactggggaaaggtgtacgacgaggcctgggagcggattgacaagaaagtggaaggcctgagcaagcacatcaagctggaagaggaacggagaagcgaggacgcccagagcaaggccgccctgaccgactggctgcgggctaaggccagcttcgtgatcgagggcctgaaggaggccgacaaggacgagttctgcagatgcgagctgaagctgcagaagtggtacggggacctgcggggaaagcccttcgccatcgaagccgagaacagcatcctggacatcagcggcttcagcaagcagtacaactgtgccttcatctggcagaaggacggcgtgaagaagctgaacctgtacctgatcatcaactacttcaagggcggcaagctgcggttcaagaagatcaaacctgaagccttcgaagccaacagattctacaccgtgatcaacaaaaagagcggcgagatcgtgcccatggaggtgaacttcaacttcgacgaccccaacctgatcatcctgcctctggcctttggcaagagacagggcagagaattcatctggaacgacctgctgtccctggaaaccggcagcctgaagctggccaacggaagagtgatcgagaagacactgtacaacagaagaacccggcaggatgagcctgccctgttcgtggccctgaccttcgagcggcgggaggtcctggactcctccaatatcaaaccaatgaacctgatcggcgtggcaagaggcgaaaacatccccgccgtgatcgccctgaccgaccccgagggctgcccactgagccggtttaaggatagcctgggaaacccaacccacatcctgagaatcggcgagagctataaggagaagcagcggaccatccaggccaagaaggaggtggagcagcggagagccggcggctacagccggaagtacgccagcaaagccaagaatctggcagacgatatggtgagaaacaccgctagagatctgctgtactacgccgtgacccaggatgccatgctgatcttcgccaacctgagccggggcttcggccggcagggcaagcggaccttcatggccgagagacagtacacacggatggaggactggctgaccgccaagctggcctacgagggcctgagcaagacctacctgtccaagacactggcccagtacacctccaagacatgcagcaactgtgggtttaccatcaccagcgccgactacgacagggtgctggagaagctgaagaagacagcaacaggctggatgaccacaattaacggcaaggagctgaaggtggagggccagattacctactacaacagatacaagagacagaacgtagtcaaggacctgtccgtcgagctggatagactgagcgaagaatctgtgaacaacgacatctcctcctggacaaagggcagaagcggagaagctctgagcctcctgaagaaaagattctcccatagacccgtgcaggagaagttcgtgtgcctgaactgcggcttcgagacacacgcagccgagcaagccgccctgaacatcgccagatcctggctgttcctgcggagccaggagtacaagaaataccagacaaacaagacaaccggcaacaccgataagagagccttcgtcgagacctggcagtccttttaccggaagaagcttaaggaggtgtggaaacctgccgtgcggtctggcggatctggcggaggctccaccagccccaagaaaaagagaaaagtctaagctgccttctgcggggcttgccttctggccatgcccttcttctctcccttgcacctgtacctcttggtctttgaataaagcctgagtaggaaggctagcaaaaaaaaaaaaaaaaaaaaaaaaaaaaaaaaaaaaaaaaaaaaaaaaaaaaaaaaaaaaaaaaaaaaaaaaaaaaaaaa

SEQ ID NO: 12853 - RNA, 5785 nt, synthetic construct
  source 1..5785: mol_type = other RNA
aggaaataagagagaaaagaagagtaagaagaaatataagagccaccatggcccctaagaagaagcgtaaagtgagccggatggaacgcctcgtctacgaggtgcggcagaagtgcagaaacatcgaggacatctgcatctcctgcggatctctgaacgtgaccctggagcacccactgttcatcggcggcatgtgccagaactgtaaaaactgttttctggagtgtgcctatcaatacgacgatgacggctaccagagctactgcaccatctgttgcggcggaagagaggtgctgatgtgtggaaataacaactgctgccggtgcttctgcgtggaatgcgtggacctgctggtgggccccggcgccgcccaggccgctattaaggaagatccttggaactgctacatgtgcggccacaagggcacatacggcctgctgagacggagagaggactggcctagcagactgcagatgttcttcgccaataaccacgaccaggagttcgacccccctaaggtgtaccctcccgtccccgccgagaagagaaagcccatccgggtcctgagcctgttcgatggcatcgccaccggtctgctggtgctgaaggacctgggcatccaggtggataggtacattgcctccgaggtgtgcgaggactccatcaccgtgggaatggtgcgtcatcagggcaagatcatgtacgtgggcgacgtgcggagcgtgacacagaagcatatccaggagtggggccctttcgacctggtgatcggcggcagcccttgcaatgacctgagcatcgtgaacccagcccggaagggcctgtacgagggaaccggcagactgttcttcgagttttacagactgctgcacgacgcccggcctaaggaaggcgacgaccggcccttcttttggctgttcgagaatgtggtggccatgggagtcagcgacaagcgggatattagccggttcctggagagcaaccccgtgatgatcgatgccaaggaagtgagcgccgcccaccgggccagatacttctggggcaatctgcctggcatgaacagacccctggccagcaccgtgaacgacaagctggagctgcaggagtgcctggagcacggccggatcgccaagttcagcaaggtgagaaccatcaccacccgaagcaacagcatcaaacaaggcaaggaccagcactttcctgtgttcatgaacgagaaggaggacatcctgtggtgtaccgagatggagagagtgttcgggttcccagtccactacacagatgtcagcaacatgtctagactggccagacagagactgctgggaagaagctggtccgtccctgtgatcagacacctgttcgcccctctgaaggagtacttcgcctgcgtgagcagcggcaacagcaacgccaacagccggggccccagcttctctagcggcctggtgccactgtccctgagagggagccacatgggccccatggagatctacaaaaccgtgagcgcctggaagcggcagcctgtgcgcgtgctgagcctgtttcggaatatcgataaagtcctgaaaagcctgggattcctggagagcggctctggctccggcggtggcaccctgaagtacgtggaggatgtgacaaacgtggtcagacgggatgtggagaagtggggccccttcgatctggtgtacggcagcacccaacccctgggcagctcttgtgaccggtgccctggctggtacatgtttcagttccaccggatcctgcagtacgccctgccgagacaggagtcccagcggccattcttttggattttcatggacaacttgctgctgaccgaggatgaccaggaaactaccactcggttcctgcagaccgaagccgtgaccctgcaggacgtgagaggccgggactaccagaacgccatgcgggtgtggtccaacatccctggactgaaaagcaagcacgcacctctgacccctaaagaagaggagtacctgcaggcccaggtgcggagcagaagcaagctggacgcccctaaggtggatctgctggtgaagaattgcctcctgcccctgagagagtacttcaagtatttcagccagaatagtctgcccctgggaggcagcggcggcggcatcaagagccccctgaccttcggcgacgtggccgtggagttcagcggcgaggagtgggcctggctggacagcgcccagaggagcctgcacaggagcgtgatgctggagaactacaggaacctggccagcctgggcctgtgcctgagcaagcccgagatgatcagcagcctggagcagaggaaggagccctgggccgtgaagaggaagagcaccagcggcaagtgccccgacctgcagaccctgggcggcccaagcagcggcgcccctcctcccagcggcggcagcccagccggctccccaacctctaccgaggagggcacctctgagtccgccacccccgagagcggccctggcacctccaccgagcccagcgagggcagcgcacccggcagccctgccggcagccccacctccacagaggagggaaccagcaccgagcccagcgaaggcagcgccccaggcaccagcaccgagcctagtgagcaggagattaaacggatcaacaagatcagaagaagacttgtgaaagacagcaacaccaagaaggccggcaagacaggccccatgaaaaccctgctggttagagtgatgacacccgatctgagagagcggctggaaaacctgagaaagaagcctgaaaatatcccccagcccatcagcaatacatctagagccaacctgaataagctgctgaccgattacaccgaaatgaagaaggcgatcctgcatgtgtactgggaagagttccagaaggaccctgtgggcctgatgagccgggtggcccagcctgccagcaagaagatcgatcagaacaagctgaaacctgagatggacgagaagggcaacctgaccaccgccggctttgcctgctctcagtgtggccagcccctgttcgtgtacaagctggagcaggtgtctgagaagggcaaggcttacaccaactacttcggacggtgcaatgtggccgagcacgaaaagctgatcctgctggcccagctgaagcccgagaaggatagcgacgaagccgtgacatatagcctgggaaagtttgggcagagggccctggatttctacagcattcatgtgaccaaggagtccacccaccccgtgaagcccctggcccagatcgccggaaacagatacgcctccggacctgtgggaaaggccctgagcgacgcatgtatgggcacaatcgcctccttcctgtctaagtaccaggacatcatcatcgaacaccagaaggtggtgaagggcaaccagaagagactggagagcctgcgggagctggccggcaaggaaaacctggaataccctagcgtgaccctgccacctcagcctcacaccaaggagggcgttgatgcctacaacgaagtgatcgcccgggtgcgaatgtgggtgaacctgaacctgtggcagaagctgaagctaagcagagatgatgccaagcctctgctgagactgaagggattcccttcctttcctctggtcgagagacaggccaacgaagtggactggtgggacatggtgtgtaacgtgaagaagctgatcaacgagaaaaaggaggatggcaaggtgttttggcagaatctggctggctacaagagacaggaagccctgagaccatacctgagcagcgaggaagatcggaagaagggaaagaaattcgctcggtaccagctgggcgacctgctgctgcacctggaaaagaagcacggcgaggactggggaaaggtgtacgacgaggcctgggagcggattgacaagaaagtggaaggcctgagcaagcacatcaagctggaagaggaacggagaagcgaggacgcccagagcaaggccgccctgaccgactggctgcgggctaaggccagcttcgtgatcgagggcctgaaggaggccgacaaggacgagttctgcagatgcgagctgaagctgcagaagtggtacggggacctgcggggaaagcccttcgccatcgaagccgagaacagcatcctggacatcagcggcttcagcaagcagtacaactgtgccttcatctggcagaaggacggcgtgaagaagctgaacctgtacctgatcatcaactacttcaagggcggcaagctgcggttcaagaagatcaaacctgaagccttcgaagccaacagattctacaccgtgatcaacaaaaagagcggcgagatcgtgcccatggaggtgaacttcaacttcgacgaccccaacctgatcatcctgcctctggcctttggcaagagacagggcagagaattcatctggaacgacctgctgtccctggaaaccggcagcctgaagctggccaacggaagagtgatcgagaagacactgtacaacagaagaacccggcaggatgagcctgccctgttcgtggccctgaccttcgagcggcgggaggtcctggactcctccaatatcaaaccaatgaacctgatcggcgtggcaagaggcgaaaacatccccgccgtgatcgccctgaccgaccccgagggctgcccactgagccggtttaaggatagcctgggaaacccaacccacatcctgagaatcggcgagagctataaggagaagcagcggaccatccaggccaagaaggaggtggagcagcggagagccggcggctacagccggaagtacgccagcaaagccaagaatctggcagacgatatggtgagaaacaccgctagagatctgctgtactacgccgtgacccaggatgccatgctgatcttcgccaacctgagccggggcttcggccggcagggcaagcggaccttcatggccgagagacagtacacacggatggaggactggctgaccgccaagctggcctacgagggcctgagcaagacctacctgtccaagacactggcccagtacacctccaagacatgcagcaactgtgggtttaccatcaccagcgccgactacgacagggtgctggagaagctgaagaagacagcaacaggctggatgaccacaattaacggcaaggagctgaaggtggagggccagattacctactacaacagatacaagagacagaacgtagtcaaggacctgtccgtcgagctggatagactgagcgaagaatctgtgaacaacgacatctcctcctggacaaagggcagaagcggagaagctctgagcctcctgaagaaaagattctcccatagacccgtgcaggagaagttcgtgtgcctgaactgcggcttcgagacacacgcagccgagcaagccgccctgaacatcgccagatcctggctgttcctgcggagccaggagtacaagaaataccagacaaacaagacaaccggcaacaccgataagagagccttcgtcgagacctggcagtccttttaccggaagaagcttaaggaggtgtggaaacctgccgtgcggtctggcggatctggcggaggctccaccagccccaagaaaaagagaaaagtctaagctgccttctgcggggcttgccttctggccatgcccttcttctctcccttgcacctgtacctcttggtctttgaataaagcctgagtaggaaggctagcaaaaaaaaaaaaaaaaaaaaaaaaaaaaaaaaaaaaaaaaaaaaaaaaaaaaaaaaaaaaaaaaaaaaaaaaaaaaaaaa

SEQ ID NO: 12854 - RNA, 5785 nt, synthetic construct
  source 1..5785: mol_type = other RNA
aggaaataagagagaaaagaagagtaagaagaaatataagagccaccatggcccctaagaagaagcgtaaagtgagccggatggaacgcctcgtctacgaggtgcggcagaagtgcagaaacatcgaggacatctgcatctcctgcggatctctgaacgtgaccctggagcacccactgttcatcggcggcatgtgccagaactgtaaaaactgttttctggagtgtgcctatcaatacgacgatgacggctaccagagctactgcaccatctgttgcggcggaagagaggtgctgatgtgtggaaataacaactgctgccggtgcttctgcgtggaatgcgtggacctgctggtgggccccggcgccgcccaggccgctattaaggaagatccttggaactgctacatgtgcggccacaagggcacatacggcctgctgagacggagagaggactggcctagcagactgcagatgttcttcgccaataaccacgaccaggagttcgacccccctaaggtgtaccctcccgtccccgccgagaagagaaagcccatccgggtcctgagcctgttcgatggcatcgccaccggtctgctggtgctgaaggacctgggcatccaggtggataggtacattgcctccgaggtgtgcgaggactccatcaccgtgggaatggtgcgtcatcagggcaagatcatgtacgtgggcgacgtgcggagcgtgacacagaagcatatccaggagtggggccctttcgacctggtgatcggcggcagcccttgcaatgacctgagcatcgtgaacccagcccggaagggcctgtacgagggaaccggcagactgttcttcgagttttacagactgctgcacgacgcccggcctaaggaaggcgacgaccggcccttcttttggctgttcgagaatgtggtggccatgggagtcagcgacaagcgggatattagccggttcctggagagcaaccccgtgatgatcgatgccaaggaagtgagcgccgcccaccgggccagatacttctggggcaatctgcctggcatgaacagacccctggccagcaccgtgaacgacaagctggagctgcaggagtgcctggagcacggccggatcgccaagttcagcaaggtgagaaccatcaccacccgaagcaacagcatcaaacaaggcaaggaccagcactttcctgtgttcatgaacgagaaggaggacatcctgtggtgtaccgagatggagagagtgttcgggttcccagtccactacacagatgtcagcaacatgtctagactggccagacagagactgctgggaagaagctggtccgtccctgtgatcagacacctgttcgcccctctgaaggagtacttcgcctgcgtgagcagcggcaacagcaacgccaacagccggggccccagcttctctagcggcctggtgccactgtccctgagagggagccacatgggccccatggagatctacaaaaccgtgagcgcctggaagcggcagcctgtgcgcgtgctgagcctgtttcggaatatcgataaagtcctgaaaagcctgggattcctggagagcggctctggctccggcggtggcaccctgaagtacgtggaggatgtgacaaacgtggtcagacgggatgtggagaagtggggccccttcgatctggtgtacggcagcacccaacccctgggcagctcttgtgaccggtgccctggctggtacatgtttcagttccaccggatcctgcagtacgccctgccgagacaggagtcccagcggccattcttttggattttcatggacaacttgctgctgaccgaggatgaccaggaaactaccactcggttcctgcagaccgaagccgtgaccctgcaggacgtgagaggccgggactaccagaacgccatgcgggtgtggtccaacatccctggactgaaaagcaagcacgcacctctgacccctaaagaagaggagtacctgcaggcccaggtgcggagcagaagcaagctggacgcccctaaggtggatctgctggtgaagaattgcctcctgcccctgagagagtacttcaagtatttcagccagaatagtctgcccctgggaggcagcggcggcggcctgcccctgaccttcgaggacgtggccgtgtacttcagcgagcaggagtggcagaacctggaggcctggcagaaggagctgtacaagcaggtgatgagggccaactacgagatcctgctgagcctggacaacggcctgcccaagcccgagctgatcagctggatcgagcagggcaaggagctgttcaagaagtggggcgagagccagcagagcaggagcatcatctgcagcagcgccgacctgggcggcccaagcagcggcgcccctcctcccagcggcggcagcccagccggctccccaacctctaccgaggagggcacctctgagtccgccacccccgagagcggccctggcacctccaccgagcccagcgagggcagcgcacccggcagccctgccggcagccccacctccacagaggagggaaccagcaccgagcccagcgaaggcagcgccccaggcaccagcaccgagcctagtgagcaggagattaaacggatcaacaagatcagaagaagacttgtgaaagacagcaacaccaagaaggccggcaagacaggccccatgaaaaccctgctggttagagtgatgacacccgatctgagagagcggctggaaaacctgagaaagaagcctgaaaatatcccccagcccatcagcaatacatctagagccaacctgaataagctgctgaccgattacaccgaaatgaagaaggcgatcctgcatgtgtactgggaagagttccagaaggaccctgtgggcctgatgagccgggtggcccagcctgccagcaagaagatcgatcagaacaagctgaaacctgagatggacgagaagggcaacctgaccaccgccggctttgcctgctctcagtgtggccagcccctgttcgtgtacaagctggagcaggtgtctgagaagggcaaggcttacaccaactacttcggacggtgcaatgtggccgagcacgaaaagctgatcctgctggcccagctgaagcccgagaaggatagcgacgaagccgtgacatatagcctgggaaagtttgggcagagggccctggatttctacagcattcatgtgaccaaggagtccacccaccccgtgaagcccctggcccagatcgccggaaacagatacgcctccggacctgtgggaaaggccctgagcgacgcatgtatgggcacaatcgcctccttcctgtctaagtaccaggacatcatcatcgaacaccagaaggtggtgaagggcaaccagaagagactggagagcctgcgggagctggccggcaaggaaaacctggaataccctagcgtgaccctgccacctcagcctcacaccaaggagggcgttgatgcctacaacgaagtgatcgcccgggtgcgaatgtgggtgaacctgaacctgtggcagaagctgaagctaagcagagatgatgccaagcctctgctgagactgaagggattcccttcctttcctctggtcgagagacaggccaacgaagtggactggtgggacatggtgtgtaacgtgaagaagctgatcaacgagaaaaaggaggatggcaaggtgttttggcagaatctggctggctacaagagacaggaagccctgagaccatacctgagcagcgaggaagatcggaagaagggaaagaaattcgctcggtaccagctgggcgacctgctgctgcacctggaaaagaagcacggcgaggactggggaaaggtgtacgacgaggcctgggagcggattgacaagaaagtggaaggcctgagcaagcacatcaagctggaagaggaacggagaagcgaggacgcccagagcaaggccgccctgaccgactggctgcgggctaaggccagcttcgtgatcgagggcctgaaggaggccgacaaggacgagttctgcagatgcgagctgaagctgcagaagtggtacggggacctgcggggaaagcccttcgccatcgaagccgagaacagcatcctggacatcagcggcttcagcaagcagtacaactgtgccttcatctggcagaaggacggcgtgaagaagctgaacctgtacctgatcatcaactacttcaagggcggcaagctgcggttcaagaagatcaaacctgaagccttcgaagccaacagattctacaccgtgatcaacaaaaagagcggcgagatcgtgcccatggaggtgaacttcaacttcgacgaccccaacctgatcatcctgcctctggcctttggcaagagacagggcagagaattcatctggaacgacctgctgtccctggaaaccggcagcctgaagctggccaacggaagagtgatcgagaagacactgtacaacagaagaacccggcaggatgagcctgccctgttcgtggccctgaccttcgagcggcgggaggtcctggactcctccaatatcaaaccaatgaacctgatcggcgtggcaagaggcgaaaacatccccgccgtgatcgccctgaccgaccccgagggctgcccactgagccggtttaaggatagcctgggaaacccaacccacatcctgagaatcggcgagagctataaggagaagcagcggaccatccaggccaagaaggaggtggagcagcggagagccggcggctacagccggaagtacgccagcaaagccaagaatctggcagacgatatggtgagaaacaccgctagagatctgctgtactacgccgtgacccaggatgccatgctgatcttcgccaacctgagccggggcttcggccggcagggcaagcggaccttcatggccgagagacagtacacacggatggaggactggctgaccgccaagctggcctacgagggcctgagcaagacctacctgtccaagacactggcccagtacacctccaagacatgcagcaactgtgggtttaccatcaccagcgccgactacgacagggtgctggagaagctgaagaagacagcaacaggctggatgaccacaattaacggcaaggagctgaaggtggagggccagattacctactacaacagatacaagagacagaacgtagtcaaggacctgtccgtcgagctggatagactgagcgaagaatctgtgaacaacgacatctcctcctggacaaagggcagaagcggagaagctctgagcctcctgaagaaaagattctcccatagacccgtgcaggagaagttcgtgtgcctgaactgcggcttcgagacacacgcagccgagcaagccgccctgaacatcgccagatcctggctgttcctgcggagccaggagtacaagaaataccagacaaacaagacaaccggcaacaccgataagagagccttcgtcgagacctggcagtccttttaccggaagaagcttaaggaggtgtggaaacctgccgtgcggtctggcggatctggcggaggctccaccagccccaagaaaaagagaaaagtctaagctgccttctgcggggcttgccttctggccatgcccttcttctctcccttgcacctgtacctcttggtctttgaataaagcctgagtaggaaggctagcaaaaaaaaaaaaaaaaaaaaaaaaaaaaaaaaaaaaaaaaaaaaaaaaaaaaaaaaaaaaaaaaaaaaaaaaaaaaaaaa

SEQ ID NO: 12855 - RNA, 5785 nt, synthetic construct
  source 1..5785: mol_type = other RNA
aggaaataagagagaaaagaagagtaagaagaaatataagagccaccatggcccctaagaagaagcgtaaagtgagccggatggaacgcctcgtctacgaggtgcggcagaagtgcagaaacatcgaggacatctgcatctcctgcggatctctgaacgtgaccctggagcacccactgttcatcggcggcatgtgccagaactgtaaaaactgttttctggagtgtgcctatcaatacgacgatgacggctaccagagctactgcaccatctgttgcggcggaagagaggtgctgatgtgtggaaataacaactgctgccggtgcttctgcgtggaatgcgtggacctgctggtgggccccggcgccgcccaggccgctattaaggaagatccttggaactgctacatgtgcggccacaagggcacatacggcctgctgagacggagagaggactggcctagcagactgcagatgttcttcgccaataaccacgaccaggagttcgacccccctaaggtgtaccctcccgtccccgccgagaagagaaagcccatccgggtcctgagcctgttcgatggcatcgccaccggtctgctggtgctgaaggacctgggcatccaggtggataggtacattgcctccgaggtgtgcgaggactccatcaccgtgggaatggtgcgtcatcagggcaagatcatgtacgtgggcgacgtgcggagcgtgacacagaagcatatccaggagtggggccctttcgacctggtgatcggcggcagcccttgcaatgacctgagcatcgtgaacccagcccggaagggcctgtacgagggaaccggcagactgttcttcgagttttacagactgctgcacgacgcccggcctaaggaaggcgacgaccggcccttcttttggctgttcgagaatgtggtggccatgggagtcagcgacaagcgggatattagccggttcctggagagcaaccccgtgatgatcgatgccaaggaagtgagcgccgcccaccgggccagatacttctggggcaatctgcctggcatgaacagacccctggccagcaccgtgaacgacaagctggagctgcaggagtgcctggagcacggccggatcgccaagttcagcaaggtgagaaccatcaccacccgaagcaacagcatcaaacaaggcaaggaccagcactttcctgtgttcatgaacgagaaggaggacatcctgtggtgtaccgagatggagagagtgttcgggttcccagtccactacacagatgtcagcaacatgtctagactggccagacagagactgctgggaagaagctggtccgtccctgtgatcagacacctgttcgcccctctgaaggagtacttcgcctgcgtgagcagcggcaacagcaacgccaacagccggggccccagcttctctagcggcctggtgccactgtccctgagagggagccacatgggccccatggagatctacaaaaccgtgagcgcctggaagcggcagcctgtgcgcgtgctgagcctgtttcggaatatcgataaagtcctgaaaagcctgggattcctggagagcggctctggctccggcggtggcaccctgaagtacgtggaggatgtgacaaacgtggtcagacgggatgtggagaagtggggccccttcgatctggtgtacggcagcacccaacccctgggcagctcttgtgaccggtgccctggctggtacatgtttcagttccaccggatcctgcagtacgccctgccgagacaggagtcccagcggccattcttttggattttcatggacaacttgctgctgaccgaggatgaccaggaaactaccactcggttcctgcagaccgaagccgtgaccctgcaggacgtgagaggccgggactaccagaacgccatgcgggtgtggtccaacatccctggactgaaaagcaagcacgcacctctgacccctaaagaagaggagtacctgcaggcccaggtgcggagcagaagcaagctggacgcccctaaggtggatctgctggtgaagaattgcctcctgcccctgagagagtacttcaagtatttcagccagaatagtctgcccctgggaggcagcggcggcggcctgcaggacctggtgaccttcaaggacgtgaccgtggagttcaaccaggaggagtgggccctgctggacagcagccagcagaagctgtacagggacgtgatgctggagaactacggcaacctggccagcctgggctaccacgtggacaagcccagcctgatcagccagctggagcaggaggacaaggtgatgaccgaggagggcggcatcctgcccggcacctgccccgacctggagaccgtgggcggcccaagcagcggcgcccctcctcccagcggcggcagcccagccggctccccaacctctaccgaggagggcacctctgagtccgccacccccgagagcggccctggcacctccaccgagcccagcgagggcagcgcacccggcagccctgccggcagccccacctccacagaggagggaaccagcaccgagcccagcgaaggcagcgccccaggcaccagcaccgagcctagtgagcaggagattaaacggatcaacaagatcagaagaagacttgtgaaagacagcaacaccaagaaggccggcaagacaggccccatgaaaaccctgctggttagagtgatgacacccgatctgagagagcggctggaaaacctgagaaagaagcctgaaaatatcccccagcccatcagcaatacatctagagccaacctgaataagctgctgaccgattacaccgaaatgaagaaggcgatcctgcatgtgtactgggaagagttccagaaggaccctgtgggcctgatgagccgggtggcccagcctgccagcaagaagatcgatcagaacaagctgaaacctgagatggacgagaagggcaacctgaccaccgccggctttgcctgctctcagtgtggccagcccctgttcgtgtacaagctggagcaggtgtctgagaagggcaaggcttacaccaactacttcggacggtgcaatgtggccgagcacgaaaagctgatcctgctggcccagctgaagcccgagaaggatagcgacgaagccgtgacatatagcctgggaaagtttgggcagagggccctggatttctacagcattcatgtgaccaaggagtccacccaccccgtgaagcccctggcccagatcgccggaaacagatacgcctccggacctgtgggaaaggccctgagcgacgcatgtatgggcacaatcgcctccttcctgtctaagtaccaggacatcatcatcgaacaccagaaggtggtgaagggcaaccagaagagactggagagcctgcgggagctggccggcaaggaaaacctggaataccctagcgtgaccctgccacctcagcctcacaccaaggagggcgttgatgcctacaacgaagtgatcgcccgggtgcgaatgtgggtgaacctgaacctgtggcagaagctgaagctaagcagagatgatgccaagcctctgctgagactgaagggattcccttcctttcctctggtcgagagacaggccaacgaagtggactggtgggacatggtgtgtaacgtgaagaagctgatcaacgagaaaaaggaggatggcaaggtgttttggcagaatctggctggctacaagagacaggaagccctgagaccatacctgagcagcgaggaagatcggaagaagggaaagaaattcgctcggtaccagctgggcgacctgctgctgcacctggaaaagaagcacggcgaggactggggaaaggtgtacgacgaggcctgggagcggattgacaagaaagtggaaggcctgagcaagcacatcaagctggaagaggaacggagaagcgaggacgcccagagcaaggccgccctgaccgactggctgcgggctaaggccagcttcgtgatcgagggcctgaaggaggccgacaaggacgagttctgcagatgcgagctgaagctgcagaagtggtacggggacctgcggggaaagcccttcgccatcgaagccgagaacagcatcctggacatcagcggcttcagcaagcagtacaactgtgccttcatctggcagaaggacggcgtgaagaagctgaacctgtacctgatcatcaactacttcaagggcggcaagctgcggttcaagaagatcaaacctgaagccttcgaagccaacagattctacaccgtgatcaacaaaaagagcggcgagatcgtgcccatggaggtgaacttcaacttcgacgaccccaacctgatcatcctgcctctggcctttggcaagagacagggcagagaattcatctggaacgacctgctgtccctggaaaccggcagcctgaagctggccaacggaagagtgatcgagaagacactgtacaacagaagaacccggcaggatgagcctgccctgttcgtggccctgaccttcgagcggcgggaggtcctggactcctccaatatcaaaccaatgaacctgatcggcgtggcaagaggcgaaaacatccccgccgtgatcgccctgaccgaccccgagggctgcccactgagccggtttaaggatagcctgggaaacccaacccacatcctgagaatcggcgagagctataaggagaagcagcggaccatccaggccaagaaggaggtggagcagcggagagccggcggctacagccggaagtacgccagcaaagccaagaatctggcagacgatatggtgagaaacaccgctagagatctgctgtactacgccgtgacccaggatgccatgctgatcttcgccaacctgagccggggcttcggccggcagggcaagcggaccttcatggccgagagacagtacacacggatggaggactggctgaccgccaagctggcctacgagggcctgagcaagacctacctgtccaagacactggcccagtacacctccaagacatgcagcaactgtgggtttaccatcaccagcgccgactacgacagggtgctggagaagctgaagaagacagcaacaggctggatgaccacaattaacggcaaggagctgaaggtggagggccagattacctactacaacagatacaagagacagaacgtagtcaaggacctgtccgtcgagctggatagactgagcgaagaatctgtgaacaacgacatctcctcctggacaaagggcagaagcggagaagctctgagcctcctgaagaaaagattctcccatagacccgtgcaggagaagttcgtgtgcctgaactgcggcttcgagacacacgcagccgagcaagccgccctgaacatcgccagatcctggctgttcctgcggagccaggagtacaagaaataccagacaaacaagacaaccggcaacaccgataagagagccttcgtcgagacctggcagtccttttaccggaagaagcttaaggaggtgtggaaacctgccgtgcggtctggcggatctggcggaggctccaccagccccaagaaaaagagaaaagtctaagctgccttctgcggggcttgccttctggccatgcccttcttctctcccttgcacctgtacctcttggtctttgaataaagcctgagtaggaaggctagcaaaaaaaaaaaaaaaaaaaaaaaaaaaaaaaaaaaaaaaaaaaaaaaaaaaaaaaaaaaaaaaaaaaaaaaaaaaaaaaa

SEQ ID NO: 12856 - RNA, 5785 nt, synthetic construct
  source 1..5785: mol_type = other RNA
aggaaataagagagaaaagaagagtaagaagaaatataagagccaccatggcccctaagaagaagcgtaaagtgagccggatggaacgcctcgtctacgaggtgcggcagaagtgcagaaacatcgaggacatctgcatctcctgcggatctctgaacgtgaccctggagcacccactgttcatcggcggcatgtgccagaactgtaaaaactgttttctggagtgtgcctatcaatacgacgatgacggctaccagagctactgcaccatctgttgcggcggaagagaggtgctgatgtgtggaaataacaactgctgccggtgcttctgcgtggaatgcgtggacctgctggtgggccccggcgccgcccaggccgctattaaggaagatccttggaactgctacatgtgcggccacaagggcacatacggcctgctgagacggagagaggactggcctagcagactgcagatgttcttcgccaataaccacgaccaggagttcgacccccctaaggtgtaccctcccgtccccgccgagaagagaaagcccatccgggtcctgagcctgttcgatggcatcgccaccggtctgctggtgctgaaggacctgggcatccaggtggataggtacattgcctccgaggtgtgcgaggactccatcaccgtgggaatggtgcgtcatcagggcaagatcatgtacgtgggcgacgtgcggagcgtgacacagaagcatatccaggagtggggccctttcgacctggtgatcggcggcagcccttgcaatgacctgagcatcgtgaacccagcccggaagggcctgtacgagggaaccggcagactgttcttcgagttttacagactgctgcacgacgcccggcctaaggaaggcgacgaccggcccttcttttggctgttcgagaatgtggtggccatgggagtcagcgacaagcgggatattagccggttcctggagagcaaccccgtgatgatcgatgccaaggaagtgagcgccgcccaccgggccagatacttctggggcaatctgcctggcatgaacagacccctggccagcaccgtgaacgacaagctggagctgcaggagtgcctggagcacggccggatcgccaagttcagcaaggtgagaaccatcaccacccgaagcaacagcatcaaacaaggcaaggaccagcactttcctgtgttcatgaacgagaaggaggacatcctgtggtgtaccgagatggagagagtgttcgggttcccagtccactacacagatgtcagcaacatgtctagactggccagacagagactgctgggaagaagctggtccgtccctgtgatcagacacctgttcgcccctctgaaggagtacttcgcctgcgtgagcagcggcaacagcaacgccaacagccggggccccagcttctctagcggcctggtgccactgtccctgagagggagccacatgggccccatggagatctacaaaaccgtgagcgcctggaagcggcagcctgtgcgcgtgctgagcctgtttcggaatatcgataaagtcctgaaaagcctgggattcctggagagcggctctggctccggcggtggcaccctgaagtacgtggaggatgtgacaaacgtggtcagacgggatgtggagaagtggggccccttcgatctggtgtacggcagcacccaacccctgggcagctcttgtgaccggtgccctggctggtacatgtttcagttccaccggatcctgcagtacgccctgccgagacaggagtcccagcggccattcttttggattttcatggacaacttgctgctgaccgaggatgaccaggaaactaccactcggttcctgcagaccgaagccgtgaccctgcaggacgtgagaggccgggactaccagaacgccatgcgggtgtggtccaacatccctggactgaaaagcaagcacgcacctctgacccctaaagaagaggagtacctgcaggcccaggtgcggagcagaagcaagctggacgcccctaaggtggatctgctggtgaagaattgcctcctgcccctgagagagtacttcaagtatttcagccagaatagtctgcccctgggaggcagcggcggcggcgagcaggagcccgtgaccttcaaggacgtggccgtggacttcacccaggaggagtggggccagctggacctggtgcagaggaccctgtacagggacgtgatgctggagacctacggccacctgctgagcgtgggcaaccagaccgccaagcccgaggtgatcagcctgctggagcagggcgaggagccctggagcgtggagcagacctgcccccagagggcctgccccgagtggatgaggaacggcggcccaagcagcggcgcccctcctcccagcggcggcagcccagccggctccccaacctctaccgaggagggcacctctgagtccgccacccccgagagcggccctggcacctccaccgagcccagcgagggcagcgcacccggcagccctgccggcagccccacctccacagaggagggaaccagcaccgagcccagcgaaggcagcgccccaggcaccagcaccgagcctagtgagcaggagattaaacggatcaacaagatcagaagaagacttgtgaaagacagcaacaccaagaaggccggcaagacaggccccatgaaaaccctgctggttagagtgatgacacccgatctgagagagcggctggaaaacctgagaaagaagcctgaaaatatcccccagcccatcagcaatacatctagagccaacctgaataagctgctgaccgattacaccgaaatgaagaaggcgatcctgcatgtgtactgggaagagttccagaaggaccctgtgggcctgatgagccgggtggcccagcctgccagcaagaagatcgatcagaacaagctgaaacctgagatggacgagaagggcaacctgaccaccgccggctttgcctgctctcagtgtggccagcccctgttcgtgtacaagctggagcaggtgtctgagaagggcaaggcttacaccaactacttcggacggtgcaatgtggccgagcacgaaaagctgatcctgctggcccagctgaagcccgagaaggatagcgacgaagccgtgacatatagcctgggaaagtttgggcagagggccctggatttctacagcattcatgtgaccaaggagtccacccaccccgtgaagcccctggcccagatcgccggaaacagatacgcctccggacctgtgggaaaggccctgagcgacgcatgtatgggcacaatcgcctccttcctgtctaagtaccaggacatcatcatcgaacaccagaaggtggtgaagggcaaccagaagagactggagagcctgcgggagctggccggcaaggaaaacctggaataccctagcgtgaccctgccacctcagcctcacaccaaggagggcgttgatgcctacaacgaagtgatcgcccgggtgcgaatgtgggtgaacctgaacctgtggcagaagctgaagctaagcagagatgatgccaagcctctgctgagactgaagggattcccttcctttcctctggtcgagagacaggccaacgaagtggactggtgggacatggtgtgtaacgtgaagaagctgatcaacgagaaaaaggaggatggcaaggtgttttggcagaatctggctggctacaagagacaggaagccctgagaccatacctgagcagcgaggaagatcggaagaagggaaagaaattcgctcggtaccagctgggcgacctgctgctgcacctggaaaagaagcacggcgaggactggggaaaggtgtacgacgaggcctgggagcggattgacaagaaagtggaaggcctgagcaagcacatcaagctggaagaggaacggagaagcgaggacgcccagagcaaggccgccctgaccgactggctgcgggctaaggccagcttcgtgatcgagggcctgaaggaggccgacaaggacgagttctgcagatgcgagctgaagctgcagaagtggtacggggacctgcggggaaagcccttcgccatcgaagccgagaacagcatcctggacatcagcggcttcagcaagcagtacaactgtgccttcatctggcagaaggacggcgtgaagaagctgaacctgtacctgatcatcaactacttcaagggcggcaagctgcggttcaagaagatcaaacctgaagccttcgaagccaacagattctacaccgtgatcaacaaaaagagcggcgagatcgtgcccatggaggtgaacttcaacttcgacgaccccaacctgatcatcctgcctctggcctttggcaagagacagggcagagaattcatctggaacgacctgctgtccctggaaaccggcagcctgaagctggccaacggaagagtgatcgagaagacactgtacaacagaagaacccggcaggatgagcctgccctgttcgtggccctgaccttcgagcggcgggaggtcctggactcctccaatatcaaaccaatgaacctgatcggcgtggcaagaggcgaaaacatccccgccgtgatcgccctgaccgaccccgagggctgcccactgagccggtttaaggatagcctgggaaacccaacccacatcctgagaatcggcgagagctataaggagaagcagcggaccatccaggccaagaaggaggtggagcagcggagagccggcggctacagccggaagtacgccagcaaagccaagaatctggcagacgatatggtgagaaacaccgctagagatctgctgtactacgccgtgacccaggatgccatgctgatcttcgccaacctgagccggggcttcggccggcagggcaagcggaccttcatggccgagagacagtacacacggatggaggactggctgaccgccaagctggcctacgagggcctgagcaagacctacctgtccaagacactggcccagtacacctccaagacatgcagcaactgtgggtttaccatcaccagcgccgactacgacagggtgctggagaagctgaagaagacagcaacaggctggatgaccacaattaacggcaaggagctgaaggtggagggccagattacctactacaacagatacaagagacagaacgtagtcaaggacctgtccgtcgagctggatagactgagcgaagaatctgtgaacaacgacatctcctcctggacaaagggcagaagcggagaagctctgagcctcctgaagaaaagattctcccatagacccgtgcaggagaagttcgtgtgcctgaactgcggcttcgagacacacgcagccgagcaagccgccctgaacatcgccagatcctggctgttcctgcggagccaggagtacaagaaataccagacaaacaagacaaccggcaacaccgataagagagccttcgtcgagacctggcagtccttttaccggaagaagcttaaggaggtgtggaaacctgccgtgcggtctggcggatctggcggaggctccaccagccccaagaaaaagagaaaagtctaagctgccttctgcggggcttgccttctggccatgcccttcttctctcccttgcacctgtacctcttggtctttgaataaagcctgagtaggaaggctagcaaaaaaaaaaaaaaaaaaaaaaaaaaaaaaaaaaaaaaaaaaaaaaaaaaaaaaaaaaaaaaaaaaaaaaaaaaaaaaaa

SEQ ID NO: 12857 - RNA, 5785 nt, synthetic construct
  source 1..5785: mol_type = other RNA
aggaaataagagagaaaagaagagtaagaagaaatataagagccaccatggcccctaagaagaagcgtaaagtgagccggatggaacgcctcgtctacgaggtgcggcagaagtgcagaaacatcgaggacatctgcatctcctgcggatctctgaacgtgaccctggagcacccactgttcatcggcggcatgtgccagaactgtaaaaactgttttctggagtgtgcctatcaatacgacgatgacggctaccagagctactgcaccatctgttgcggcggaagagaggtgctgatgtgtggaaataacaactgctgccggtgcttctgcgtggaatgcgtggacctgctggtgggccccggcgccgcccaggccgctattaaggaagatccttggaactgctacatgtgcggccacaagggcacatacggcctgctgagacggagagaggactggcctagcagactgcagatgttcttcgccaataaccacgaccaggagttcgacccccctaaggtgtaccctcccgtccccgccgagaagagaaagcccatccgggtcctgagcctgttcgatggcatcgccaccggtctgctggtgctgaaggacctgggcatccaggtggataggtacattgcctccgaggtgtgcgaggactccatcaccgtgggaatggtgcgtcatcagggcaagatcatgtacgtgggcgacgtgcggagcgtgacacagaagcatatccaggagtggggccctttcgacctggtgatcggcggcagcccttgcaatgacctgagcatcgtgaacccagcccggaagggcctgtacgagggaaccggcagactgttcttcgagttttacagactgctgcacgacgcccggcctaaggaaggcgacgaccggcccttcttttggctgttcgagaatgtggtggccatgggagtcagcgacaagcgggatattagccggttcctggagagcaaccccgtgatgatcgatgccaaggaagtgagcgccgcccaccgggccagatacttctggggcaatctgcctggcatgaacagacccctggccagcaccgtgaacgacaagctggagctgcaggagtgcctggagcacggccggatcgccaagttcagcaaggtgagaaccatcaccacccgaagcaacagcatcaaacaaggcaaggaccagcactttcctgtgttcatgaacgagaaggaggacatcctgtggtgtaccgagatggagagagtgttcgggttcccagtccactacacagatgtcagcaacatgtctagactggccagacagagactgctgggaagaagctggtccgtccctgtgatcagacacctgttcgcccctctgaaggagtacttcgcctgcgtgagcagcggcaacagcaacgccaacagccggggccccagcttctctagcggcctggtgccactgtccctgagagggagccacatgggccccatggagatctacaaaaccgtgagcgcctggaagcggcagcctgtgcgcgtgctgagcctgtttcggaatatcgataaagtcctgaaaagcctgggattcctggagagcggctctggctccggcggtggcaccctgaagtacgtggaggatgtgacaaacgtggtcagacgggatgtggagaagtggggccccttcgatctggtgtacggcagcacccaacccctgggcagctcttgtgaccggtgccctggctggtacatgtttcagttccaccggatcctgcagtacgccctgccgagacaggagtcccagcggccattcttttggattttcatggacaacttgctgctgaccgaggatgaccaggaaactaccactcggttcctgcagaccgaagccgtgaccctgcaggacgtgagaggccgggactaccagaacgccatgcgggtgtggtccaacatccctggactgaaaagcaagcacgcacctctgacccctaaagaagaggagtacctgcaggcccaggtgcggagcagaagcaagctggacgcccctaaggtggatctgctggtgaagaattgcctcctgcccctgagagagtacttcaagtatttcagccagaatagtctgcccctgggaggcagcggcggcggcatgcccctgaaggcccagtaccaggagatggtgaccttcgaggacgtggccgtgcacttcaccaagaccgagtggaccggcctgagccccgcccagagggccctgtacaggagcgtgatgctggagaacttcggcaacctgaccgccctgggctaccccgtgcccaagcccgccctgatcagcctgctggagggcggcgacatggcctggggcctggaggcccaggacgacccccccgccgagggcggcccaagcagcggcgcccctcctcccagcggcggcagcccagccggctccccaacctctaccgaggagggcacctctgagtccgccacccccgagagcggccctggcacctccaccgagcccagcgagggcagcgcacccggcagccctgccggcagccccacctccacagaggagggaaccagcaccgagcccagcgaaggcagcgccccaggcaccagcaccgagcctagtgagcaggagattaaacggatcaacaagatcagaagaagacttgtgaaagacagcaacaccaagaaggccggcaagacaggccccatgaaaaccctgctggttagagtgatgacacccgatctgagagagcggctggaaaacctgagaaagaagcctgaaaatatcccccagcccatcagcaatacatctagagccaacctgaataagctgctgaccgattacaccgaaatgaagaaggcgatcctgcatgtgtactgggaagagttccagaaggaccctgtgggcctgatgagccgggtggcccagcctgccagcaagaagatcgatcagaacaagctgaaacctgagatggacgagaagggcaacctgaccaccgccggctttgcctgctctcagtgtggccagcccctgttcgtgtacaagctggagcaggtgtctgagaagggcaaggcttacaccaactacttcggacggtgcaatgtggccgagcacgaaaagctgatcctgctggcccagctgaagcccgagaaggatagcgacgaagccgtgacatatagcctgggaaagtttgggcagagggccctggatttctacagcattcatgtgaccaaggagtccacccaccccgtgaagcccctggcccagatcgccggaaacagatacgcctccggacctgtgggaaaggccctgagcgacgcatgtatgggcacaatcgcctccttcctgtctaagtaccaggacatcatcatcgaacaccagaaggtggtgaagggcaaccagaagagactggagagcctgcgggagctggccggcaaggaaaacctggaataccctagcgtgaccctgccacctcagcctcacaccaaggagggcgttgatgcctacaacgaagtgatcgcccgggtgcgaatgtgggtgaacctgaacctgtggcagaagctgaagctaagcagagatgatgccaagcctctgctgagactgaagggattcccttcctttcctctggtcgagagacaggccaacgaagtggactggtgggacatggtgtgtaacgtgaagaagctgatcaacgagaaaaaggaggatggcaaggtgttttggcagaatctggctggctacaagagacaggaagccctgagaccatacctgagcagcgaggaagatcggaagaagggaaagaaattcgctcggtaccagctgggcgacctgctgctgcacctggaaaagaagcacggcgaggactggggaaaggtgtacgacgaggcctgggagcggattgacaagaaagtggaaggcctgagcaagcacatcaagctggaagaggaacggagaagcgaggacgcccagagcaaggccgccctgaccgactggctgcgggctaaggccagcttcgtgatcgagggcctgaaggaggccgacaaggacgagttctgcagatgcgagctgaagctgcagaagtggtacggggacctgcggggaaagcccttcgccatcgaagccgagaacagcatcctggacatcagcggcttcagcaagcagtacaactgtgccttcatctggcagaaggacggcgtgaagaagctgaacctgtacctgatcatcaactacttcaagggcggcaagctgcggttcaagaagatcaaacctgaagccttcgaagccaacagattctacaccgtgatcaacaaaaagagcggcgagatcgtgcccatggaggtgaacttcaacttcgacgaccccaacctgatcatcctgcctctggcctttggcaagagacagggcagagaattcatctggaacgacctgctgtccctggaaaccggcagcctgaagctggccaacggaagagtgatcgagaagacactgtacaacagaagaacccggcaggatgagcctgccctgttcgtggccctgaccttcgagcggcgggaggtcctggactcctccaatatcaaaccaatgaacctgatcggcgtggcaagaggcgaaaacatccccgccgtgatcgccctgaccgaccccgagggctgcccactgagccggtttaaggatagcctgggaaacccaacccacatcctgagaatcggcgagagctataaggagaagcagcggaccatccaggccaagaaggaggtggagcagcggagagccggcggctacagccggaagtacgccagcaaagccaagaatctggcagacgatatggtgagaaacaccgctagagatctgctgtactacgccgtgacccaggatgccatgctgatcttcgccaacctgagccggggcttcggccggcagggcaagcggaccttcatggccgagagacagtacacacggatggaggactggctgaccgccaagctggcctacgagggcctgagcaagacctacctgtccaagacactggcccagtacacctccaagacatgcagcaactgtgggtttaccatcaccagcgccgactacgacagggtgctggagaagctgaagaagacagcaacaggctggatgaccacaattaacggcaaggagctgaaggtggagggccagattacctactacaacagatacaagagacagaacgtagtcaaggacctgtccgtcgagctggatagactgagcgaagaatctgtgaacaacgacatctcctcctggacaaagggcagaagcggagaagctctgagcctcctgaagaaaagattctcccatagacccgtgcaggagaagttcgtgtgcctgaactgcggcttcgagacacacgcagccgagcaagccgccctgaacatcgccagatcctggctgttcctgcggagccaggagtacaagaaataccagacaaacaagacaaccggcaacaccgataagagagccttcgtcgagacctggcagtccttttaccggaagaagcttaaggaggtgtggaaacctgccgtgcggtctggcggatctggcggaggctccaccagccccaagaaaaagagaaaagtctaagctgccttctgcggggcttgccttctggccatgcccttcttctctcccttgcacctgtacctcttggtctttgaataaagcctgagtaggaaggctagcaaaaaaaaaaaaaaaaaaaaaaaaaaaaaaaaaaaaaaaaaaaaaaaaaaaaaaaaaaaaaaaaaaaaaaaaaaaaaaaa

SEQ ID NO: 12858 - RNA, 5785 nt, synthetic construct
  source 1..5785: mol_type = other RNA
aggaaataagagagaaaagaagagtaagaagaaatataagagccaccatggcccctaagaagaagcgtaaagtgagccggatggaacgcctcgtctacgaggtgcggcagaagtgcagaaacatcgaggacatctgcatctcctgcggatctctgaacgtgaccctggagcacccactgttcatcggcggcatgtgccagaactgtaaaaactgttttctggagtgtgcctatcaatacgacgatgacggctaccagagctactgcaccatctgttgcggcggaagagaggtgctgatgtgtggaaataacaactgctgccggtgcttctgcgtggaatgcgtggacctgctggtgggccccggcgccgcccaggccgctattaaggaagatccttggaactgctacatgtgcggccacaagggcacatacggcctgctgagacggagagaggactggcctagcagactgcagatgttcttcgccaataaccacgaccaggagttcgacccccctaaggtgtaccctcccgtccccgccgagaagagaaagcccatccgggtcctgagcctgttcgatggcatcgccaccggtctgctggtgctgaaggacctgggcatccaggtggataggtacattgcctccgaggtgtgcgaggactccatcaccgtgggaatggtgcgtcatcagggcaagatcatgtacgtgggcgacgtgcggagcgtgacacagaagcatatccaggagtggggccctttcgacctggtgatcggcggcagcccttgcaatgacctgagcatcgtgaacccagcccggaagggcctgtacgagggaaccggcagactgttcttcgagttttacagactgctgcacgacgcccggcctaaggaaggcgacgaccggcccttcttttggctgttcgagaatgtggtggccatgggagtcagcgacaagcgggatattagccggttcctggagagcaaccccgtgatgatcgatgccaaggaagtgagcgccgcccaccgggccagatacttctggggcaatctgcctggcatgaacagacccctggccagcaccgtgaacgacaagctggagctgcaggagtgcctggagcacggccggatcgccaagttcagcaaggtgagaaccatcaccacccgaagcaacagcatcaaacaaggcaaggaccagcactttcctgtgttcatgaacgagaaggaggacatcctgtggtgtaccgagatggagagagtgttcgggttcccagtccactacacagatgtcagcaacatgtctagactggccagacagagactgctgggaagaagctggtccgtccctgtgatcagacacctgttcgcccctctgaaggagtacttcgcctgcgtgagcagcggcaacagcaacgccaacagccggggccccagcttctctagcggcctggtgccactgtccctgagagggagccacatgggccccatggagatctacaaaaccgtgagcgcctggaagcggcagcctgtgcgcgtgctgagcctgtttcggaatatcgataaagtcctgaaaagcctgggattcctggagagcggctctggctccggcggtggcaccctgaagtacgtggaggatgtgacaaacgtggtcagacgggatgtggagaagtggggccccttcgatctggtgtacggcagcacccaacccctgggcagctcttgtgaccggtgccctggctggtacatgtttcagttccaccggatcctgcagtacgccctgccgagacaggagtcccagcggccattcttttggattttcatggacaacttgctgctgaccgaggatgaccaggaaactaccactcggttcctgcagaccgaagccgtgaccctgcaggacgtgagaggccgggactaccagaacgccatgcgggtgtggtccaacatccctggactgaaaagcaagcacgcacctctgacccctaaagaagaggagtacctgcaggcccaggtgcggagcagaagcaagctggacgcccctaaggtggatctgctggtgaagaattgcctcctgcccctgagagagtacttcaagtatttcagccagaatagtctgcccctgggaggcagcggcggcggcgtgcccgccctggtgaccttcagggacgtggccgtggacttcacccaggaggagtggaggcacctggagcccgcccagagggccctgcacagggacgtgatgctggagaacttccagaacctggtgagcgtgggcctgcccgtgagcaaggtggacgtgatcagcctgctggagaggggcgaggccccctggcagcccgagggcggcggcccccccgacccctgctacgactacctgaactggggcggcccaagcagcggcgcccctcctcccagcggcggcagcccagccggctccccaacctctaccgaggagggcacctctgagtccgccacccccgagagcggccctggcacctccaccgagcccagcgagggcagcgcacccggcagccctgccggcagccccacctccacagaggagggaaccagcaccgagcccagcgaaggcagcgccccaggcaccagcaccgagcctagtgagcaggagattaaacggatcaacaagatcagaagaagacttgtgaaagacagcaacaccaagaaggccggcaagacaggccccatgaaaaccctgctggttagagtgatgacacccgatctgagagagcggctggaaaacctgagaaagaagcctgaaaatatcccccagcccatcagcaatacatctagagccaacctgaataagctgctgaccgattacaccgaaatgaagaaggcgatcctgcatgtgtactgggaagagttccagaaggaccctgtgggcctgatgagccgggtggcccagcctgccagcaagaagatcgatcagaacaagctgaaacctgagatggacgagaagggcaacctgaccaccgccggctttgcctgctctcagtgtggccagcccctgttcgtgtacaagctggagcaggtgtctgagaagggcaaggcttacaccaactacttcggacggtgcaatgtggccgagcacgaaaagctgatcctgctggcccagctgaagcccgagaaggatagcgacgaagccgtgacatatagcctgggaaagtttgggcagagggccctggatttctacagcattcatgtgaccaaggagtccacccaccccgtgaagcccctggcccagatcgccggaaacagatacgcctccggacctgtgggaaaggccctgagcgacgcatgtatgggcacaatcgcctccttcctgtctaagtaccaggacatcatcatcgaacaccagaaggtggtgaagggcaaccagaagagactggagagcctgcgggagctggccggcaaggaaaacctggaataccctagcgtgaccctgccacctcagcctcacaccaaggagggcgttgatgcctacaacgaagtgatcgcccgggtgcgaatgtgggtgaacctgaacctgtggcagaagctgaagctaagcagagatgatgccaagcctctgctgagactgaagggattcccttcctttcctctggtcgagagacaggccaacgaagtggactggtgggacatggtgtgtaacgtgaagaagctgatcaacgagaaaaaggaggatggcaaggtgttttggcagaatctggctggctacaagagacaggaagccctgagaccatacctgagcagcgaggaagatcggaagaagggaaagaaattcgctcggtaccagctgggcgacctgctgctgcacctggaaaagaagcacggcgaggactggggaaaggtgtacgacgaggcctgggagcggattgacaagaaagtggaaggcctgagcaagcacatcaagctggaagaggaacggagaagcgaggacgcccagagcaaggccgccctgaccgactggctgcgggctaaggccagcttcgtgatcgagggcctgaaggaggccgacaaggacgagttctgcagatgcgagctgaagctgcagaagtggtacggggacctgcggggaaagcccttcgccatcgaagccgagaacagcatcctggacatcagcggcttcagcaagcagtacaactgtgccttcatctggcagaaggacggcgtgaagaagctgaacctgtacctgatcatcaactacttcaagggcggcaagctgcggttcaagaagatcaaacctgaagccttcgaagccaacagattctacaccgtgatcaacaaaaagagcggcgagatcgtgcccatggaggtgaacttcaacttcgacgaccccaacctgatcatcctgcctctggcctttggcaagagacagggcagagaattcatctggaacgacctgctgtccctggaaaccggcagcctgaagctggccaacggaagagtgatcgagaagacactgtacaacagaagaacccggcaggatgagcctgccctgttcgtggccctgaccttcgagcggcgggaggtcctggactcctccaatatcaaaccaatgaacctgatcggcgtggcaagaggcgaaaacatccccgccgtgatcgccctgaccgaccccgagggctgcccactgagccggtttaaggatagcctgggaaacccaacccacatcctgagaatcggcgagagctataaggagaagcagcggaccatccaggccaagaaggaggtggagcagcggagagccggcggctacagccggaagtacgccagcaaagccaagaatctggcagacgatatggtgagaaacaccgctagagatctgctgtactacgccgtgacccaggatgccatgctgatcttcgccaacctgagccggggcttcggccggcagggcaagcggaccttcatggccgagagacagtacacacggatggaggactggctgaccgccaagctggcctacgagggcctgagcaagacctacctgtccaagacactggcccagtacacctccaagacatgcagcaactgtgggtttaccatcaccagcgccgactacgacagggtgctggagaagctgaagaagacagcaacaggctggatgaccacaattaacggcaaggagctgaaggtggagggccagattacctactacaacagatacaagagacagaacgtagtcaaggacctgtccgtcgagctggatagactgagcgaagaatctgtgaacaacgacatctcctcctggacaaagggcagaagcggagaagctctgagcctcctgaagaaaagattctcccatagacccgtgcaggagaagttcgtgtgcctgaactgcggcttcgagacacacgcagccgagcaagccgccctgaacatcgccagatcctggctgttcctgcggagccaggagtacaagaaataccagacaaacaagacaaccggcaacaccgataagagagccttcgtcgagacctggcagtccttttaccggaagaagcttaaggaggtgtggaaacctgccgtgcggtctggcggatctggcggaggctccaccagccccaagaaaaagagaaaagtctaagctgccttctgcggggcttgccttctggccatgcccttcttctctcccttgcacctgtacctcttggtctttgaataaagcctgagtaggaaggctagcaaaaaaaaaaaaaaaaaaaaaaaaaaaaaaaaaaaaaaaaaaaaaaaaaaaaaaaaaaaaaaaaaaaaaaaaaaaaaaaa

SEQ ID NO: 12859 - RNA, 5785 nt, synthetic construct
  source 1..5785: mol_type = other RNA
aggaaataagagagaaaagaagagtaagaagaaatataagagccaccatggcccctaagaagaagcgtaaagtgagccggatggaacgcctcgtctacgaggtgcggcagaagtgcagaaacatcgaggacatctgcatctcctgcggatctctgaacgtgaccctggagcacccactgttcatcggcggcatgtgccagaactgtaaaaactgttttctggagtgtgcctatcaatacgacgatgacggctaccagagctactgcaccatctgttgcggcggaagagaggtgctgatgtgtggaaataacaactgctgccggtgcttctgcgtggaatgcgtggacctgctggtgggccccggcgccgcccaggccgctattaaggaagatccttggaactgctacatgtgcggccacaagggcacatacggcctgctgagacggagagaggactggcctagcagactgcagatgttcttcgccaataaccacgaccaggagttcgacccccctaaggtgtaccctcccgtccccgccgagaagagaaagcccatccgggtcctgagcctgttcgatggcatcgccaccggtctgctggtgctgaaggacctgggcatccaggtggataggtacattgcctccgaggtgtgcgaggactccatcaccgtgggaatggtgcgtcatcagggcaagatcatgtacgtgggcgacgtgcggagcgtgacacagaagcatatccaggagtggggccctttcgacctggtgatcggcggcagcccttgcaatgacctgagcatcgtgaacccagcccggaagggcctgtacgagggaaccggcagactgttcttcgagttttacagactgctgcacgacgcccggcctaaggaaggcgacgaccggcccttcttttggctgttcgagaatgtggtggccatgggagtcagcgacaagcgggatattagccggttcctggagagcaaccccgtgatgatcgatgccaaggaagtgagcgccgcccaccgggccagatacttctggggcaatctgcctggcatgaacagacccctggccagcaccgtgaacgacaagctggagctgcaggagtgcctggagcacggccggatcgccaagttcagcaaggtgagaaccatcaccacccgaagcaacagcatcaaacaaggcaaggaccagcactttcctgtgttcatgaacgagaaggaggacatcctgtggtgtaccgagatggagagagtgttcgggttcccagtccactacacagatgtcagcaacatgtctagactggccagacagagactgctgggaagaagctggtccgtccctgtgatcagacacctgttcgcccctctgaaggagtacttcgcctgcgtgagcagcggcaacagcaacgccaacagccggggccccagcttctctagcggcctggtgccactgtccctgagagggagccacatgggccccatggagatctacaaaaccgtgagcgcctggaagcggcagcctgtgcgcgtgctgagcctgtttcggaatatcgataaagtcctgaaaagcctgggattcctggagagcggctctggctccggcggtggcaccctgaagtacgtggaggatgtgacaaacgtggtcagacgggatgtggagaagtggggccccttcgatctggtgtacggcagcacccaacccctgggcagctcttgtgaccggtgccctggctggtacatgtttcagttccaccggatcctgcagtacgccctgccgagacaggagtcccagcggccattcttttggattttcatggacaacttgctgctgaccgaggatgaccaggaaactaccactcggttcctgcagaccgaagccgtgaccctgcaggacgtgagaggccgggactaccagaacgccatgcgggtgtggtccaacatccctggactgaaaagcaagcacgcacctctgacccctaaagaagaggagtacctgcaggcccaggtgcggagcagaagcaagctggacgcccctaaggtggatctgctggtgaagaattgcctcctgcccctgagagagtacttcaagtatttcagccagaatagtctgcccctgggaggcagcggcggcggcgcccaggagagcctgaccttcgacgacgtggccgtggagttcacctgggaggagtggcagctgctggcccccgcccagaaggacctgtacagggacgtgatgctggagaactacagcaacctggtgagcgtgggctaccaggccagcaagcccgacgccctgagcaagctggtgcagggcgagcccccctggaccatggaggacgagatccactgcaggacccacagcgagatctgggaggtgggcggcccaagcagcggcgcccctcctcccagcggcggcagcccagccggctccccaacctctaccgaggagggcacctctgagtccgccacccccgagagcggccctggcacctccaccgagcccagcgagggcagcgcacccggcagccctgccggcagccccacctccacagaggagggaaccagcaccgagcccagcgaaggcagcgccccaggcaccagcaccgagcctagtgagcaggagattaaacggatcaacaagatcagaagaagacttgtgaaagacagcaacaccaagaaggccggcaagacaggccccatgaaaaccctgctggttagagtgatgacacccgatctgagagagcggctggaaaacctgagaaagaagcctgaaaatatcccccagcccatcagcaatacatctagagccaacctgaataagctgctgaccgattacaccgaaatgaagaaggcgatcctgcatgtgtactgggaagagttccagaaggaccctgtgggcctgatgagccgggtggcccagcctgccagcaagaagatcgatcagaacaagctgaaacctgagatggacgagaagggcaacctgaccaccgccggctttgcctgctctcagtgtggccagcccctgttcgtgtacaagctggagcaggtgtctgagaagggcaaggcttacaccaactacttcggacggtgcaatgtggccgagcacgaaaagctgatcctgctggcccagctgaagcccgagaaggatagcgacgaagccgtgacatatagcctgggaaagtttgggcagagggccctggatttctacagcattcatgtgaccaaggagtccacccaccccgtgaagcccctggcccagatcgccggaaacagatacgcctccggacctgtgggaaaggccctgagcgacgcatgtatgggcacaatcgcctccttcctgtctaagtaccaggacatcatcatcgaacaccagaaggtggtgaagggcaaccagaagagactggagagcctgcgggagctggccggcaaggaaaacctggaataccctagcgtgaccctgccacctcagcctcacaccaaggagggcgttgatgcctacaacgaagtgatcgcccgggtgcgaatgtgggtgaacctgaacctgtggcagaagctgaagctaagcagagatgatgccaagcctctgctgagactgaagggattcccttcctttcctctggtcgagagacaggccaacgaagtggactggtgggacatggtgtgtaacgtgaagaagctgatcaacgagaaaaaggaggatggcaaggtgttttggcagaatctggctggctacaagagacaggaagccctgagaccatacctgagcagcgaggaagatcggaagaagggaaagaaattcgctcggtaccagctgggcgacctgctgctgcacctggaaaagaagcacggcgaggactggggaaaggtgtacgacgaggcctgggagcggattgacaagaaagtggaaggcctgagcaagcacatcaagctggaagaggaacggagaagcgaggacgcccagagcaaggccgccctgaccgactggctgcgggctaaggccagcttcgtgatcgagggcctgaaggaggccgacaaggacgagttctgcagatgcgagctgaagctgcagaagtggtacggggacctgcggggaaagcccttcgccatcgaagccgagaacagcatcctggacatcagcggcttcagcaagcagtacaactgtgccttcatctggcagaaggacggcgtgaagaagctgaacctgtacctgatcatcaactacttcaagggcggcaagctgcggttcaagaagatcaaacctgaagccttcgaagccaacagattctacaccgtgatcaacaaaaagagcggcgagatcgtgcccatggaggtgaacttcaacttcgacgaccccaacctgatcatcctgcctctggcctttggcaagagacagggcagagaattcatctggaacgacctgctgtccctggaaaccggcagcctgaagctggccaacggaagagtgatcgagaagacactgtacaacagaagaacccggcaggatgagcctgccctgttcgtggccctgaccttcgagcggcgggaggtcctggactcctccaatatcaaaccaatgaacctgatcggcgtggcaagaggcgaaaacatccccgccgtgatcgccctgaccgaccccgagggctgcccactgagccggtttaaggatagcctgggaaacccaacccacatcctgagaatcggcgagagctataaggagaagcagcggaccatccaggccaagaaggaggtggagcagcggagagccggcggctacagccggaagtacgccagcaaagccaagaatctggcagacgatatggtgagaaacaccgctagagatctgctgtactacgccgtgacccaggatgccatgctgatcttcgccaacctgagccggggcttcggccggcagggcaagcggaccttcatggccgagagacagtacacacggatggaggactggctgaccgccaagctggcctacgagggcctgagcaagacctacctgtccaagacactggcccagtacacctccaagacatgcagcaactgtgggtttaccatcaccagcgccgactacgacagggtgctggagaagctgaagaagacagcaacaggctggatgaccacaattaacggcaaggagctgaaggtggagggccagattacctactacaacagatacaagagacagaacgtagtcaaggacctgtccgtcgagctggatagactgagcgaagaatctgtgaacaacgacatctcctcctggacaaagggcagaagcggagaagctctgagcctcctgaagaaaagattctcccatagacccgtgcaggagaagttcgtgtgcctgaactgcggcttcgagacacacgcagccgagcaagccgccctgaacatcgccagatcctggctgttcctgcggagccaggagtacaagaaataccagacaaacaagacaaccggcaacaccgataagagagccttcgtcgagacctggcagtccttttaccggaagaagcttaaggaggtgtggaaacctgccgtgcggtctggcggatctggcggaggctccaccagccccaagaaaaagagaaaagtctaagctgccttctgcggggcttgccttctggccatgcccttcttctctcccttgcacctgtacctcttggtctttgaataaagcctgagtaggaaggctagcaaaaaaaaaaaaaaaaaaaaaaaaaaaaaaaaaaaaaaaaaaaaaaaaaaaaaaaaaaaaaaaaaaaaaaaaaaaaaaaa

SEQ ID NO: 12860 - RNA, 5785 nt, synthetic construct
  source 1..5785: mol_type = other RNA
aggaaataagagagaaaagaagagtaagaagaaatataagagccaccatggcccctaagaagaagcgtaaagtgagccggatggaacgcctcgtctacgaggtgcggcagaagtgcagaaacatcgaggacatctgcatctcctgcggatctctgaacgtgaccctggagcacccactgttcatcggcggcatgtgccagaactgtaaaaactgttttctggagtgtgcctatcaatacgacgatgacggctaccagagctactgcaccatctgttgcggcggaagagaggtgctgatgtgtggaaataacaactgctgccggtgcttctgcgtggaatgcgtggacctgctggtgggccccggcgccgcccaggccgctattaaggaagatccttggaactgctacatgtgcggccacaagggcacatacggcctgctgagacggagagaggactggcctagcagactgcagatgttcttcgccaataaccacgaccaggagttcgacccccctaaggtgtaccctcccgtccccgccgagaagagaaagcccatccgggtcctgagcctgttcgatggcatcgccaccggtctgctggtgctgaaggacctgggcatccaggtggataggtacattgcctccgaggtgtgcgaggactccatcaccgtgggaatggtgcgtcatcagggcaagatcatgtacgtgggcgacgtgcggagcgtgacacagaagcatatccaggagtggggccctttcgacctggtgatcggcggcagcccttgcaatgacctgagcatcgtgaacccagcccggaagggcctgtacgagggaaccggcagactgttcttcgagttttacagactgctgcacgacgcccggcctaaggaaggcgacgaccggcccttcttttggctgttcgagaatgtggtggccatgggagtcagcgacaagcgggatattagccggttcctggagagcaaccccgtgatgatcgatgccaaggaagtgagcgccgcccaccgggccagatacttctggggcaatctgcctggcatgaacagacccctggccagcaccgtgaacgacaagctggagctgcaggagtgcctggagcacggccggatcgccaagttcagcaaggtgagaaccatcaccacccgaagcaacagcatcaaacaaggcaaggaccagcactttcctgtgttcatgaacgagaaggaggacatcctgtggtgtaccgagatggagagagtgttcgggttcccagtccactacacagatgtcagcaacatgtctagactggccagacagagactgctgggaagaagctggtccgtccctgtgatcagacacctgttcgcccctctgaaggagtacttcgcctgcgtgagcagcggcaacagcaacgccaacagccggggccccagcttctctagcggcctggtgccactgtccctgagagggagccacatgggccccatggagatctacaaaaccgtgagcgcctggaagcggcagcctgtgcgcgtgctgagcctgtttcggaatatcgataaagtcctgaaaagcctgggattcctggagagcggctctggctccggcggtggcaccctgaagtacgtggaggatgtgacaaacgtggtcagacgggatgtggagaagtggggccccttcgatctggtgtacggcagcacccaacccctgggcagctcttgtgaccggtgccctggctggtacatgtttcagttccaccggatcctgcagtacgccctgccgagacaggagtcccagcggccattcttttggattttcatggacaacttgctgctgaccgaggatgaccaggaaactaccactcggttcctgcagaccgaagccgtgaccctgcaggacgtgagaggccgggactaccagaacgccatgcgggtgtggtccaacatccctggactgaaaagcaagcacgcacctctgacccctaaagaagaggagtacctgcaggcccaggtgcggagcagaagcaagctggacgcccctaaggtggatctgctggtgaagaattgcctcctgcccctgagagagtacttcaagtatttcagccagaatagtctgcccctgggaggcagcggcggcggcttccaggagagcgtgaccttcaaggacgtgaccgtgaacttcacccaggaggagtgggagcagctgaaccccgcccagagggagctgtacagggacgtgatgctggagaactacaggaacctgatcagcctgggcctgcccatcagcaagcccgacgtgatcttccagctggagcagggccaggagccctggatgctggacgtgcagggcaccgagaggcaggccgtgcccaggagcaccagcggcggcccaagcagcggcgcccctcctcccagcggcggcagcccagccggctccccaacctctaccgaggagggcacctctgagtccgccacccccgagagcggccctggcacctccaccgagcccagcgagggcagcgcacccggcagccctgccggcagccccacctccacagaggagggaaccagcaccgagcccagcgaaggcagcgccccaggcaccagcaccgagcctagtgagcaggagattaaacggatcaacaagatcagaagaagacttgtgaaagacagcaacaccaagaaggccggcaagacaggccccatgaaaaccctgctggttagagtgatgacacccgatctgagagagcggctggaaaacctgagaaagaagcctgaaaatatcccccagcccatcagcaatacatctagagccaacctgaataagctgctgaccgattacaccgaaatgaagaaggcgatcctgcatgtgtactgggaagagttccagaaggaccctgtgggcctgatgagccgggtggcccagcctgccagcaagaagatcgatcagaacaagctgaaacctgagatggacgagaagggcaacctgaccaccgccggctttgcctgctctcagtgtggccagcccctgttcgtgtacaagctggagcaggtgtctgagaagggcaaggcttacaccaactacttcggacggtgcaatgtggccgagcacgaaaagctgatcctgctggcccagctgaagcccgagaaggatagcgacgaagccgtgacatatagcctgggaaagtttgggcagagggccctggatttctacagcattcatgtgaccaaggagtccacccaccccgtgaagcccctggcccagatcgccggaaacagatacgcctccggacctgtgggaaaggccctgagcgacgcatgtatgggcacaatcgcctccttcctgtctaagtaccaggacatcatcatcgaacaccagaaggtggtgaagggcaaccagaagagactggagagcctgcgggagctggccggcaaggaaaacctggaataccctagcgtgaccctgccacctcagcctcacaccaaggagggcgttgatgcctacaacgaagtgatcgcccgggtgcgaatgtgggtgaacctgaacctgtggcagaagctgaagctaagcagagatgatgccaagcctctgctgagactgaagggattcccttcctttcctctggtcgagagacaggccaacgaagtggactggtgggacatggtgtgtaacgtgaagaagctgatcaacgagaaaaaggaggatggcaaggtgttttggcagaatctggctggctacaagagacaggaagccctgagaccatacctgagcagcgaggaagatcggaagaagggaaagaaattcgctcggtaccagctgggcgacctgctgctgcacctggaaaagaagcacggcgaggactggggaaaggtgtacgacgaggcctgggagcggattgacaagaaagtggaaggcctgagcaagcacatcaagctggaagaggaacggagaagcgaggacgcccagagcaaggccgccctgaccgactggctgcgggctaaggccagcttcgtgatcgagggcctgaaggaggccgacaaggacgagttctgcagatgcgagctgaagctgcagaagtggtacggggacctgcggggaaagcccttcgccatcgaagccgagaacagcatcctggacatcagcggcttcagcaagcagtacaactgtgccttcatctggcagaaggacggcgtgaagaagctgaacctgtacctgatcatcaactacttcaagggcggcaagctgcggttcaagaagatcaaacctgaagccttcgaagccaacagattctacaccgtgatcaacaaaaagagcggcgagatcgtgcccatggaggtgaacttcaacttcgacgaccccaacctgatcatcctgcctctggcctttggcaagagacagggcagagaattcatctggaacgacctgctgtccctggaaaccggcagcctgaagctggccaacggaagagtgatcgagaagacactgtacaacagaagaacccggcaggatgagcctgccctgttcgtggccctgaccttcgagcggcgggaggtcctggactcctccaatatcaaaccaatgaacctgatcggcgtggcaagaggcgaaaacatccccgccgtgatcgccctgaccgaccccgagggctgcccactgagccggtttaaggatagcctgggaaacccaacccacatcctgagaatcggcgagagctataaggagaagcagcggaccatccaggccaagaaggaggtggagcagcggagagccggcggctacagccggaagtacgccagcaaagccaagaatctggcagacgatatggtgagaaacaccgctagagatctgctgtactacgccgtgacccaggatgccatgctgatcttcgccaacctgagccggggcttcggccggcagggcaagcggaccttcatggccgagagacagtacacacggatggaggactggctgaccgccaagctggcctacgagggcctgagcaagacctacctgtccaagacactggcccagtacacctccaagacatgcagcaactgtgggtttaccatcaccagcgccgactacgacagggtgctggagaagctgaagaagacagcaacaggctggatgaccacaattaacggcaaggagctgaaggtggagggccagattacctactacaacagatacaagagacagaacgtagtcaaggacctgtccgtcgagctggatagactgagcgaagaatctgtgaacaacgacatctcctcctggacaaagggcagaagcggagaagctctgagcctcctgaagaaaagattctcccatagacccgtgcaggagaagttcgtgtgcctgaactgcggcttcgagacacacgcagccgagcaagccgccctgaacatcgccagatcctggctgttcctgcggagccaggagtacaagaaataccagacaaacaagacaaccggcaacaccgataagagagccttcgtcgagacctggcagtccttttaccggaagaagcttaaggaggtgtggaaacctgccgtgcggtctggcggatctggcggaggctccaccagccccaagaaaaagagaaaagtctaagctgccttctgcggggcttgccttctggccatgcccttcttctctcccttgcacctgtacctcttggtctttgaataaagcctgagtaggaaggctagcaaaaaaaaaaaaaaaaaaaaaaaaaaaaaaaaaaaaaaaaaaaaaaaaaaaaaaaaaaaaaaaaaaaaaaaaaaaaaaaa

SEQ ID NO: 12861 - RNA, 5785 nt, synthetic construct
  source 1..5785: mol_type = other RNA
aggaaataagagagaaaagaagagtaagaagaaatataagagccaccatggcccctaagaagaagcgtaaagtgagccggatggaacgcctcgtctacgaggtgcggcagaagtgcagaaacatcgaggacatctgcatctcctgcggatctctgaacgtgaccctggagcacccactgttcatcggcggcatgtgccagaactgtaaaaactgttttctggagtgtgcctatcaatacgacgatgacggctaccagagctactgcaccatctgttgcggcggaagagaggtgctgatgtgtggaaataacaactgctgccggtgcttctgcgtggaatgcgtggacctgctggtgggccccggcgccgcccaggccgctattaaggaagatccttggaactgctacatgtgcggccacaagggcacatacggcctgctgagacggagagaggactggcctagcagactgcagatgttcttcgccaataaccacgaccaggagttcgacccccctaaggtgtaccctcccgtccccgccgagaagagaaagcccatccgggtcctgagcctgttcgatggcatcgccaccggtctgctggtgctgaaggacctgggcatccaggtggataggtacattgcctccgaggtgtgcgaggactccatcaccgtgggaatggtgcgtcatcagggcaagatcatgtacgtgggcgacgtgcggagcgtgacacagaagcatatccaggagtggggccctttcgacctggtgatcggcggcagcccttgcaatgacctgagcatcgtgaacccagcccggaagggcctgtacgagggaaccggcagactgttcttcgagttttacagactgctgcacgacgcccggcctaaggaaggcgacgaccggcccttcttttggctgttcgagaatgtggtggccatgggagtcagcgacaagcgggatattagccggttcctggagagcaaccccgtgatgatcgatgccaaggaagtgagcgccgcccaccgggccagatacttctggggcaatctgcctggcatgaacagacccctggccagcaccgtgaacgacaagctggagctgcaggagtgcctggagcacggccggatcgccaagttcagcaaggtgagaaccatcaccacccgaagcaacagcatcaaacaaggcaaggaccagcactttcctgtgttcatgaacgagaaggaggacatcctgtggtgtaccgagatggagagagtgttcgggttcccagtccactacacagatgtcagcaacatgtctagactggccagacagagactgctgggaagaagctggtccgtccctgtgatcagacacctgttcgcccctctgaaggagtacttcgcctgcgtgagcagcggcaacagcaacgccaacagccggggccccagcttctctagcggcctggtgccactgtccctgagagggagccacatgggccccatggagatctacaaaaccgtgagcgcctggaagcggcagcctgtgcgcgtgctgagcctgtttcggaatatcgataaagtcctgaaaagcctgggattcctggagagcggctctggctccggcggtggcaccctgaagtacgtggaggatgtgacaaacgtggtcagacgggatgtggagaagtggggccccttcgatctggtgtacggcagcacccaacccctgggcagctcttgtgaccggtgccctggctggtacatgtttcagttccaccggatcctgcagtacgccctgccgagacaggagtcccagcggccattcttttggattttcatggacaacttgctgctgaccgaggatgaccaggaaactaccactcggttcctgcagaccgaagccgtgaccctgcaggacgtgagaggccgggactaccagaacgccatgcgggtgtggtccaacatccctggactgaaaagcaagcacgcacctctgacccctaaagaagaggagtacctgcaggcccaggtgcggagcagaagcaagctggacgcccctaaggtggatctgctggtgaagaattgcctcctgcccctgagagagtacttcaagtatttcagccagaatagtctgcccctgggaggcagcggcggcggcgtggccttcgaggacgtggccgtgtacttcaccgccgaggagtgggacctgctgggccccaaccagaagagcctgtacagcgaggtgatgatggagaactacgagaacgtgagctacctggccgacaactggaagaagaccatcgccttcgcccacagccagaaggacttcatccacaagctgcaccagaggacccacaaggaggacgagcaccacaccagggccgagccctgcgagagcaccggcggcccaagcagcggcgcccctcctcccagcggcggcagcccagccggctccccaacctctaccgaggagggcacctctgagtccgccacccccgagagcggccctggcacctccaccgagcccagcgagggcagcgcacccggcagccctgccggcagccccacctccacagaggagggaaccagcaccgagcccagcgaaggcagcgccccaggcaccagcaccgagcctagtgagcaggagattaaacggatcaacaagatcagaagaagacttgtgaaagacagcaacaccaagaaggccggcaagacaggccccatgaaaaccctgctggttagagtgatgacacccgatctgagagagcggctggaaaacctgagaaagaagcctgaaaatatcccccagcccatcagcaatacatctagagccaacctgaataagctgctgaccgattacaccgaaatgaagaaggcgatcctgcatgtgtactgggaagagttccagaaggaccctgtgggcctgatgagccgggtggcccagcctgccagcaagaagatcgatcagaacaagctgaaacctgagatggacgagaagggcaacctgaccaccgccggctttgcctgctctcagtgtggccagcccctgttcgtgtacaagctggagcaggtgtctgagaagggcaaggcttacaccaactacttcggacggtgcaatgtggccgagcacgaaaagctgatcctgctggcccagctgaagcccgagaaggatagcgacgaagccgtgacatatagcctgggaaagtttgggcagagggccctggatttctacagcattcatgtgaccaaggagtccacccaccccgtgaagcccctggcccagatcgccggaaacagatacgcctccggacctgtgggaaaggccctgagcgacgcatgtatgggcacaatcgcctccttcctgtctaagtaccaggacatcatcatcgaacaccagaaggtggtgaagggcaaccagaagagactggagagcctgcgggagctggccggcaaggaaaacctggaataccctagcgtgaccctgccacctcagcctcacaccaaggagggcgttgatgcctacaacgaagtgatcgcccgggtgcgaatgtgggtgaacctgaacctgtggcagaagctgaagctaagcagagatgatgccaagcctctgctgagactgaagggattcccttcctttcctctggtcgagagacaggccaacgaagtggactggtgggacatggtgtgtaacgtgaagaagctgatcaacgagaaaaaggaggatggcaaggtgttttggcagaatctggctggctacaagagacaggaagccctgagaccatacctgagcagcgaggaagatcggaagaagggaaagaaattcgctcggtaccagctgggcgacctgctgctgcacctggaaaagaagcacggcgaggactggggaaaggtgtacgacgaggcctgggagcggattgacaagaaagtggaaggcctgagcaagcacatcaagctggaagaggaacggagaagcgaggacgcccagagcaaggccgccctgaccgactggctgcgggctaaggccagcttcgtgatcgagggcctgaaggaggccgacaaggacgagttctgcagatgcgagctgaagctgcagaagtggtacggggacctgcggggaaagcccttcgccatcgaagccgagaacagcatcctggacatcagcggcttcagcaagcagtacaactgtgccttcatctggcagaaggacggcgtgaagaagctgaacctgtacctgatcatcaactacttcaagggcggcaagctgcggttcaagaagatcaaacctgaagccttcgaagccaacagattctacaccgtgatcaacaaaaagagcggcgagatcgtgcccatggaggtgaacttcaacttcgacgaccccaacctgatcatcctgcctctggcctttggcaagagacagggcagagaattcatctggaacgacctgctgtccctggaaaccggcagcctgaagctggccaacggaagagtgatcgagaagacactgtacaacagaagaacccggcaggatgagcctgccctgttcgtggccctgaccttcgagcggcgggaggtcctggactcctccaatatcaaaccaatgaacctgatcggcgtggcaagaggcgaaaacatccccgccgtgatcgccctgaccgaccccgagggctgcccactgagccggtttaaggatagcctgggaaacccaacccacatcctgagaatcggcgagagctataaggagaagcagcggaccatccaggccaagaaggaggtggagcagcggagagccggcggctacagccggaagtacgccagcaaagccaagaatctggcagacgatatggtgagaaacaccgctagagatctgctgtactacgccgtgacccaggatgccatgctgatcttcgccaacctgagccggggcttcggccggcagggcaagcggaccttcatggccgagagacagtacacacggatggaggactggctgaccgccaagctggcctacgagggcctgagcaagacctacctgtccaagacactggcccagtacacctccaagacatgcagcaactgtgggtttaccatcaccagcgccgactacgacagggtgctggagaagctgaagaagacagcaacaggctggatgaccacaattaacggcaaggagctgaaggtggagggccagattacctactacaacagatacaagagacagaacgtagtcaaggacctgtccgtcgagctggatagactgagcgaagaatctgtgaacaacgacatctcctcctggacaaagggcagaagcggagaagctctgagcctcctgaagaaaagattctcccatagacccgtgcaggagaagttcgtgtgcctgaactgcggcttcgagacacacgcagccgagcaagccgccctgaacatcgccagatcctggctgttcctgcggagccaggagtacaagaaataccagacaaacaagacaaccggcaacaccgataagagagccttcgtcgagacctggcagtccttttaccggaagaagcttaaggaggtgtggaaacctgccgtgcggtctggcggatctggcggaggctccaccagccccaagaaaaagagaaaagtctaagctgccttctgcggggcttgccttctggccatgcccttcttctctcccttgcacctgtacctcttggtctttgaataaagcctgagtaggaaggctagcaaaaaaaaaaaaaaaaaaaaaaaaaaaaaaaaaaaaaaaaaaaaaaaaaaaaaaaaaaaaaaaaaaaaaaaaaaaaaaaa

SEQ ID NO: 12862 - RNA, 5785 nt, synthetic construct
  source 1..5785: mol_type = other RNA
aggaaataagagagaaaagaagagtaagaagaaatataagagccaccatggcccctaagaagaagcgtaaagtgagccggatggaacgcctcgtctacgaggtgcggcagaagtgcagaaacatcgaggacatctgcatctcctgcggatctctgaacgtgaccctggagcacccactgttcatcggcggcatgtgccagaactgtaaaaactgttttctggagtgtgcctatcaatacgacgatgacggctaccagagctactgcaccatctgttgcggcggaagagaggtgctgatgtgtggaaataacaactgctgccggtgcttctgcgtggaatgcgtggacctgctggtgggccccggcgccgcccaggccgctattaaggaagatccttggaactgctacatgtgcggccacaagggcacatacggcctgctgagacggagagaggactggcctagcagactgcagatgttcttcgccaataaccacgaccaggagttcgacccccctaaggtgtaccctcccgtccccgccgagaagagaaagcccatccgggtcctgagcctgttcgatggcatcgccaccggtctgctggtgctgaaggacctgggcatccaggtggataggtacattgcctccgaggtgtgcgaggactccatcaccgtgggaatggtgcgtcatcagggcaagatcatgtacgtgggcgacgtgcggagcgtgacacagaagcatatccaggagtggggccctttcgacctggtgatcggcggcagcccttgcaatgacctgagcatcgtgaacccagcccggaagggcctgtacgagggaaccggcagactgttcttcgagttttacagactgctgcacgacgcccggcctaaggaaggcgacgaccggcccttcttttggctgttcgagaatgtggtggccatgggagtcagcgacaagcgggatattagccggttcctggagagcaaccccgtgatgatcgatgccaaggaagtgagcgccgcccaccgggccagatacttctggggcaatctgcctggcatgaacagacccctggccagcaccgtgaacgacaagctggagctgcaggagtgcctggagcacggccggatcgccaagttcagcaaggtgagaaccatcaccacccgaagcaacagcatcaaacaaggcaaggaccagcactttcctgtgttcatgaacgagaaggaggacatcctgtggtgtaccgagatggagagagtgttcgggttcccagtccactacacagatgtcagcaacatgtctagactggccagacagagactgctgggaagaagctggtccgtccctgtgatcagacacctgttcgcccctctgaaggagtacttcgcctgcgtgagcagcggcaacagcaacgccaacagccggggccccagcttctctagcggcctggtgccactgtccctgagagggagccacatgggccccatggagatctacaaaaccgtgagcgcctggaagcggcagcctgtgcgcgtgctgagcctgtttcggaatatcgataaagtcctgaaaagcctgggattcctggagagcggctctggctccggcggtggcaccctgaagtacgtggaggatgtgacaaacgtggtcagacgggatgtggagaagtggggccccttcgatctggtgtacggcagcacccaacccctgggcagctcttgtgaccggtgccctggctggtacatgtttcagttccaccggatcctgcagtacgccctgccgagacaggagtcccagcggccattcttttggattttcatggacaacttgctgctgaccgaggatgaccaggaaactaccactcggttcctgcagaccgaagccgtgaccctgcaggacgtgagaggccgggactaccagaacgccatgcgggtgtggtccaacatccctggactgaaaagcaagcacgcacctctgacccctaaagaagaggagtacctgcaggcccaggtgcggagcagaagcaagctggacgcccctaaggtggatctgctggtgaagaattgcctcctgcccctgagagagtacttcaagtatttcagccagaatagtctgcccctgggaggcagcggcggcggccagcagaggcccgtgagcttcaaggacgtggtggtgggcttcacccaggaggagtggaggaggctgaaccccgcccagagggccctgtacagggacgtgatgctggagacctacagcaacctggtgagcgtgggctacgagggcaccaagcccgacgtgatcctgaggctggagcaggaggaggccccctggatctgcgaggccgtgtgccccggctgccactgccaggaggacttcctgagcggcggcccaagcagcggcgcccctcctcccagcggcggcagcccagccggctccccaacctctaccgaggagggcacctctgagtccgccacccccgagagcggccctggcacctccaccgagcccagcgagggcagcgcacccggcagccctgccggcagccccacctccacagaggagggaaccagcaccgagcccagcgaaggcagcgccccaggcaccagcaccgagcctagtgagcaggagattaaacggatcaacaagatcagaagaagacttgtgaaagacagcaacaccaagaaggccggcaagacaggccccatgaaaaccctgctggttagagtgatgacacccgatctgagagagcggctggaaaacctgagaaagaagcctgaaaatatcccccagcccatcagcaatacatctagagccaacctgaataagctgctgaccgattacaccgaaatgaagaaggcgatcctgcatgtgtactgggaagagttccagaaggaccctgtgggcctgatgagccgggtggcccagcctgccagcaagaagatcgatcagaacaagctgaaacctgagatggacgagaagggcaacctgaccaccgccggctttgcctgctctcagtgtggccagcccctgttcgtgtacaagctggagcaggtgtctgagaagggcaaggcttacaccaactacttcggacggtgcaatgtggccgagcacgaaaagctgatcctgctggcccagctgaagcccgagaaggatagcgacgaagccgtgacatatagcctgggaaagtttgggcagagggccctggatttctacagcattcatgtgaccaaggagtccacccaccccgtgaagcccctggcccagatcgccggaaacagatacgcctccggacctgtgggaaaggccctgagcgacgcatgtatgggcacaatcgcctccttcctgtctaagtaccaggacatcatcatcgaacaccagaaggtggtgaagggcaaccagaagagactggagagcctgcgggagctggccggcaaggaaaacctggaataccctagcgtgaccctgccacctcagcctcacaccaaggagggcgttgatgcctacaacgaagtgatcgcccgggtgcgaatgtgggtgaacctgaacctgtggcagaagctgaagctaagcagagatgatgccaagcctctgctgagactgaagggattcccttcctttcctctggtcgagagacaggccaacgaagtggactggtgggacatggtgtgtaacgtgaagaagctgatcaacgagaaaaaggaggatggcaaggtgttttggcagaatctggctggctacaagagacaggaagccctgagaccatacctgagcagcgaggaagatcggaagaagggaaagaaattcgctcggtaccagctgggcgacctgctgctgcacctggaaaagaagcacggcgaggactggggaaaggtgtacgacgaggcctgggagcggattgacaagaaagtggaaggcctgagcaagcacatcaagctggaagaggaacggagaagcgaggacgcccagagcaaggccgccctgaccgactggctgcgggctaaggccagcttcgtgatcgagggcctgaaggaggccgacaaggacgagttctgcagatgcgagctgaagctgcagaagtggtacggggacctgcggggaaagcccttcgccatcgaagccgagaacagcatcctggacatcagcggcttcagcaagcagtacaactgtgccttcatctggcagaaggacggcgtgaagaagctgaacctgtacctgatcatcaactacttcaagggcggcaagctgcggttcaagaagatcaaacctgaagccttcgaagccaacagattctacaccgtgatcaacaaaaagagcggcgagatcgtgcccatggaggtgaacttcaacttcgacgaccccaacctgatcatcctgcctctggcctttggcaagagacagggcagagaattcatctggaacgacctgctgtccctggaaaccggcagcctgaagctggccaacggaagagtgatcgagaagacactgtacaacagaagaacccggcaggatgagcctgccctgttcgtggccctgaccttcgagcggcgggaggtcctggactcctccaatatcaaaccaatgaacctgatcggcgtggcaagaggcgaaaacatccccgccgtgatcgccctgaccgaccccgagggctgcccactgagccggtttaaggatagcctgggaaacccaacccacatcctgagaatcggcgagagctataaggagaagcagcggaccatccaggccaagaaggaggtggagcagcggagagccggcggctacagccggaagtacgccagcaaagccaagaatctggcagacgatatggtgagaaacaccgctagagatctgctgtactacgccgtgacccaggatgccatgctgatcttcgccaacctgagccggggcttcggccggcagggcaagcggaccttcatggccgagagacagtacacacggatggaggactggctgaccgccaagctggcctacgagggcctgagcaagacctacctgtccaagacactggcccagtacacctccaagacatgcagcaactgtgggtttaccatcaccagcgccgactacgacagggtgctggagaagctgaagaagacagcaacaggctggatgaccacaattaacggcaaggagctgaaggtggagggccagattacctactacaacagatacaagagacagaacgtagtcaaggacctgtccgtcgagctggatagactgagcgaagaatctgtgaacaacgacatctcctcctggacaaagggcagaagcggagaagctctgagcctcctgaagaaaagattctcccatagacccgtgcaggagaagttcgtgtgcctgaactgcggcttcgagacacacgcagccgagcaagccgccctgaacatcgccagatcctggctgttcctgcggagccaggagtacaagaaataccagacaaacaagacaaccggcaacaccgataagagagccttcgtcgagacctggcagtccttttaccggaagaagcttaaggaggtgtggaaacctgccgtgcggtctggcggatctggcggaggctccaccagccccaagaaaaagagaaaagtctaagctgccttctgcggggcttgccttctggccatgcccttcttctctcccttgcacctgtacctcttggtctttgaataaagcctgagtaggaaggctagcaaaaaaaaaaaaaaaaaaaaaaaaaaaaaaaaaaaaaaaaaaaaaaaaaaaaaaaaaaaaaaaaaaaaaaaaaaaaaaaa

SEQ ID NO: 12863 - RNA, 5785 nt, synthetic construct
  source 1..5785: mol_type = other RNA
aggaaataagagagaaaagaagagtaagaagaaatataagagccaccatggcccctaagaagaagcgtaaagtgagccggatggaacgcctcgtctacgaggtgcggcagaagtgcagaaacatcgaggacatctgcatctcctgcggatctctgaacgtgaccctggagcacccactgttcatcggcggcatgtgccagaactgtaaaaactgttttctggagtgtgcctatcaatacgacgatgacggctaccagagctactgcaccatctgttgcggcggaagagaggtgctgatgtgtggaaataacaactgctgccggtgcttctgcgtggaatgcgtggacctgctggtgggccccggcgccgcccaggccgctattaaggaagatccttggaactgctacatgtgcggccacaagggcacatacggcctgctgagacggagagaggactggcctagcagactgcagatgttcttcgccaataaccacgaccaggagttcgacccccctaaggtgtaccctcccgtccccgccgagaagagaaagcccatccgggtcctgagcctgttcgatggcatcgccaccggtctgctggtgctgaaggacctgggcatccaggtggataggtacattgcctccgaggtgtgcgaggactccatcaccgtgggaatggtgcgtcatcagggcaagatcatgtacgtgggcgacgtgcggagcgtgacacagaagcatatccaggagtggggccctttcgacctggtgatcggcggcagcccttgcaatgacctgagcatcgtgaacccagcccggaagggcctgtacgagggaaccggcagactgttcttcgagttttacagactgctgcacgacgcccggcctaaggaaggcgacgaccggcccttcttttggctgttcgagaatgtggtggccatgggagtcagcgacaagcgggatattagccggttcctggagagcaaccccgtgatgatcgatgccaaggaagtgagcgccgcccaccgggccagatacttctggggcaatctgcctggcatgaacagacccctggccagcaccgtgaacgacaagctggagctgcaggagtgcctggagcacggccggatcgccaagttcagcaaggtgagaaccatcaccacccgaagcaacagcatcaaacaaggcaaggaccagcactttcctgtgttcatgaacgagaaggaggacatcctgtggtgtaccgagatggagagagtgttcgggttcccagtccactacacagatgtcagcaacatgtctagactggccagacagagactgctgggaagaagctggtccgtccctgtgatcagacacctgttcgcccctctgaaggagtacttcgcctgcgtgagcagcggcaacagcaacgccaacagccggggccccagcttctctagcggcctggtgccactgtccctgagagggagccacatgggccccatggagatctacaaaaccgtgagcgcctggaagcggcagcctgtgcgcgtgctgagcctgtttcggaatatcgataaagtcctgaaaagcctgggattcctggagagcggctctggctccggcggtggcaccctgaagtacgtggaggatgtgacaaacgtggtcagacgggatgtggagaagtggggccccttcgatctggtgtacggcagcacccaacccctgggcagctcttgtgaccggtgccctggctggtacatgtttcagttccaccggatcctgcagtacgccctgccgagacaggagtcccagcggccattcttttggattttcatggacaacttgctgctgaccgaggatgaccaggaaactaccactcggttcctgcagaccgaagccgtgaccctgcaggacgtgagaggccgggactaccagaacgccatgcgggtgtggtccaacatccctggactgaaaagcaagcacgcacctctgacccctaaagaagaggagtacctgcaggcccaggtgcggagcagaagcaagctggacgcccctaaggtggatctgctggtgaagaattgcctcctgcccctgagagagtacttcaagtatttcagccagaatagtctgcccctgggaggcagcggcggcggcatggccttcagggacgtggccgtggacttcacccaggacgagtgggtgctgctgagccccgcccagaggagcctgtacagggaggtgatgctggagaactacagcaacctggtgagcctgggcatccccttcagcaagcccaagctgatcacccagctggagcagggcaaggagagctggagggaggagaggaagtgcagccccgtgagctgcctgggcgagtggggccactgggtggtgcagggcggcccaagcagcggcgcccctcctcccagcggcggcagcccagccggctccccaacctctaccgaggagggcacctctgagtccgccacccccgagagcggccctggcacctccaccgagcccagcgagggcagcgcacccggcagccctgccggcagccccacctccacagaggagggaaccagcaccgagcccagcgaaggcagcgccccaggcaccagcaccgagcctagtgagcaggagattaaacggatcaacaagatcagaagaagacttgtgaaagacagcaacaccaagaaggccggcaagacaggccccatgaaaaccctgctggttagagtgatgacacccgatctgagagagcggctggaaaacctgagaaagaagcctgaaaatatcccccagcccatcagcaatacatctagagccaacctgaataagctgctgaccgattacaccgaaatgaagaaggcgatcctgcatgtgtactgggaagagttccagaaggaccctgtgggcctgatgagccgggtggcccagcctgccagcaagaagatcgatcagaacaagctgaaacctgagatggacgagaagggcaacctgaccaccgccggctttgcctgctctcagtgtggccagcccctgttcgtgtacaagctggagcaggtgtctgagaagggcaaggcttacaccaactacttcggacggtgcaatgtggccgagcacgaaaagctgatcctgctggcccagctgaagcccgagaaggatagcgacgaagccgtgacatatagcctgggaaagtttgggcagagggccctggatttctacagcattcatgtgaccaaggagtccacccaccccgtgaagcccctggcccagatcgccggaaacagatacgcctccggacctgtgggaaaggccctgagcgacgcatgtatgggcacaatcgcctccttcctgtctaagtaccaggacatcatcatcgaacaccagaaggtggtgaagggcaaccagaagagactggagagcctgcgggagctggccggcaaggaaaacctggaataccctagcgtgaccctgccacctcagcctcacaccaaggagggcgttgatgcctacaacgaagtgatcgcccgggtgcgaatgtgggtgaacctgaacctgtggcagaagctgaagctaagcagagatgatgccaagcctctgctgagactgaagggattcccttcctttcctctggtcgagagacaggccaacgaagtggactggtgggacatggtgtgtaacgtgaagaagctgatcaacgagaaaaaggaggatggcaaggtgttttggcagaatctggctggctacaagagacaggaagccctgagaccatacctgagcagcgaggaagatcggaagaagggaaagaaattcgctcggtaccagctgggcgacctgctgctgcacctggaaaagaagcacggcgaggactggggaaaggtgtacgacgaggcctgggagcggattgacaagaaagtggaaggcctgagcaagcacatcaagctggaagaggaacggagaagcgaggacgcccagagcaaggccgccctgaccgactggctgcgggctaaggccagcttcgtgatcgagggcctgaaggaggccgacaaggacgagttctgcagatgcgagctgaagctgcagaagtggtacggggacctgcggggaaagcccttcgccatcgaagccgagaacagcatcctggacatcagcggcttcagcaagcagtacaactgtgccttcatctggcagaaggacggcgtgaagaagctgaacctgtacctgatcatcaactacttcaagggcggcaagctgcggttcaagaagatcaaacctgaagccttcgaagccaacagattctacaccgtgatcaacaaaaagagcggcgagatcgtgcccatggaggtgaacttcaacttcgacgaccccaacctgatcatcctgcctctggcctttggcaagagacagggcagagaattcatctggaacgacctgctgtccctggaaaccggcagcctgaagctggccaacggaagagtgatcgagaagacactgtacaacagaagaacccggcaggatgagcctgccctgttcgtggccctgaccttcgagcggcgggaggtcctggactcctccaatatcaaaccaatgaacctgatcggcgtggcaagaggcgaaaacatccccgccgtgatcgccctgaccgaccccgagggctgcccactgagccggtttaaggatagcctgggaaacccaacccacatcctgagaatcggcgagagctataaggagaagcagcggaccatccaggccaagaaggaggtggagcagcggagagccggcggctacagccggaagtacgccagcaaagccaagaatctggcagacgatatggtgagaaacaccgctagagatctgctgtactacgccgtgacccaggatgccatgctgatcttcgccaacctgagccggggcttcggccggcagggcaagcggaccttcatggccgagagacagtacacacggatggaggactggctgaccgccaagctggcctacgagggcctgagcaagacctacctgtccaagacactggcccagtacacctccaagacatgcagcaactgtgggtttaccatcaccagcgccgactacgacagggtgctggagaagctgaagaagacagcaacaggctggatgaccacaattaacggcaaggagctgaaggtggagggccagattacctactacaacagatacaagagacagaacgtagtcaaggacctgtccgtcgagctggatagactgagcgaagaatctgtgaacaacgacatctcctcctggacaaagggcagaagcggagaagctctgagcctcctgaagaaaagattctcccatagacccgtgcaggagaagttcgtgtgcctgaactgcggcttcgagacacacgcagccgagcaagccgccctgaacatcgccagatcctggctgttcctgcggagccaggagtacaagaaataccagacaaacaagacaaccggcaacaccgataagagagccttcgtcgagacctggcagtccttttaccggaagaagcttaaggaggtgtggaaacctgccgtgcggtctggcggatctggcggaggctccaccagccccaagaaaaagagaaaagtctaagctgccttctgcggggcttgccttctggccatgcccttcttctctcccttgcacctgtacctcttggtctttgaataaagcctgagtaggaaggctagcaaaaaaaaaaaaaaaaaaaaaaaaaaaaaaaaaaaaaaaaaaaaaaaaaaaaaaaaaaaaaaaaaaaaaaaaaaaaaaaa

SEQ ID NO: 12864 - RNA, 5785 nt, synthetic construct
  source 1..5785: mol_type = other RNA
aggaaataagagagaaaagaagagtaagaagaaatataagagccaccatggcccctaagaagaagcgtaaagtgagccggatggaacgcctcgtctacgaggtgcggcagaagtgcagaaacatcgaggacatctgcatctcctgcggatctctgaacgtgaccctggagcacccactgttcatcggcggcatgtgccagaactgtaaaaactgttttctggagtgtgcctatcaatacgacgatgacggctaccagagctactgcaccatctgttgcggcggaagagaggtgctgatgtgtggaaataacaactgctgccggtgcttctgcgtggaatgcgtggacctgctggtgggccccggcgccgcccaggccgctattaaggaagatccttggaactgctacatgtgcggccacaagggcacatacggcctgctgagacggagagaggactggcctagcagactgcagatgttcttcgccaataaccacgaccaggagttcgacccccctaaggtgtaccctcccgtccccgccgagaagagaaagcccatccgggtcctgagcctgttcgatggcatcgccaccggtctgctggtgctgaaggacctgggcatccaggtggataggtacattgcctccgaggtgtgcgaggactccatcaccgtgggaatggtgcgtcatcagggcaagatcatgtacgtgggcgacgtgcggagcgtgacacagaagcatatccaggagtggggccctttcgacctggtgatcggcggcagcccttgcaatgacctgagcatcgtgaacccagcccggaagggcctgtacgagggaaccggcagactgttcttcgagttttacagactgctgcacgacgcccggcctaaggaaggcgacgaccggcccttcttttggctgttcgagaatgtggtggccatgggagtcagcgacaagcgggatattagccggttcctggagagcaaccccgtgatgatcgatgccaaggaagtgagcgccgcccaccgggccagatacttctggggcaatctgcctggcatgaacagacccctggccagcaccgtgaacgacaagctggagctgcaggagtgcctggagcacggccggatcgccaagttcagcaaggtgagaaccatcaccacccgaagcaacagcatcaaacaaggcaaggaccagcactttcctgtgttcatgaacgagaaggaggacatcctgtggtgtaccgagatggagagagtgttcgggttcccagtccactacacagatgtcagcaacatgtctagactggccagacagagactgctgggaagaagctggtccgtccctgtgatcagacacctgttcgcccctctgaaggagtacttcgcctgcgtgagcagcggcaacagcaacgccaacagccggggccccagcttctctagcggcctggtgccactgtccctgagagggagccacatgggccccatggagatctacaaaaccgtgagcgcctggaagcggcagcctgtgcgcgtgctgagcctgtttcggaatatcgataaagtcctgaaaagcctgggattcctggagagcggctctggctccggcggtggcaccctgaagtacgtggaggatgtgacaaacgtggtcagacgggatgtggagaagtggggccccttcgatctggtgtacggcagcacccaacccctgggcagctcttgtgaccggtgccctggctggtacatgtttcagttccaccggatcctgcagtacgccctgccgagacaggagtcccagcggccattcttttggattttcatggacaacttgctgctgaccgaggatgaccaggaaactaccactcggttcctgcagaccgaagccgtgaccctgcaggacgtgagaggccgggactaccagaacgccatgcgggtgtggtccaacatccctggactgaaaagcaagcacgcacctctgacccctaaagaagaggagtacctgcaggcccaggtgcggagcagaagcaagctggacgcccctaaggtggatctgctggtgaagaattgcctcctgcccctgagagagtacttcaagtatttcagccagaatagtctgcccctgggaggcagcggcggcggcgccgcccaggagctggtgaccttccaggacgtgttcgtggacttcagccaggaggagctgaacagcctgagcgccgcccagaggaggctgcacagggaggtgaccctggagaactacaggagcctggtgagcctgggctacaggttccccaagcccgacatcatcgcccagctggaggaggaggagagcagggccatggaggaggacggcgacaccaagaccggccccgactgggagaccggcggcggcccaagcagcggcgcccctcctcccagcggcggcagcccagccggctccccaacctctaccgaggagggcacctctgagtccgccacccccgagagcggccctggcacctccaccgagcccagcgagggcagcgcacccggcagccctgccggcagccccacctccacagaggagggaaccagcaccgagcccagcgaaggcagcgccccaggcaccagcaccgagcctagtgagcaggagattaaacggatcaacaagatcagaagaagacttgtgaaagacagcaacaccaagaaggccggcaagacaggccccatgaaaaccctgctggttagagtgatgacacccgatctgagagagcggctggaaaacctgagaaagaagcctgaaaatatcccccagcccatcagcaatacatctagagccaacctgaataagctgctgaccgattacaccgaaatgaagaaggcgatcctgcatgtgtactgggaagagttccagaaggaccctgtgggcctgatgagccgggtggcccagcctgccagcaagaagatcgatcagaacaagctgaaacctgagatggacgagaagggcaacctgaccaccgccggctttgcctgctctcagtgtggccagcccctgttcgtgtacaagctggagcaggtgtctgagaagggcaaggcttacaccaactacttcggacggtgcaatgtggccgagcacgaaaagctgatcctgctggcccagctgaagcccgagaaggatagcgacgaagccgtgacatatagcctgggaaagtttgggcagagggccctggatttctacagcattcatgtgaccaaggagtccacccaccccgtgaagcccctggcccagatcgccggaaacagatacgcctccggacctgtgggaaaggccctgagcgacgcatgtatgggcacaatcgcctccttcctgtctaagtaccaggacatcatcatcgaacaccagaaggtggtgaagggcaaccagaagagactggagagcctgcgggagctggccggcaaggaaaacctggaataccctagcgtgaccctgccacctcagcctcacaccaaggagggcgttgatgcctacaacgaagtgatcgcccgggtgcgaatgtgggtgaacctgaacctgtggcagaagctgaagctaagcagagatgatgccaagcctctgctgagactgaagggattcccttcctttcctctggtcgagagacaggccaacgaagtggactggtgggacatggtgtgtaacgtgaagaagctgatcaacgagaaaaaggaggatggcaaggtgttttggcagaatctggctggctacaagagacaggaagccctgagaccatacctgagcagcgaggaagatcggaagaagggaaagaaattcgctcggtaccagctgggcgacctgctgctgcacctggaaaagaagcacggcgaggactggggaaaggtgtacgacgaggcctgggagcggattgacaagaaagtggaaggcctgagcaagcacatcaagctggaagaggaacggagaagcgaggacgcccagagcaaggccgccctgaccgactggctgcgggctaaggccagcttcgtgatcgagggcctgaaggaggccgacaaggacgagttctgcagatgcgagctgaagctgcagaagtggtacggggacctgcggggaaagcccttcgccatcgaagccgagaacagcatcctggacatcagcggcttcagcaagcagtacaactgtgccttcatctggcagaaggacggcgtgaagaagctgaacctgtacctgatcatcaactacttcaagggcggcaagctgcggttcaagaagatcaaacctgaagccttcgaagccaacagattctacaccgtgatcaacaaaaagagcggcgagatcgtgcccatggaggtgaacttcaacttcgacgaccccaacctgatcatcctgcctctggcctttggcaagagacagggcagagaattcatctggaacgacctgctgtccctggaaaccggcagcctgaagctggccaacggaagagtgatcgagaagacactgtacaacagaagaacccggcaggatgagcctgccctgttcgtggccctgaccttcgagcggcgggaggtcctggactcctccaatatcaaaccaatgaacctgatcggcgtggcaagaggcgaaaacatccccgccgtgatcgccctgaccgaccccgagggctgcccactgagccggtttaaggatagcctgggaaacccaacccacatcctgagaatcggcgagagctataaggagaagcagcggaccatccaggccaagaaggaggtggagcagcggagagccggcggctacagccggaagtacgccagcaaagccaagaatctggcagacgatatggtgagaaacaccgctagagatctgctgtactacgccgtgacccaggatgccatgctgatcttcgccaacctgagccggggcttcggccggcagggcaagcggaccttcatggccgagagacagtacacacggatggaggactggctgaccgccaagctggcctacgagggcctgagcaagacctacctgtccaagacactggcccagtacacctccaagacatgcagcaactgtgggtttaccatcaccagcgccgactacgacagggtgctggagaagctgaagaagacagcaacaggctggatgaccacaattaacggcaaggagctgaaggtggagggccagattacctactacaacagatacaagagacagaacgtagtcaaggacctgtccgtcgagctggatagactgagcgaagaatctgtgaacaacgacatctcctcctggacaaagggcagaagcggagaagctctgagcctcctgaagaaaagattctcccatagacccgtgcaggagaagttcgtgtgcctgaactgcggcttcgagacacacgcagccgagcaagccgccctgaacatcgccagatcctggctgttcctgcggagccaggagtacaagaaataccagacaaacaagacaaccggcaacaccgataagagagccttcgtcgagacctggcagtccttttaccggaagaagcttaaggaggtgtggaaacctgccgtgcggtctggcggatctggcggaggctccaccagccccaagaaaaagagaaaagtctaagctgccttctgcggggcttgccttctggccatgcccttcttctctcccttgcacctgtacctcttggtctttgaataaagcctgagtaggaaggctagcaaaaaaaaaaaaaaaaaaaaaaaaaaaaaaaaaaaaaaaaaaaaaaaaaaaaaaaaaaaaaaaaaaaaaaaaaaaaaaaa

SEQ ID NO: 12865 - RNA, 5785 nt, synthetic construct
  source 1..5785: mol_type = other RNA
aggaaataagagagaaaagaagagtaagaagaaatataagagccaccatggcccctaagaagaagcgtaaagtgagccggatggaacgcctcgtctacgaggtgcggcagaagtgcagaaacatcgaggacatctgcatctcctgcggatctctgaacgtgaccctggagcacccactgttcatcggcggcatgtgccagaactgtaaaaactgttttctggagtgtgcctatcaatacgacgatgacggctaccagagctactgcaccatctgttgcggcggaagagaggtgctgatgtgtggaaataacaactgctgccggtgcttctgcgtggaatgcgtggacctgctggtgggccccggcgccgcccaggccgctattaaggaagatccttggaactgctacatgtgcggccacaagggcacatacggcctgctgagacggagagaggactggcctagcagactgcagatgttcttcgccaataaccacgaccaggagttcgacccccctaaggtgtaccctcccgtccccgccgagaagagaaagcccatccgggtcctgagcctgttcgatggcatcgccaccggtctgctggtgctgaaggacctgggcatccaggtggataggtacattgcctccgaggtgtgcgaggactccatcaccgtgggaatggtgcgtcatcagggcaagatcatgtacgtgggcgacgtgcggagcgtgacacagaagcatatccaggagtggggccctttcgacctggtgatcggcggcagcccttgcaatgacctgagcatcgtgaacccagcccggaagggcctgtacgagggaaccggcagactgttcttcgagttttacagactgctgcacgacgcccggcctaaggaaggcgacgaccggcccttcttttggctgttcgagaatgtggtggccatgggagtcagcgacaagcgggatattagccggttcctggagagcaaccccgtgatgatcgatgccaaggaagtgagcgccgcccaccgggccagatacttctggggcaatctgcctggcatgaacagacccctggccagcaccgtgaacgacaagctggagctgcaggagtgcctggagcacggccggatcgccaagttcagcaaggtgagaaccatcaccacccgaagcaacagcatcaaacaaggcaaggaccagcactttcctgtgttcatgaacgagaaggaggacatcctgtggtgtaccgagatggagagagtgttcgggttcccagtccactacacagatgtcagcaacatgtctagactggccagacagagactgctgggaagaagctggtccgtccctgtgatcagacacctgttcgcccctctgaaggagtacttcgcctgcgtgagcagcggcaacagcaacgccaacagccggggccccagcttctctagcggcctggtgccactgtccctgagagggagccacatgggccccatggagatctacaaaaccgtgagcgcctggaagcggcagcctgtgcgcgtgctgagcctgtttcggaatatcgataaagtcctgaaaagcctgggattcctggagagcggctctggctccggcggtggcaccctgaagtacgtggaggatgtgacaaacgtggtcagacgggatgtggagaagtggggccccttcgatctggtgtacggcagcacccaacccctgggcagctcttgtgaccggtgccctggctggtacatgtttcagttccaccggatcctgcagtacgccctgccgagacaggagtcccagcggccattcttttggattttcatggacaacttgctgctgaccgaggatgaccaggaaactaccactcggttcctgcagaccgaagccgtgaccctgcaggacgtgagaggccgggactaccagaacgccatgcgggtgtggtccaacatccctggactgaaaagcaagcacgcacctctgacccctaaagaagaggagtacctgcaggcccaggtgcggagcagaagcaagctggacgcccctaaggtggatctgctggtgaagaattgcctcctgcccctgagagagtacttcaagtatttcagccagaatagtctgcccctgggaggcagcggcggcggcggcaagatgagcgtgaccttcgaggacgtggccctgtacttcagccccgaggagtgggccaagctgagcggctgccagaggcagctgtacagggaggtgatgctggagaactaccagatggtggccagcctgggctgggccaccgtgaagcccgagatcatctgcaagatggagagggaggagaccccctgcgtgctggacccccccggcgagcagcagatgcaccagagccccgtgcccgccggcggcccaagcagcggcgcccctcctcccagcggcggcagcccagccggctccccaacctctaccgaggagggcacctctgagtccgccacccccgagagcggccctggcacctccaccgagcccagcgagggcagcgcacccggcagccctgccggcagccccacctccacagaggagggaaccagcaccgagcccagcgaaggcagcgccccaggcaccagcaccgagcctagtgagcaggagattaaacggatcaacaagatcagaagaagacttgtgaaagacagcaacaccaagaaggccggcaagacaggccccatgaaaaccctgctggttagagtgatgacacccgatctgagagagcggctggaaaacctgagaaagaagcctgaaaatatcccccagcccatcagcaatacatctagagccaacctgaataagctgctgaccgattacaccgaaatgaagaaggcgatcctgcatgtgtactgggaagagttccagaaggaccctgtgggcctgatgagccgggtggcccagcctgccagcaagaagatcgatcagaacaagctgaaacctgagatggacgagaagggcaacctgaccaccgccggctttgcctgctctcagtgtggccagcccctgttcgtgtacaagctggagcaggtgtctgagaagggcaaggcttacaccaactacttcggacggtgcaatgtggccgagcacgaaaagctgatcctgctggcccagctgaagcccgagaaggatagcgacgaagccgtgacatatagcctgggaaagtttgggcagagggccctggatttctacagcattcatgtgaccaaggagtccacccaccccgtgaagcccctggcccagatcgccggaaacagatacgcctccggacctgtgggaaaggccctgagcgacgcatgtatgggcacaatcgcctccttcctgtctaagtaccaggacatcatcatcgaacaccagaaggtggtgaagggcaaccagaagagactggagagcctgcgggagctggccggcaaggaaaacctggaataccctagcgtgaccctgccacctcagcctcacaccaaggagggcgttgatgcctacaacgaagtgatcgcccgggtgcgaatgtgggtgaacctgaacctgtggcagaagctgaagctaagcagagatgatgccaagcctctgctgagactgaagggattcccttcctttcctctggtcgagagacaggccaacgaagtggactggtgggacatggtgtgtaacgtgaagaagctgatcaacgagaaaaaggaggatggcaaggtgttttggcagaatctggctggctacaagagacaggaagccctgagaccatacctgagcagcgaggaagatcggaagaagggaaagaaattcgctcggtaccagctgggcgacctgctgctgcacctggaaaagaagcacggcgaggactggggaaaggtgtacgacgaggcctgggagcggattgacaagaaagtggaaggcctgagcaagcacatcaagctggaagaggaacggagaagcgaggacgcccagagcaaggccgccctgaccgactggctgcgggctaaggccagcttcgtgatcgagggcctgaaggaggccgacaaggacgagttctgcagatgcgagctgaagctgcagaagtggtacggggacctgcggggaaagcccttcgccatcgaagccgagaacagcatcctggacatcagcggcttcagcaagcagtacaactgtgccttcatctggcagaaggacggcgtgaagaagctgaacctgtacctgatcatcaactacttcaagggcggcaagctgcggttcaagaagatcaaacctgaagccttcgaagccaacagattctacaccgtgatcaacaaaaagagcggcgagatcgtgcccatggaggtgaacttcaacttcgacgaccccaacctgatcatcctgcctctggcctttggcaagagacagggcagagaattcatctggaacgacctgctgtccctggaaaccggcagcctgaagctggccaacggaagagtgatcgagaagacactgtacaacagaagaacccggcaggatgagcctgccctgttcgtggccctgaccttcgagcggcgggaggtcctggactcctccaatatcaaaccaatgaacctgatcggcgtggcaagaggcgaaaacatccccgccgtgatcgccctgaccgaccccgagggctgcccactgagccggtttaaggatagcctgggaaacccaacccacatcctgagaatcggcgagagctataaggagaagcagcggaccatccaggccaagaaggaggtggagcagcggagagccggcggctacagccggaagtacgccagcaaagccaagaatctggcagacgatatggtgagaaacaccgctagagatctgctgtactacgccgtgacccaggatgccatgctgatcttcgccaacctgagccggggcttcggccggcagggcaagcggaccttcatggccgagagacagtacacacggatggaggactggctgaccgccaagctggcctacgagggcctgagcaagacctacctgtccaagacactggcccagtacacctccaagacatgcagcaactgtgggtttaccatcaccagcgccgactacgacagggtgctggagaagctgaagaagacagcaacaggctggatgaccacaattaacggcaaggagctgaaggtggagggccagattacctactacaacagatacaagagacagaacgtagtcaaggacctgtccgtcgagctggatagactgagcgaagaatctgtgaacaacgacatctcctcctggacaaagggcagaagcggagaagctctgagcctcctgaagaaaagattctcccatagacccgtgcaggagaagttcgtgtgcctgaactgcggcttcgagacacacgcagccgagcaagccgccctgaacatcgccagatcctggctgttcctgcggagccaggagtacaagaaataccagacaaacaagacaaccggcaacaccgataagagagccttcgtcgagacctggcagtccttttaccggaagaagcttaaggaggtgtggaaacctgccgtgcggtctggcggatctggcggaggctccaccagccccaagaaaaagagaaaagtctaagctgccttctgcggggcttgccttctggccatgcccttcttctctcccttgcacctgtacctcttggtctttgaataaagcctgagtaggaaggctagcaaaaaaaaaaaaaaaaaaaaaaaaaaaaaaaaaaaaaaaaaaaaaaaaaaaaaaaaaaaaaaaaaaaaaaaaaaaaaaaa

SEQ ID NO: 12866 - RNA, 5785 nt, synthetic construct
  source 1..5785: mol_type = other RNA
aggaaataagagagaaaagaagagtaagaagaaatataagagccaccatggcccctaagaagaagcgtaaagtgagccggatggaacgcctcgtctacgaggtgcggcagaagtgcagaaacatcgaggacatctgcatctcctgcggatctctgaacgtgaccctggagcacccactgttcatcggcggcatgtgccagaactgtaaaaactgttttctggagtgtgcctatcaatacgacgatgacggctaccagagctactgcaccatctgttgcggcggaagagaggtgctgatgtgtggaaataacaactgctgccggtgcttctgcgtggaatgcgtggacctgctggtgggccccggcgccgcccaggccgctattaaggaagatccttggaactgctacatgtgcggccacaagggcacatacggcctgctgagacggagagaggactggcctagcagactgcagatgttcttcgccaataaccacgaccaggagttcgacccccctaaggtgtaccctcccgtccccgccgagaagagaaagcccatccgggtcctgagcctgttcgatggcatcgccaccggtctgctggtgctgaaggacctgggcatccaggtggataggtacattgcctccgaggtgtgcgaggactccatcaccgtgggaatggtgcgtcatcagggcaagatcatgtacgtgggcgacgtgcggagcgtgacacagaagcatatccaggagtggggccctttcgacctggtgatcggcggcagcccttgcaatgacctgagcatcgtgaacccagcccggaagggcctgtacgagggaaccggcagactgttcttcgagttttacagactgctgcacgacgcccggcctaaggaaggcgacgaccggcccttcttttggctgttcgagaatgtggtggccatgggagtcagcgacaagcgggatattagccggttcctggagagcaaccccgtgatgatcgatgccaaggaagtgagcgccgcccaccgggccagatacttctggggcaatctgcctggcatgaacagacccctggccagcaccgtgaacgacaagctggagctgcaggagtgcctggagcacggccggatcgccaagttcagcaaggtgagaaccatcaccacccgaagcaacagcatcaaacaaggcaaggaccagcactttcctgtgttcatgaacgagaaggaggacatcctgtggtgtaccgagatggagagagtgttcgggttcccagtccactacacagatgtcagcaacatgtctagactggccagacagagactgctgggaagaagctggtccgtccctgtgatcagacacctgttcgcccctctgaaggagtacttcgcctgcgtgagcagcggcaacagcaacgccaacagccggggccccagcttctctagcggcctggtgccactgtccctgagagggagccacatgggccccatggagatctacaaaaccgtgagcgcctggaagcggcagcctgtgcgcgtgctgagcctgtttcggaatatcgataaagtcctgaaaagcctgggattcctggagagcggctctggctccggcggtggcaccctgaagtacgtggaggatgtgacaaacgtggtcagacgggatgtggagaagtggggccccttcgatctggtgtacggcagcacccaacccctgggcagctcttgtgaccggtgccctggctggtacatgtttcagttccaccggatcctgcagtacgccctgccgagacaggagtcccagcggccattcttttggattttcatggacaacttgctgctgaccgaggatgaccaggaaactaccactcggttcctgcagaccgaagccgtgaccctgcaggacgtgagaggccgggactaccagaacgccatgcgggtgtggtccaacatccctggactgaaaagcaagcacgcacctctgacccctaaagaagaggagtacctgcaggcccaggtgcggagcagaagcaagctggacgcccctaaggtggatctgctggtgaagaattgcctcctgcccctgagagagtacttcaagtatttcagccagaatagtctgcccctgggaggcagcggcggcggcagccaggagcccgtgagcttcgccgaggtggccgtgtacttcagcagggaggagtgggccctgctggaccccgcccagagggccctgtacagggacgtgatgctggagacctaccagtgcgtggccagcctggcccccctgcccgcccccaagcccatgctgatcagcctgctggagggcggcgaggagccctggatccccgacgtgaggagccccgaggccgtgcccggcgacctgagccccggcggcccaagcagcggcgcccctcctcccagcggcggcagcccagccggctccccaacctctaccgaggagggcacctctgagtccgccacccccgagagcggccctggcacctccaccgagcccagcgagggcagcgcacccggcagccctgccggcagccccacctccacagaggagggaaccagcaccgagcccagcgaaggcagcgccccaggcaccagcaccgagcctagtgagcaggagattaaacggatcaacaagatcagaagaagacttgtgaaagacagcaacaccaagaaggccggcaagacaggccccatgaaaaccctgctggttagagtgatgacacccgatctgagagagcggctggaaaacctgagaaagaagcctgaaaatatcccccagcccatcagcaatacatctagagccaacctgaataagctgctgaccgattacaccgaaatgaagaaggcgatcctgcatgtgtactgggaagagttccagaaggaccctgtgggcctgatgagccgggtggcccagcctgccagcaagaagatcgatcagaacaagctgaaacctgagatggacgagaagggcaacctgaccaccgccggctttgcctgctctcagtgtggccagcccctgttcgtgtacaagctggagcaggtgtctgagaagggcaaggcttacaccaactacttcggacggtgcaatgtggccgagcacgaaaagctgatcctgctggcccagctgaagcccgagaaggatagcgacgaagccgtgacatatagcctgggaaagtttgggcagagggccctggatttctacagcattcatgtgaccaaggagtccacccaccccgtgaagcccctggcccagatcgccggaaacagatacgcctccggacctgtgggaaaggccctgagcgacgcatgtatgggcacaatcgcctccttcctgtctaagtaccaggacatcatcatcgaacaccagaaggtggtgaagggcaaccagaagagactggagagcctgcgggagctggccggcaaggaaaacctggaataccctagcgtgaccctgccacctcagcctcacaccaaggagggcgttgatgcctacaacgaagtgatcgcccgggtgcgaatgtgggtgaacctgaacctgtggcagaagctgaagctaagcagagatgatgccaagcctctgctgagactgaagggattcccttcctttcctctggtcgagagacaggccaacgaagtggactggtgggacatggtgtgtaacgtgaagaagctgatcaacgagaaaaaggaggatggcaaggtgttttggcagaatctggctggctacaagagacaggaagccctgagaccatacctgagcagcgaggaagatcggaagaagggaaagaaattcgctcggtaccagctgggcgacctgctgctgcacctggaaaagaagcacggcgaggactggggaaaggtgtacgacgaggcctgggagcggattgacaagaaagtggaaggcctgagcaagcacatcaagctggaagaggaacggagaagcgaggacgcccagagcaaggccgccctgaccgactggctgcgggctaaggccagcttcgtgatcgagggcctgaaggaggccgacaaggacgagttctgcagatgcgagctgaagctgcagaagtggtacggggacctgcggggaaagcccttcgccatcgaagccgagaacagcatcctggacatcagcggcttcagcaagcagtacaactgtgccttcatctggcagaaggacggcgtgaagaagctgaacctgtacctgatcatcaactacttcaagggcggcaagctgcggttcaagaagatcaaacctgaagccttcgaagccaacagattctacaccgtgatcaacaaaaagagcggcgagatcgtgcccatggaggtgaacttcaacttcgacgaccccaacctgatcatcctgcctctggcctttggcaagagacagggcagagaattcatctggaacgacctgctgtccctggaaaccggcagcctgaagctggccaacggaagagtgatcgagaagacactgtacaacagaagaacccggcaggatgagcctgccctgttcgtggccctgaccttcgagcggcgggaggtcctggactcctccaatatcaaaccaatgaacctgatcggcgtggcaagaggcgaaaacatccccgccgtgatcgccctgaccgaccccgagggctgcccactgagccggtttaaggatagcctgggaaacccaacccacatcctgagaatcggcgagagctataaggagaagcagcggaccatccaggccaagaaggaggtggagcagcggagagccggcggctacagccggaagtacgccagcaaagccaagaatctggcagacgatatggtgagaaacaccgctagagatctgctgtactacgccgtgacccaggatgccatgctgatcttcgccaacctgagccggggcttcggccggcagggcaagcggaccttcatggccgagagacagtacacacggatggaggactggctgaccgccaagctggcctacgagggcctgagcaagacctacctgtccaagacactggcccagtacacctccaagacatgcagcaactgtgggtttaccatcaccagcgccgactacgacagggtgctggagaagctgaagaagacagcaacaggctggatgaccacaattaacggcaaggagctgaaggtggagggccagattacctactacaacagatacaagagacagaacgtagtcaaggacctgtccgtcgagctggatagactgagcgaagaatctgtgaacaacgacatctcctcctggacaaagggcagaagcggagaagctctgagcctcctgaagaaaagattctcccatagacccgtgcaggagaagttcgtgtgcctgaactgcggcttcgagacacacgcagccgagcaagccgccctgaacatcgccagatcctggctgttcctgcggagccaggagtacaagaaataccagacaaacaagacaaccggcaacaccgataagagagccttcgtcgagacctggcagtccttttaccggaagaagcttaaggaggtgtggaaacctgccgtgcggtctggcggatctggcggaggctccaccagccccaagaaaaagagaaaagtctaagctgccttctgcggggcttgccttctggccatgcccttcttctctcccttgcacctgtacctcttggtctttgaataaagcctgagtaggaaggctagcaaaaaaaaaaaaaaaaaaaaaaaaaaaaaaaaaaaaaaaaaaaaaaaaaaaaaaaaaaaaaaaaaaaaaaaaaaaaaaaa

SEQ ID NO: 12867 - RNA, 5785 nt, synthetic construct
  source 1..5785: mol_type = other RNA
aggaaataagagagaaaagaagagtaagaagaaatataagagccaccatggcccctaagaagaagcgtaaagtgagccggatggaacgcctcgtctacgaggtgcggcagaagtgcagaaacatcgaggacatctgcatctcctgcggatctctgaacgtgaccctggagcacccactgttcatcggcggcatgtgccagaactgtaaaaactgttttctggagtgtgcctatcaatacgacgatgacggctaccagagctactgcaccatctgttgcggcggaagagaggtgctgatgtgtggaaataacaactgctgccggtgcttctgcgtggaatgcgtggacctgctggtgggccccggcgccgcccaggccgctattaaggaagatccttggaactgctacatgtgcggccacaagggcacatacggcctgctgagacggagagaggactggcctagcagactgcagatgttcttcgccaataaccacgaccaggagttcgacccccctaaggtgtaccctcccgtccccgccgagaagagaaagcccatccgggtcctgagcctgttcgatggcatcgccaccggtctgctggtgctgaaggacctgggcatccaggtggataggtacattgcctccgaggtgtgcgaggactccatcaccgtgggaatggtgcgtcatcagggcaagatcatgtacgtgggcgacgtgcggagcgtgacacagaagcatatccaggagtggggccctttcgacctggtgatcggcggcagcccttgcaatgacctgagcatcgtgaacccagcccggaagggcctgtacgagggaaccggcagactgttcttcgagttttacagactgctgcacgacgcccggcctaaggaaggcgacgaccggcccttcttttggctgttcgagaatgtggtggccatgggagtcagcgacaagcgggatattagccggttcctggagagcaaccccgtgatgatcgatgccaaggaagtgagcgccgcccaccgggccagatacttctggggcaatctgcctggcatgaacagacccctggccagcaccgtgaacgacaagctggagctgcaggagtgcctggagcacggccggatcgccaagttcagcaaggtgagaaccatcaccacccgaagcaacagcatcaaacaaggcaaggaccagcactttcctgtgttcatgaacgagaaggaggacatcctgtggtgtaccgagatggagagagtgttcgggttcccagtccactacacagatgtcagcaacatgtctagactggccagacagagactgctgggaagaagctggtccgtccctgtgatcagacacctgttcgcccctctgaaggagtacttcgcctgcgtgagcagcggcaacagcaacgccaacagccggggccccagcttctctagcggcctggtgccactgtccctgagagggagccacatgggccccatggagatctacaaaaccgtgagcgcctggaagcggcagcctgtgcgcgtgctgagcctgtttcggaatatcgataaagtcctgaaaagcctgggattcctggagagcggctctggctccggcggtggcaccctgaagtacgtggaggatgtgacaaacgtggtcagacgggatgtggagaagtggggccccttcgatctggtgtacggcagcacccaacccctgggcagctcttgtgaccggtgccctggctggtacatgtttcagttccaccggatcctgcagtacgccctgccgagacaggagtcccagcggccattcttttggattttcatggacaacttgctgctgaccgaggatgaccaggaaactaccactcggttcctgcagaccgaagccgtgaccctgcaggacgtgagaggccgggactaccagaacgccatgcgggtgtggtccaacatccctggactgaaaagcaagcacgcacctctgacccctaaagaagaggagtacctgcaggcccaggtgcggagcagaagcaagctggacgcccctaaggtggatctgctggtgaagaattgcctcctgcccctgagagagtacttcaagtatttcagccagaatagtctgcccctgggaggcagcggcggcggcctgaggggcctggtgaccttcgaggacgtggccgtggagttcacccaggaggagtgggccctgctggaccccgcccagaggaccctgtacagggacgtgatgctggagaactgcaggaacctggccagcctgggctgcagggtgaacaagcccagcctgatcagccagctggagcaggacaagaaggtgatcaccgaggagaggggcatcctgcccagcacctgccccgacctggagaccctgggcggcccaagcagcggcgcccctcctcccagcggcggcagcccagccggctccccaacctctaccgaggagggcacctctgagtccgccacccccgagagcggccctggcacctccaccgagcccagcgagggcagcgcacccggcagccctgccggcagccccacctccacagaggagggaaccagcaccgagcccagcgaaggcagcgccccaggcaccagcaccgagcctagtgagcaggagattaaacggatcaacaagatcagaagaagacttgtgaaagacagcaacaccaagaaggccggcaagacaggccccatgaaaaccctgctggttagagtgatgacacccgatctgagagagcggctggaaaacctgagaaagaagcctgaaaatatcccccagcccatcagcaatacatctagagccaacctgaataagctgctgaccgattacaccgaaatgaagaaggcgatcctgcatgtgtactgggaagagttccagaaggaccctgtgggcctgatgagccgggtggcccagcctgccagcaagaagatcgatcagaacaagctgaaacctgagatggacgagaagggcaacctgaccaccgccggctttgcctgctctcagtgtggccagcccctgttcgtgtacaagctggagcaggtgtctgagaagggcaaggcttacaccaactacttcggacggtgcaatgtggccgagcacgaaaagctgatcctgctggcccagctgaagcccgagaaggatagcgacgaagccgtgacatatagcctgggaaagtttgggcagagggccctggatttctacagcattcatgtgaccaaggagtccacccaccccgtgaagcccctggcccagatcgccggaaacagatacgcctccggacctgtgggaaaggccctgagcgacgcatgtatgggcacaatcgcctccttcctgtctaagtaccaggacatcatcatcgaacaccagaaggtggtgaagggcaaccagaagagactggagagcctgcgggagctggccggcaaggaaaacctggaataccctagcgtgaccctgccacctcagcctcacaccaaggagggcgttgatgcctacaacgaagtgatcgcccgggtgcgaatgtgggtgaacctgaacctgtggcagaagctgaagctaagcagagatgatgccaagcctctgctgagactgaagggattcccttcctttcctctggtcgagagacaggccaacgaagtggactggtgggacatggtgtgtaacgtgaagaagctgatcaacgagaaaaaggaggatggcaaggtgttttggcagaatctggctggctacaagagacaggaagccctgagaccatacctgagcagcgaggaagatcggaagaagggaaagaaattcgctcggtaccagctgggcgacctgctgctgcacctggaaaagaagcacggcgaggactggggaaaggtgtacgacgaggcctgggagcggattgacaagaaagtggaaggcctgagcaagcacatcaagctggaagaggaacggagaagcgaggacgcccagagcaaggccgccctgaccgactggctgcgggctaaggccagcttcgtgatcgagggcctgaaggaggccgacaaggacgagttctgcagatgcgagctgaagctgcagaagtggtacggggacctgcggggaaagcccttcgccatcgaagccgagaacagcatcctggacatcagcggcttcagcaagcagtacaactgtgccttcatctggcagaaggacggcgtgaagaagctgaacctgtacctgatcatcaactacttcaagggcggcaagctgcggttcaagaagatcaaacctgaagccttcgaagccaacagattctacaccgtgatcaacaaaaagagcggcgagatcgtgcccatggaggtgaacttcaacttcgacgaccccaacctgatcatcctgcctctggcctttggcaagagacagggcagagaattcatctggaacgacctgctgtccctggaaaccggcagcctgaagctggccaacggaagagtgatcgagaagacactgtacaacagaagaacccggcaggatgagcctgccctgttcgtggccctgaccttcgagcggcgggaggtcctggactcctccaatatcaaaccaatgaacctgatcggcgtggcaagaggcgaaaacatccccgccgtgatcgccctgaccgaccccgagggctgcccactgagccggtttaaggatagcctgggaaacccaacccacatcctgagaatcggcgagagctataaggagaagcagcggaccatccaggccaagaaggaggtggagcagcggagagccggcggctacagccggaagtacgccagcaaagccaagaatctggcagacgatatggtgagaaacaccgctagagatctgctgtactacgccgtgacccaggatgccatgctgatcttcgccaacctgagccggggcttcggccggcagggcaagcggaccttcatggccgagagacagtacacacggatggaggactggctgaccgccaagctggcctacgagggcctgagcaagacctacctgtccaagacactggcccagtacacctccaagacatgcagcaactgtgggtttaccatcaccagcgccgactacgacagggtgctggagaagctgaagaagacagcaacaggctggatgaccacaattaacggcaaggagctgaaggtggagggccagattacctactacaacagatacaagagacagaacgtagtcaaggacctgtccgtcgagctggatagactgagcgaagaatctgtgaacaacgacatctcctcctggacaaagggcagaagcggagaagctctgagcctcctgaagaaaagattctcccatagacccgtgcaggagaagttcgtgtgcctgaactgcggcttcgagacacacgcagccgagcaagccgccctgaacatcgccagatcctggctgttcctgcggagccaggagtacaagaaataccagacaaacaagacaaccggcaacaccgataagagagccttcgtcgagacctggcagtccttttaccggaagaagcttaaggaggtgtggaaacctgccgtgcggtctggcggatctggcggaggctccaccagccccaagaaaaagagaaaagtctaagctgccttctgcggggcttgccttctggccatgcccttcttctctcccttgcacctgtacctcttggtctttgaataaagcctgagtaggaaggctagcaaaaaaaaaaaaaaaaaaaaaaaaaaaaaaaaaaaaaaaaaaaaaaaaaaaaaaaaaaaaaaaaaaaaaaaaaaaaaaaa

SEQ ID NO: 12868 - RNA, 5785 nt, synthetic construct
  source 1..5785: mol_type = other RNA
aggaaataagagagaaaagaagagtaagaagaaatataagagccaccatggcccctaagaagaagcgtaaagtgagccggatggaacgcctcgtctacgaggtgcggcagaagtgcagaaacatcgaggacatctgcatctcctgcggatctctgaacgtgaccctggagcacccactgttcatcggcggcatgtgccagaactgtaaaaactgttttctggagtgtgcctatcaatacgacgatgacggctaccagagctactgcaccatctgttgcggcggaagagaggtgctgatgtgtggaaataacaactgctgccggtgcttctgcgtggaatgcgtggacctgctggtgggccccggcgccgcccaggccgctattaaggaagatccttggaactgctacatgtgcggccacaagggcacatacggcctgctgagacggagagaggactggcctagcagactgcagatgttcttcgccaataaccacgaccaggagttcgacccccctaaggtgtaccctcccgtccccgccgagaagagaaagcccatccgggtcctgagcctgttcgatggcatcgccaccggtctgctggtgctgaaggacctgggcatccaggtggataggtacattgcctccgaggtgtgcgaggactccatcaccgtgggaatggtgcgtcatcagggcaagatcatgtacgtgggcgacgtgcggagcgtgacacagaagcatatccaggagtggggccctttcgacctggtgatcggcggcagcccttgcaatgacctgagcatcgtgaacccagcccggaagggcctgtacgagggaaccggcagactgttcttcgagttttacagactgctgcacgacgcccggcctaaggaaggcgacgaccggcccttcttttggctgttcgagaatgtggtggccatgggagtcagcgacaagcgggatattagccggttcctggagagcaaccccgtgatgatcgatgccaaggaagtgagcgccgcccaccgggccagatacttctggggcaatctgcctggcatgaacagacccctggccagcaccgtgaacgacaagctggagctgcaggagtgcctggagcacggccggatcgccaagttcagcaaggtgagaaccatcaccacccgaagcaacagcatcaaacaaggcaaggaccagcactttcctgtgttcatgaacgagaaggaggacatcctgtggtgtaccgagatggagagagtgttcgggttcccagtccactacacagatgtcagcaacatgtctagactggccagacagagactgctgggaagaagctggtccgtccctgtgatcagacacctgttcgcccctctgaaggagtacttcgcctgcgtgagcagcggcaacagcaacgccaacagccggggccccagcttctctagcggcctggtgccactgtccctgagagggagccacatgggccccatggagatctacaaaaccgtgagcgcctggaagcggcagcctgtgcgcgtgctgagcctgtttcggaatatcgataaagtcctgaaaagcctgggattcctggagagcggctctggctccggcggtggcaccctgaagtacgtggaggatgtgacaaacgtggtcagacgggatgtggagaagtggggccccttcgatctggtgtacggcagcacccaacccctgggcagctcttgtgaccggtgccctggctggtacatgtttcagttccaccggatcctgcagtacgccctgccgagacaggagtcccagcggccattcttttggattttcatggacaacttgctgctgaccgaggatgaccaggaaactaccactcggttcctgcagaccgaagccgtgaccctgcaggacgtgagaggccgggactaccagaacgccatgcgggtgtggtccaacatccctggactgaaaagcaagcacgcacctctgacccctaaagaagaggagtacctgcaggcccaggtgcggagcagaagcaagctggacgcccctaaggtggatctgctggtgaagaattgcctcctgcccctgagagagtacttcaagtatttcagccagaatagtctgcccctgggaggcagcggcggcggcagcctggagcaggtgagcttcaaggacgtgtgcgtggacttcacccaggaggagtggtacctgctggaccccgcccagaagatcctgtacagggacgtgatcctggagaactacagcaacatcgtgagcgtgggccactgcggcaccaagcccgaggtgatcttcaagatcgagcagggcgaggagccctgggtgctgggcgagggcttcagcagcctgcagcaccccgagaggaactggaagggcggcccaagcagcggcgcccctcctcccagcggcggcagcccagccggctccccaacctctaccgaggagggcacctctgagtccgccacccccgagagcggccctggcacctccaccgagcccagcgagggcagcgcacccggcagccctgccggcagccccacctccacagaggagggaaccagcaccgagcccagcgaaggcagcgccccaggcaccagcaccgagcctagtgagcaggagattaaacggatcaacaagatcagaagaagacttgtgaaagacagcaacaccaagaaggccggcaagacaggccccatgaaaaccctgctggttagagtgatgacacccgatctgagagagcggctggaaaacctgagaaagaagcctgaaaatatcccccagcccatcagcaatacatctagagccaacctgaataagctgctgaccgattacaccgaaatgaagaaggcgatcctgcatgtgtactgggaagagttccagaaggaccctgtgggcctgatgagccgggtggcccagcctgccagcaagaagatcgatcagaacaagctgaaacctgagatggacgagaagggcaacctgaccaccgccggctttgcctgctctcagtgtggccagcccctgttcgtgtacaagctggagcaggtgtctgagaagggcaaggcttacaccaactacttcggacggtgcaatgtggccgagcacgaaaagctgatcctgctggcccagctgaagcccgagaaggatagcgacgaagccgtgacatatagcctgggaaagtttgggcagagggccctggatttctacagcattcatgtgaccaaggagtccacccaccccgtgaagcccctggcccagatcgccggaaacagatacgcctccggacctgtgggaaaggccctgagcgacgcatgtatgggcacaatcgcctccttcctgtctaagtaccaggacatcatcatcgaacaccagaaggtggtgaagggcaaccagaagagactggagagcctgcgggagctggccggcaaggaaaacctggaataccctagcgtgaccctgccacctcagcctcacaccaaggagggcgttgatgcctacaacgaagtgatcgcccgggtgcgaatgtgggtgaacctgaacctgtggcagaagctgaagctaagcagagatgatgccaagcctctgctgagactgaagggattcccttcctttcctctggtcgagagacaggccaacgaagtggactggtgggacatggtgtgtaacgtgaagaagctgatcaacgagaaaaaggaggatggcaaggtgttttggcagaatctggctggctacaagagacaggaagccctgagaccatacctgagcagcgaggaagatcggaagaagggaaagaaattcgctcggtaccagctgggcgacctgctgctgcacctggaaaagaagcacggcgaggactggggaaaggtgtacgacgaggcctgggagcggattgacaagaaagtggaaggcctgagcaagcacatcaagctggaagaggaacggagaagcgaggacgcccagagcaaggccgccctgaccgactggctgcgggctaaggccagcttcgtgatcgagggcctgaaggaggccgacaaggacgagttctgcagatgcgagctgaagctgcagaagtggtacggggacctgcggggaaagcccttcgccatcgaagccgagaacagcatcctggacatcagcggcttcagcaagcagtacaactgtgccttcatctggcagaaggacggcgtgaagaagctgaacctgtacctgatcatcaactacttcaagggcggcaagctgcggttcaagaagatcaaacctgaagccttcgaagccaacagattctacaccgtgatcaacaaaaagagcggcgagatcgtgcccatggaggtgaacttcaacttcgacgaccccaacctgatcatcctgcctctggcctttggcaagagacagggcagagaattcatctggaacgacctgctgtccctggaaaccggcagcctgaagctggccaacggaagagtgatcgagaagacactgtacaacagaagaacccggcaggatgagcctgccctgttcgtggccctgaccttcgagcggcgggaggtcctggactcctccaatatcaaaccaatgaacctgatcggcgtggcaagaggcgaaaacatccccgccgtgatcgccctgaccgaccccgagggctgcccactgagccggtttaaggatagcctgggaaacccaacccacatcctgagaatcggcgagagctataaggagaagcagcggaccatccaggccaagaaggaggtggagcagcggagagccggcggctacagccggaagtacgccagcaaagccaagaatctggcagacgatatggtgagaaacaccgctagagatctgctgtactacgccgtgacccaggatgccatgctgatcttcgccaacctgagccggggcttcggccggcagggcaagcggaccttcatggccgagagacagtacacacggatggaggactggctgaccgccaagctggcctacgagggcctgagcaagacctacctgtccaagacactggcccagtacacctccaagacatgcagcaactgtgggtttaccatcaccagcgccgactacgacagggtgctggagaagctgaagaagacagcaacaggctggatgaccacaattaacggcaaggagctgaaggtggagggccagattacctactacaacagatacaagagacagaacgtagtcaaggacctgtccgtcgagctggatagactgagcgaagaatctgtgaacaacgacatctcctcctggacaaagggcagaagcggagaagctctgagcctcctgaagaaaagattctcccatagacccgtgcaggagaagttcgtgtgcctgaactgcggcttcgagacacacgcagccgagcaagccgccctgaacatcgccagatcctggctgttcctgcggagccaggagtacaagaaataccagacaaacaagacaaccggcaacaccgataagagagccttcgtcgagacctggcagtccttttaccggaagaagcttaaggaggtgtggaaacctgccgtgcggtctggcggatctggcggaggctccaccagccccaagaaaaagagaaaagtctaagctgccttctgcggggcttgccttctggccatgcccttcttctctcccttgcacctgtacctcttggtctttgaataaagcctgagtaggaaggctagcaaaaaaaaaaaaaaaaaaaaaaaaaaaaaaaaaaaaaaaaaaaaaaaaaaaaaaaaaaaaaaaaaaaaaaaaaaaaaaaa

SEQ ID NO: 12869 - RNA, 5785 nt, synthetic construct
  source 1..5785: mol_type = other RNA
aggaaataagagagaaaagaagagtaagaagaaatataagagccaccatggcccctaagaagaagcgtaaagtgagccggatggaacgcctcgtctacgaggtgcggcagaagtgcagaaacatcgaggacatctgcatctcctgcggatctctgaacgtgaccctggagcacccactgttcatcggcggcatgtgccagaactgtaaaaactgttttctggagtgtgcctatcaatacgacgatgacggctaccagagctactgcaccatctgttgcggcggaagagaggtgctgatgtgtggaaataacaactgctgccggtgcttctgcgtggaatgcgtggacctgctggtgggccccggcgccgcccaggccgctattaaggaagatccttggaactgctacatgtgcggccacaagggcacatacggcctgctgagacggagagaggactggcctagcagactgcagatgttcttcgccaataaccacgaccaggagttcgacccccctaaggtgtaccctcccgtccccgccgagaagagaaagcccatccgggtcctgagcctgttcgatggcatcgccaccggtctgctggtgctgaaggacctgggcatccaggtggataggtacattgcctccgaggtgtgcgaggactccatcaccgtgggaatggtgcgtcatcagggcaagatcatgtacgtgggcgacgtgcggagcgtgacacagaagcatatccaggagtggggccctttcgacctggtgatcggcggcagcccttgcaatgacctgagcatcgtgaacccagcccggaagggcctgtacgagggaaccggcagactgttcttcgagttttacagactgctgcacgacgcccggcctaaggaaggcgacgaccggcccttcttttggctgttcgagaatgtggtggccatgggagtcagcgacaagcgggatattagccggttcctggagagcaaccccgtgatgatcgatgccaaggaagtgagcgccgcccaccgggccagatacttctggggcaatctgcctggcatgaacagacccctggccagcaccgtgaacgacaagctggagctgcaggagtgcctggagcacggccggatcgccaagttcagcaaggtgagaaccatcaccacccgaagcaacagcatcaaacaaggcaaggaccagcactttcctgtgttcatgaacgagaaggaggacatcctgtggtgtaccgagatggagagagtgttcgggttcccagtccactacacagatgtcagcaacatgtctagactggccagacagagactgctgggaagaagctggtccgtccctgtgatcagacacctgttcgcccctctgaaggagtacttcgcctgcgtgagcagcggcaacagcaacgccaacagccggggccccagcttctctagcggcctggtgccactgtccctgagagggagccacatgggccccatggagatctacaaaaccgtgagcgcctggaagcggcagcctgtgcgcgtgctgagcctgtttcggaatatcgataaagtcctgaaaagcctgggattcctggagagcggctctggctccggcggtggcaccctgaagtacgtggaggatgtgacaaacgtggtcagacgggatgtggagaagtggggccccttcgatctggtgtacggcagcacccaacccctgggcagctcttgtgaccggtgccctggctggtacatgtttcagttccaccggatcctgcagtacgccctgccgagacaggagtcccagcggccattcttttggattttcatggacaacttgctgctgaccgaggatgaccaggaaactaccactcggttcctgcagaccgaagccgtgaccctgcaggacgtgagaggccgggactaccagaacgccatgcgggtgtggtccaacatccctggactgaaaagcaagcacgcacctctgacccctaaagaagaggagtacctgcaggcccaggtgcggagcagaagcaagctggacgcccctaaggtggatctgctggtgaagaattgcctcctgcccctgagagagtacttcaagtatttcagccagaatagtctgcccctgggaggcagcggcggcggcctgaagggcctggtgaccttcgaggacgtggccgtggagttcacccaggaggagtgggccctgctggaccccgcccagaggaccctgtacagggacgtgatgctggagaacttcaggaacctggccagcctgggcaaccaggtggacaagcccggcctgatcagccagctggagcaggaggacaaggtgatgaccgaggagaggggcatcttccccggcgcctgccccgacgtggagaaccccggcggcccaagcagcggcgcccctcctcccagcggcggcagcccagccggctccccaacctctaccgaggagggcacctctgagtccgccacccccgagagcggccctggcacctccaccgagcccagcgagggcagcgcacccggcagccctgccggcagccccacctccacagaggagggaaccagcaccgagcccagcgaaggcagcgccccaggcaccagcaccgagcctagtgagcaggagattaaacggatcaacaagatcagaagaagacttgtgaaagacagcaacaccaagaaggccggcaagacaggccccatgaaaaccctgctggttagagtgatgacacccgatctgagagagcggctggaaaacctgagaaagaagcctgaaaatatcccccagcccatcagcaatacatctagagccaacctgaataagctgctgaccgattacaccgaaatgaagaaggcgatcctgcatgtgtactgggaagagttccagaaggaccctgtgggcctgatgagccgggtggcccagcctgccagcaagaagatcgatcagaacaagctgaaacctgagatggacgagaagggcaacctgaccaccgccggctttgcctgctctcagtgtggccagcccctgttcgtgtacaagctggagcaggtgtctgagaagggcaaggcttacaccaactacttcggacggtgcaatgtggccgagcacgaaaagctgatcctgctggcccagctgaagcccgagaaggatagcgacgaagccgtgacatatagcctgggaaagtttgggcagagggccctggatttctacagcattcatgtgaccaaggagtccacccaccccgtgaagcccctggcccagatcgccggaaacagatacgcctccggacctgtgggaaaggccctgagcgacgcatgtatgggcacaatcgcctccttcctgtctaagtaccaggacatcatcatcgaacaccagaaggtggtgaagggcaaccagaagagactggagagcctgcgggagctggccggcaaggaaaacctggaataccctagcgtgaccctgccacctcagcctcacaccaaggagggcgttgatgcctacaacgaagtgatcgcccgggtgcgaatgtgggtgaacctgaacctgtggcagaagctgaagctaagcagagatgatgccaagcctctgctgagactgaagggattcccttcctttcctctggtcgagagacaggccaacgaagtggactggtgggacatggtgtgtaacgtgaagaagctgatcaacgagaaaaaggaggatggcaaggtgttttggcagaatctggctggctacaagagacaggaagccctgagaccatacctgagcagcgaggaagatcggaagaagggaaagaaattcgctcggtaccagctgggcgacctgctgctgcacctggaaaagaagcacggcgaggactggggaaaggtgtacgacgaggcctgggagcggattgacaagaaagtggaaggcctgagcaagcacatcaagctggaagaggaacggagaagcgaggacgcccagagcaaggccgccctgaccgactggctgcgggctaaggccagcttcgtgatcgagggcctgaaggaggccgacaaggacgagttctgcagatgcgagctgaagctgcagaagtggtacggggacctgcggggaaagcccttcgccatcgaagccgagaacagcatcctggacatcagcggcttcagcaagcagtacaactgtgccttcatctggcagaaggacggcgtgaagaagctgaacctgtacctgatcatcaactacttcaagggcggcaagctgcggttcaagaagatcaaacctgaagccttcgaagccaacagattctacaccgtgatcaacaaaaagagcggcgagatcgtgcccatggaggtgaacttcaacttcgacgaccccaacctgatcatcctgcctctggcctttggcaagagacagggcagagaattcatctggaacgacctgctgtccctggaaaccggcagcctgaagctggccaacggaagagtgatcgagaagacactgtacaacagaagaacccggcaggatgagcctgccctgttcgtggccctgaccttcgagcggcgggaggtcctggactcctccaatatcaaaccaatgaacctgatcggcgtggcaagaggcgaaaacatccccgccgtgatcgccctgaccgaccccgagggctgcccactgagccggtttaaggatagcctgggaaacccaacccacatcctgagaatcggcgagagctataaggagaagcagcggaccatccaggccaagaaggaggtggagcagcggagagccggcggctacagccggaagtacgccagcaaagccaagaatctggcagacgatatggtgagaaacaccgctagagatctgctgtactacgccgtgacccaggatgccatgctgatcttcgccaacctgagccggggcttcggccggcagggcaagcggaccttcatggccgagagacagtacacacggatggaggactggctgaccgccaagctggcctacgagggcctgagcaagacctacctgtccaagacactggcccagtacacctccaagacatgcagcaactgtgggtttaccatcaccagcgccgactacgacagggtgctggagaagctgaagaagacagcaacaggctggatgaccacaattaacggcaaggagctgaaggtggagggccagattacctactacaacagatacaagagacagaacgtagtcaaggacctgtccgtcgagctggatagactgagcgaagaatctgtgaacaacgacatctcctcctggacaaagggcagaagcggagaagctctgagcctcctgaagaaaagattctcccatagacccgtgcaggagaagttcgtgtgcctgaactgcggcttcgagacacacgcagccgagcaagccgccctgaacatcgccagatcctggctgttcctgcggagccaggagtacaagaaataccagacaaacaagacaaccggcaacaccgataagagagccttcgtcgagacctggcagtccttttaccggaagaagcttaaggaggtgtggaaacctgccgtgcggtctggcggatctggcggaggctccaccagccccaagaaaaagagaaaagtctaagctgccttctgcggggcttgccttctggccatgcccttcttctctcccttgcacctgtacctcttggtctttgaataaagcctgagtaggaaggctagcaaaaaaaaaaaaaaaaaaaaaaaaaaaaaaaaaaaaaaaaaaaaaaaaaaaaaaaaaaaaaaaaaaaaaaaaaaaaaaaa

SEQ ID NO: 12870 - RNA, 5785 nt, synthetic construct
  source 1..5785: mol_type = other RNA
aggaaataagagagaaaagaagagtaagaagaaatataagagccaccatggcccctaagaagaagcgtaaagtgagccggatggaacgcctcgtctacgaggtgcggcagaagtgcagaaacatcgaggacatctgcatctcctgcggatctctgaacgtgaccctggagcacccactgttcatcggcggcatgtgccagaactgtaaaaactgttttctggagtgtgcctatcaatacgacgatgacggctaccagagctactgcaccatctgttgcggcggaagagaggtgctgatgtgtggaaataacaactgctgccggtgcttctgcgtggaatgcgtggacctgctggtgggccccggcgccgcccaggccgctattaaggaagatccttggaactgctacatgtgcggccacaagggcacatacggcctgctgagacggagagaggactggcctagcagactgcagatgttcttcgccaataaccacgaccaggagttcgacccccctaaggtgtaccctcccgtccccgccgagaagagaaagcccatccgggtcctgagcctgttcgatggcatcgccaccggtctgctggtgctgaaggacctgggcatccaggtggataggtacattgcctccgaggtgtgcgaggactccatcaccgtgggaatggtgcgtcatcagggcaagatcatgtacgtgggcgacgtgcggagcgtgacacagaagcatatccaggagtggggccctttcgacctggtgatcggcggcagcccttgcaatgacctgagcatcgtgaacccagcccggaagggcctgtacgagggaaccggcagactgttcttcgagttttacagactgctgcacgacgcccggcctaaggaaggcgacgaccggcccttcttttggctgttcgagaatgtggtggccatgggagtcagcgacaagcgggatattagccggttcctggagagcaaccccgtgatgatcgatgccaaggaagtgagcgccgcccaccgggccagatacttctggggcaatctgcctggcatgaacagacccctggccagcaccgtgaacgacaagctggagctgcaggagtgcctggagcacggccggatcgccaagttcagcaaggtgagaaccatcaccacccgaagcaacagcatcaaacaaggcaaggaccagcactttcctgtgttcatgaacgagaaggaggacatcctgtggtgtaccgagatggagagagtgttcgggttcccagtccactacacagatgtcagcaacatgtctagactggccagacagagactgctgggaagaagctggtccgtccctgtgatcagacacctgttcgcccctctgaaggagtacttcgcctgcgtgagcagcggcaacagcaacgccaacagccggggccccagcttctctagcggcctggtgccactgtccctgagagggagccacatgggccccatggagatctacaaaaccgtgagcgcctggaagcggcagcctgtgcgcgtgctgagcctgtttcggaatatcgataaagtcctgaaaagcctgggattcctggagagcggctctggctccggcggtggcaccctgaagtacgtggaggatgtgacaaacgtggtcagacgggatgtggagaagtggggccccttcgatctggtgtacggcagcacccaacccctgggcagctcttgtgaccggtgccctggctggtacatgtttcagttccaccggatcctgcagtacgccctgccgagacaggagtcccagcggccattcttttggattttcatggacaacttgctgctgaccgaggatgaccaggaaactaccactcggttcctgcagaccgaagccgtgaccctgcaggacgtgagaggccgggactaccagaacgccatgcgggtgtggtccaacatccctggactgaaaagcaagcacgcacctctgacccctaaagaagaggagtacctgcaggcccaggtgcggagcagaagcaagctggacgcccctaaggtggatctgctggtgaagaattgcctcctgcccctgagagagtacttcaagtatttcagccagaatagtctgcccctgggaggcagcggcggcggcgacaagaccatcatcgccttcggcgacgtggccgtggccttcaccgagagggagtggaagctgctgagccccgcccagaggaccctgtacagggacgtgatgctggagacctacagccacctggtgagcctgggcatcgccttcagcaagcccaagttcatcacccagctggagcagggcgacgagccctggagggaggagagcgagtgcctgctggagctgtgccccgagcccaggaccgagggcggcccaagcagcggcgcccctcctcccagcggcggcagcccagccggctccccaacctctaccgaggagggcacctctgagtccgccacccccgagagcggccctggcacctccaccgagcccagcgagggcagcgcacccggcagccctgccggcagccccacctccacagaggagggaaccagcaccgagcccagcgaaggcagcgccccaggcaccagcaccgagcctagtgagcaggagattaaacggatcaacaagatcagaagaagacttgtgaaagacagcaacaccaagaaggccggcaagacaggccccatgaaaaccctgctggttagagtgatgacacccgatctgagagagcggctggaaaacctgagaaagaagcctgaaaatatcccccagcccatcagcaatacatctagagccaacctgaataagctgctgaccgattacaccgaaatgaagaaggcgatcctgcatgtgtactgggaagagttccagaaggaccctgtgggcctgatgagccgggtggcccagcctgccagcaagaagatcgatcagaacaagctgaaacctgagatggacgagaagggcaacctgaccaccgccggctttgcctgctctcagtgtggccagcccctgttcgtgtacaagctggagcaggtgtctgagaagggcaaggcttacaccaactacttcggacggtgcaatgtggccgagcacgaaaagctgatcctgctggcccagctgaagcccgagaaggatagcgacgaagccgtgacatatagcctgggaaagtttgggcagagggccctggatttctacagcattcatgtgaccaaggagtccacccaccccgtgaagcccctggcccagatcgccggaaacagatacgcctccggacctgtgggaaaggccctgagcgacgcatgtatgggcacaatcgcctccttcctgtctaagtaccaggacatcatcatcgaacaccagaaggtggtgaagggcaaccagaagagactggagagcctgcgggagctggccggcaaggaaaacctggaataccctagcgtgaccctgccacctcagcctcacaccaaggagggcgttgatgcctacaacgaagtgatcgcccgggtgcgaatgtgggtgaacctgaacctgtggcagaagctgaagctaagcagagatgatgccaagcctctgctgagactgaagggattcccttcctttcctctggtcgagagacaggccaacgaagtggactggtgggacatggtgtgtaacgtgaagaagctgatcaacgagaaaaaggaggatggcaaggtgttttggcagaatctggctggctacaagagacaggaagccctgagaccatacctgagcagcgaggaagatcggaagaagggaaagaaattcgctcggtaccagctgggcgacctgctgctgcacctggaaaagaagcacggcgaggactggggaaaggtgtacgacgaggcctgggagcggattgacaagaaagtggaaggcctgagcaagcacatcaagctggaagaggaacggagaagcgaggacgcccagagcaaggccgccctgaccgactggctgcgggctaaggccagcttcgtgatcgagggcctgaaggaggccgacaaggacgagttctgcagatgcgagctgaagctgcagaagtggtacggggacctgcggggaaagcccttcgccatcgaagccgagaacagcatcctggacatcagcggcttcagcaagcagtacaactgtgccttcatctggcagaaggacggcgtgaagaagctgaacctgtacctgatcatcaactacttcaagggcggcaagctgcggttcaagaagatcaaacctgaagccttcgaagccaacagattctacaccgtgatcaacaaaaagagcggcgagatcgtgcccatggaggtgaacttcaacttcgacgaccccaacctgatcatcctgcctctggcctttggcaagagacagggcagagaattcatctggaacgacctgctgtccctggaaaccggcagcctgaagctggccaacggaagagtgatcgagaagacactgtacaacagaagaacccggcaggatgagcctgccctgttcgtggccctgaccttcgagcggcgggaggtcctggactcctccaatatcaaaccaatgaacctgatcggcgtggcaagaggcgaaaacatccccgccgtgatcgccctgaccgaccccgagggctgcccactgagccggtttaaggatagcctgggaaacccaacccacatcctgagaatcggcgagagctataaggagaagcagcggaccatccaggccaagaaggaggtggagcagcggagagccggcggctacagccggaagtacgccagcaaagccaagaatctggcagacgatatggtgagaaacaccgctagagatctgctgtactacgccgtgacccaggatgccatgctgatcttcgccaacctgagccggggcttcggccggcagggcaagcggaccttcatggccgagagacagtacacacggatggaggactggctgaccgccaagctggcctacgagggcctgagcaagacctacctgtccaagacactggcccagtacacctccaagacatgcagcaactgtgggtttaccatcaccagcgccgactacgacagggtgctggagaagctgaagaagacagcaacaggctggatgaccacaattaacggcaaggagctgaaggtggagggccagattacctactacaacagatacaagagacagaacgtagtcaaggacctgtccgtcgagctggatagactgagcgaagaatctgtgaacaacgacatctcctcctggacaaagggcagaagcggagaagctctgagcctcctgaagaaaagattctcccatagacccgtgcaggagaagttcgtgtgcctgaactgcggcttcgagacacacgcagccgagcaagccgccctgaacatcgccagatcctggctgttcctgcggagccaggagtacaagaaataccagacaaacaagacaaccggcaacaccgataagagagccttcgtcgagacctggcagtccttttaccggaagaagcttaaggaggtgtggaaacctgccgtgcggtctggcggatctggcggaggctccaccagccccaagaaaaagagaaaagtctaagctgccttctgcggggcttgccttctggccatgcccttcttctctcccttgcacctgtacctcttggtctttgaataaagcctgagtaggaaggctagcaaaaaaaaaaaaaaaaaaaaaaaaaaaaaaaaaaaaaaaaaaaaaaaaaaaaaaaaaaaaaaaaaaaaaaaaaaaaaaaa

SEQ ID NO: 12871 - RNA, 5785 nt, synthetic construct
  source 1..5785: mol_type = other RNA
aggaaataagagagaaaagaagagtaagaagaaatataagagccaccatggcccctaagaagaagcgtaaagtgagccggatggaacgcctcgtctacgaggtgcggcagaagtgcagaaacatcgaggacatctgcatctcctgcggatctctgaacgtgaccctggagcacccactgttcatcggcggcatgtgccagaactgtaaaaactgttttctggagtgtgcctatcaatacgacgatgacggctaccagagctactgcaccatctgttgcggcggaagagaggtgctgatgtgtggaaataacaactgctgccggtgcttctgcgtggaatgcgtggacctgctggtgggccccggcgccgcccaggccgctattaaggaagatccttggaactgctacatgtgcggccacaagggcacatacggcctgctgagacggagagaggactggcctagcagactgcagatgttcttcgccaataaccacgaccaggagttcgacccccctaaggtgtaccctcccgtccccgccgagaagagaaagcccatccgggtcctgagcctgttcgatggcatcgccaccggtctgctggtgctgaaggacctgggcatccaggtggataggtacattgcctccgaggtgtgcgaggactccatcaccgtgggaatggtgcgtcatcagggcaagatcatgtacgtgggcgacgtgcggagcgtgacacagaagcatatccaggagtggggccctttcgacctggtgatcggcggcagcccttgcaatgacctgagcatcgtgaacccagcccggaagggcctgtacgagggaaccggcagactgttcttcgagttttacagactgctgcacgacgcccggcctaaggaaggcgacgaccggcccttcttttggctgttcgagaatgtggtggccatgggagtcagcgacaagcgggatattagccggttcctggagagcaaccccgtgatgatcgatgccaaggaagtgagcgccgcccaccgggccagatacttctggggcaatctgcctggcatgaacagacccctggccagcaccgtgaacgacaagctggagctgcaggagtgcctggagcacggccggatcgccaagttcagcaaggtgagaaccatcaccacccgaagcaacagcatcaaacaaggcaaggaccagcactttcctgtgttcatgaacgagaaggaggacatcctgtggtgtaccgagatggagagagtgttcgggttcccagtccactacacagatgtcagcaacatgtctagactggccagacagagactgctgggaagaagctggtccgtccctgtgatcagacacctgttcgcccctctgaaggagtacttcgcctgcgtgagcagcggcaacagcaacgccaacagccggggccccagcttctctagcggcctggtgccactgtccctgagagggagccacatgggccccatggagatctacaaaaccgtgagcgcctggaagcggcagcctgtgcgcgtgctgagcctgtttcggaatatcgataaagtcctgaaaagcctgggattcctggagagcggctctggctccggcggtggcaccctgaagtacgtggaggatgtgacaaacgtggtcagacgggatgtggagaagtggggccccttcgatctggtgtacggcagcacccaacccctgggcagctcttgtgaccggtgccctggctggtacatgtttcagttccaccggatcctgcagtacgccctgccgagacaggagtcccagcggccattcttttggattttcatggacaacttgctgctgaccgaggatgaccaggaaactaccactcggttcctgcagaccgaagccgtgaccctgcaggacgtgagaggccgggactaccagaacgccatgcgggtgtggtccaacatccctggactgaaaagcaagcacgcacctctgacccctaaagaagaggagtacctgcaggcccaggtgcggagcagaagcaagctggacgcccctaaggtggatctgctggtgaagaattgcctcctgcccctgagagagtacttcaagtatttcagccagaatagtctgcccctgggaggcagcggcggcggcggcaagatgcccgtgaccttcgaggacgtggccgtgtacttcagccccgaggagtgggccgagctggccggctggcagaggaggctgtacagggaggtgatgctggagaactaccaggccgtggccagcctgggctggcccgccgtgaagcccgagatcatctgcaagatggagagggaggagatgccctgcatgcccgccccccccagggccaggtggaggcacaggacccccgtgcccgccggcggcccaagcagcggcgcccctcctcccagcggcggcagcccagccggctccccaacctctaccgaggagggcacctctgagtccgccacccccgagagcggccctggcacctccaccgagcccagcgagggcagcgcacccggcagccctgccggcagccccacctccacagaggagggaaccagcaccgagcccagcgaaggcagcgccccaggcaccagcaccgagcctagtgagcaggagattaaacggatcaacaagatcagaagaagacttgtgaaagacagcaacaccaagaaggccggcaagacaggccccatgaaaaccctgctggttagagtgatgacacccgatctgagagagcggctggaaaacctgagaaagaagcctgaaaatatcccccagcccatcagcaatacatctagagccaacctgaataagctgctgaccgattacaccgaaatgaagaaggcgatcctgcatgtgtactgggaagagttccagaaggaccctgtgggcctgatgagccgggtggcccagcctgccagcaagaagatcgatcagaacaagctgaaacctgagatggacgagaagggcaacctgaccaccgccggctttgcctgctctcagtgtggccagcccctgttcgtgtacaagctggagcaggtgtctgagaagggcaaggcttacaccaactacttcggacggtgcaatgtggccgagcacgaaaagctgatcctgctggcccagctgaagcccgagaaggatagcgacgaagccgtgacatatagcctgggaaagtttgggcagagggccctggatttctacagcattcatgtgaccaaggagtccacccaccccgtgaagcccctggcccagatcgccggaaacagatacgcctccggacctgtgggaaaggccctgagcgacgcatgtatgggcacaatcgcctccttcctgtctaagtaccaggacatcatcatcgaacaccagaaggtggtgaagggcaaccagaagagactggagagcctgcgggagctggccggcaaggaaaacctggaataccctagcgtgaccctgccacctcagcctcacaccaaggagggcgttgatgcctacaacgaagtgatcgcccgggtgcgaatgtgggtgaacctgaacctgtggcagaagctgaagctaagcagagatgatgccaagcctctgctgagactgaagggattcccttcctttcctctggtcgagagacaggccaacgaagtggactggtgggacatggtgtgtaacgtgaagaagctgatcaacgagaaaaaggaggatggcaaggtgttttggcagaatctggctggctacaagagacaggaagccctgagaccatacctgagcagcgaggaagatcggaagaagggaaagaaattcgctcggtaccagctgggcgacctgctgctgcacctggaaaagaagcacggcgaggactggggaaaggtgtacgacgaggcctgggagcggattgacaagaaagtggaaggcctgagcaagcacatcaagctggaagaggaacggagaagcgaggacgcccagagcaaggccgccctgaccgactggctgcgggctaaggccagcttcgtgatcgagggcctgaaggaggccgacaaggacgagttctgcagatgcgagctgaagctgcagaagtggtacggggacctgcggggaaagcccttcgccatcgaagccgagaacagcatcctggacatcagcggcttcagcaagcagtacaactgtgccttcatctggcagaaggacggcgtgaagaagctgaacctgtacctgatcatcaactacttcaagggcggcaagctgcggttcaagaagatcaaacctgaagccttcgaagccaacagattctacaccgtgatcaacaaaaagagcggcgagatcgtgcccatggaggtgaacttcaacttcgacgaccccaacctgatcatcctgcctctggcctttggcaagagacagggcagagaattcatctggaacgacctgctgtccctggaaaccggcagcctgaagctggccaacggaagagtgatcgagaagacactgtacaacagaagaacccggcaggatgagcctgccctgttcgtggccctgaccttcgagcggcgggaggtcctggactcctccaatatcaaaccaatgaacctgatcggcgtggcaagaggcgaaaacatccccgccgtgatcgccctgaccgaccccgagggctgcccactgagccggtttaaggatagcctgggaaacccaacccacatcctgagaatcggcgagagctataaggagaagcagcggaccatccaggccaagaaggaggtggagcagcggagagccggcggctacagccggaagtacgccagcaaagccaagaatctggcagacgatatggtgagaaacaccgctagagatctgctgtactacgccgtgacccaggatgccatgctgatcttcgccaacctgagccggggcttcggccggcagggcaagcggaccttcatggccgagagacagtacacacggatggaggactggctgaccgccaagctggcctacgagggcctgagcaagacctacctgtccaagacactggcccagtacacctccaagacatgcagcaactgtgggtttaccatcaccagcgccgactacgacagggtgctggagaagctgaagaagacagcaacaggctggatgaccacaattaacggcaaggagctgaaggtggagggccagattacctactacaacagatacaagagacagaacgtagtcaaggacctgtccgtcgagctggatagactgagcgaagaatctgtgaacaacgacatctcctcctggacaaagggcagaagcggagaagctctgagcctcctgaagaaaagattctcccatagacccgtgcaggagaagttcgtgtgcctgaactgcggcttcgagacacacgcagccgagcaagccgccctgaacatcgccagatcctggctgttcctgcggagccaggagtacaagaaataccagacaaacaagacaaccggcaacaccgataagagagccttcgtcgagacctggcagtccttttaccggaagaagcttaaggaggtgtggaaacctgccgtgcggtctggcggatctggcggaggctccaccagccccaagaaaaagagaaaagtctaagctgccttctgcggggcttgccttctggccatgcccttcttctctcccttgcacctgtacctcttggtctttgaataaagcctgagtaggaaggctagcaaaaaaaaaaaaaaaaaaaaaaaaaaaaaaaaaaaaaaaaaaaaaaaaaaaaaaaaaaaaaaaaaaaaaaaaaaaaaaaa

SEQ ID NO: 12872 - RNA, 5785 nt, synthetic construct
  source 1..5785: mol_type = other RNA
aggaaataagagagaaaagaagagtaagaagaaatataagagccaccatggcccctaagaagaagcgtaaagtgagccggatggaacgcctcgtctacgaggtgcggcagaagtgcagaaacatcgaggacatctgcatctcctgcggatctctgaacgtgaccctggagcacccactgttcatcggcggcatgtgccagaactgtaaaaactgttttctggagtgtgcctatcaatacgacgatgacggctaccagagctactgcaccatctgttgcggcggaagagaggtgctgatgtgtggaaataacaactgctgccggtgcttctgcgtggaatgcgtggacctgctggtgggccccggcgccgcccaggccgctattaaggaagatccttggaactgctacatgtgcggccacaagggcacatacggcctgctgagacggagagaggactggcctagcagactgcagatgttcttcgccaataaccacgaccaggagttcgacccccctaaggtgtaccctcccgtccccgccgagaagagaaagcccatccgggtcctgagcctgttcgatggcatcgccaccggtctgctggtgctgaaggacctgggcatccaggtggataggtacattgcctccgaggtgtgcgaggactccatcaccgtgggaatggtgcgtcatcagggcaagatcatgtacgtgggcgacgtgcggagcgtgacacagaagcatatccaggagtggggccctttcgacctggtgatcggcggcagcccttgcaatgacctgagcatcgtgaacccagcccggaagggcctgtacgagggaaccggcagactgttcttcgagttttacagactgctgcacgacgcccggcctaaggaaggcgacgaccggcccttcttttggctgttcgagaatgtggtggccatgggagtcagcgacaagcgggatattagccggttcctggagagcaaccccgtgatgatcgatgccaaggaagtgagcgccgcccaccgggccagatacttctggggcaatctgcctggcatgaacagacccctggccagcaccgtgaacgacaagctggagctgcaggagtgcctggagcacggccggatcgccaagttcagcaaggtgagaaccatcaccacccgaagcaacagcatcaaacaaggcaaggaccagcactttcctgtgttcatgaacgagaaggaggacatcctgtggtgtaccgagatggagagagtgttcgggttcccagtccactacacagatgtcagcaacatgtctagactggccagacagagactgctgggaagaagctggtccgtccctgtgatcagacacctgttcgcccctctgaaggagtacttcgcctgcgtgagcagcggcaacagcaacgccaacagccggggccccagcttctctagcggcctggtgccactgtccctgagagggagccacatgggccccatggagatctacaaaaccgtgagcgcctggaagcggcagcctgtgcgcgtgctgagcctgtttcggaatatcgataaagtcctgaaaagcctgggattcctggagagcggctctggctccggcggtggcaccctgaagtacgtggaggatgtgacaaacgtggtcagacgggatgtggagaagtggggccccttcgatctggtgtacggcagcacccaacccctgggcagctcttgtgaccggtgccctggctggtacatgtttcagttccaccggatcctgcagtacgccctgccgagacaggagtcccagcggccattcttttggattttcatggacaacttgctgctgaccgaggatgaccaggaaactaccactcggttcctgcagaccgaagccgtgaccctgcaggacgtgagaggccgggactaccagaacgccatgcgggtgtggtccaacatccctggactgaaaagcaagcacgcacctctgacccctaaagaagaggagtacctgcaggcccaggtgcggagcagaagcaagctggacgcccctaaggtggatctgctggtgaagaattgcctcctgcccctgagagagtacttcaagtatttcagccagaatagtctgcccctgggaggcagcggcggcggccagtgcggcctgctgaccttcggcgacgtggccatcgagttcagccaggaggagtggaggtgcctgagccacacccagagggagctgtacagggacgtgatgctggagaactacggccacctgctgttcctgggcctgatcgtgagcaagcccgacctggtgagcctgctggagcagagcaaggagccctgggacgtgaggaggaagaagacccagaggcccagcgtgctgatgggccacgtgggcggcccaagcagcggcgcccctcctcccagcggcggcagcccagccggctccccaacctctaccgaggagggcacctctgagtccgccacccccgagagcggccctggcacctccaccgagcccagcgagggcagcgcacccggcagccctgccggcagccccacctccacagaggagggaaccagcaccgagcccagcgaaggcagcgccccaggcaccagcaccgagcctagtgagcaggagattaaacggatcaacaagatcagaagaagacttgtgaaagacagcaacaccaagaaggccggcaagacaggccccatgaaaaccctgctggttagagtgatgacacccgatctgagagagcggctggaaaacctgagaaagaagcctgaaaatatcccccagcccatcagcaatacatctagagccaacctgaataagctgctgaccgattacaccgaaatgaagaaggcgatcctgcatgtgtactgggaagagttccagaaggaccctgtgggcctgatgagccgggtggcccagcctgccagcaagaagatcgatcagaacaagctgaaacctgagatggacgagaagggcaacctgaccaccgccggctttgcctgctctcagtgtggccagcccctgttcgtgtacaagctggagcaggtgtctgagaagggcaaggcttacaccaactacttcggacggtgcaatgtggccgagcacgaaaagctgatcctgctggcccagctgaagcccgagaaggatagcgacgaagccgtgacatatagcctgggaaagtttgggcagagggccctggatttctacagcattcatgtgaccaaggagtccacccaccccgtgaagcccctggcccagatcgccggaaacagatacgcctccggacctgtgggaaaggccctgagcgacgcatgtatgggcacaatcgcctccttcctgtctaagtaccaggacatcatcatcgaacaccagaaggtggtgaagggcaaccagaagagactggagagcctgcgggagctggccggcaaggaaaacctggaataccctagcgtgaccctgccacctcagcctcacaccaaggagggcgttgatgcctacaacgaagtgatcgcccgggtgcgaatgtgggtgaacctgaacctgtggcagaagctgaagctaagcagagatgatgccaagcctctgctgagactgaagggattcccttcctttcctctggtcgagagacaggccaacgaagtggactggtgggacatggtgtgtaacgtgaagaagctgatcaacgagaaaaaggaggatggcaaggtgttttggcagaatctggctggctacaagagacaggaagccctgagaccatacctgagcagcgaggaagatcggaagaagggaaagaaattcgctcggtaccagctgggcgacctgctgctgcacctggaaaagaagcacggcgaggactggggaaaggtgtacgacgaggcctgggagcggattgacaagaaagtggaaggcctgagcaagcacatcaagctggaagaggaacggagaagcgaggacgcccagagcaaggccgccctgaccgactggctgcgggctaaggccagcttcgtgatcgagggcctgaaggaggccgacaaggacgagttctgcagatgcgagctgaagctgcagaagtggtacggggacctgcggggaaagcccttcgccatcgaagccgagaacagcatcctggacatcagcggcttcagcaagcagtacaactgtgccttcatctggcagaaggacggcgtgaagaagctgaacctgtacctgatcatcaactacttcaagggcggcaagctgcggttcaagaagatcaaacctgaagccttcgaagccaacagattctacaccgtgatcaacaaaaagagcggcgagatcgtgcccatggaggtgaacttcaacttcgacgaccccaacctgatcatcctgcctctggcctttggcaagagacagggcagagaattcatctggaacgacctgctgtccctggaaaccggcagcctgaagctggccaacggaagagtgatcgagaagacactgtacaacagaagaacccggcaggatgagcctgccctgttcgtggccctgaccttcgagcggcgggaggtcctggactcctccaatatcaaaccaatgaacctgatcggcgtggcaagaggcgaaaacatccccgccgtgatcgccctgaccgaccccgagggctgcccactgagccggtttaaggatagcctgggaaacccaacccacatcctgagaatcggcgagagctataaggagaagcagcggaccatccaggccaagaaggaggtggagcagcggagagccggcggctacagccggaagtacgccagcaaagccaagaatctggcagacgatatggtgagaaacaccgctagagatctgctgtactacgccgtgacccaggatgccatgctgatcttcgccaacctgagccggggcttcggccggcagggcaagcggaccttcatggccgagagacagtacacacggatggaggactggctgaccgccaagctggcctacgagggcctgagcaagacctacctgtccaagacactggcccagtacacctccaagacatgcagcaactgtgggtttaccatcaccagcgccgactacgacagggtgctggagaagctgaagaagacagcaacaggctggatgaccacaattaacggcaaggagctgaaggtggagggccagattacctactacaacagatacaagagacagaacgtagtcaaggacctgtccgtcgagctggatagactgagcgaagaatctgtgaacaacgacatctcctcctggacaaagggcagaagcggagaagctctgagcctcctgaagaaaagattctcccatagacccgtgcaggagaagttcgtgtgcctgaactgcggcttcgagacacacgcagccgagcaagccgccctgaacatcgccagatcctggctgttcctgcggagccaggagtacaagaaataccagacaaacaagacaaccggcaacaccgataagagagccttcgtcgagacctggcagtccttttaccggaagaagcttaaggaggtgtggaaacctgccgtgcggtctggcggatctggcggaggctccaccagccccaagaaaaagagaaaagtctaagctgccttctgcggggcttgccttctggccatgcccttcttctctcccttgcacctgtacctcttggtctttgaataaagcctgagtaggaaggctagcaaaaaaaaaaaaaaaaaaaaaaaaaaaaaaaaaaaaaaaaaaaaaaaaaaaaaaaaaaaaaaaaaaaaaaaaaaaaaaaa

SEQ ID NO: 12873 - RNA, 5785 nt, synthetic construct
  source 1..5785: mol_type = other RNA
aggaaataagagagaaaagaagagtaagaagaaatataagagccaccatggcccctaagaagaagcgtaaagtgagccggatggaacgcctcgtctacgaggtgcggcagaagtgcagaaacatcgaggacatctgcatctcctgcggatctctgaacgtgaccctggagcacccactgttcatcggcggcatgtgccagaactgtaaaaactgttttctggagtgtgcctatcaatacgacgatgacggctaccagagctactgcaccatctgttgcggcggaagagaggtgctgatgtgtggaaataacaactgctgccggtgcttctgcgtggaatgcgtggacctgctggtgggccccggcgccgcccaggccgctattaaggaagatccttggaactgctacatgtgcggccacaagggcacatacggcctgctgagacggagagaggactggcctagcagactgcagatgttcttcgccaataaccacgaccaggagttcgacccccctaaggtgtaccctcccgtccccgccgagaagagaaagcccatccgggtcctgagcctgttcgatggcatcgccaccggtctgctggtgctgaaggacctgggcatccaggtggataggtacattgcctccgaggtgtgcgaggactccatcaccgtgggaatggtgcgtcatcagggcaagatcatgtacgtgggcgacgtgcggagcgtgacacagaagcatatccaggagtggggccctttcgacctggtgatcggcggcagcccttgcaatgacctgagcatcgtgaacccagcccggaagggcctgtacgagggaaccggcagactgttcttcgagttttacagactgctgcacgacgcccggcctaaggaaggcgacgaccggcccttcttttggctgttcgagaatgtggtggccatgggagtcagcgacaagcgggatattagccggttcctggagagcaaccccgtgatgatcgatgccaaggaagtgagcgccgcccaccgggccagatacttctggggcaatctgcctggcatgaacagacccctggccagcaccgtgaacgacaagctggagctgcaggagtgcctggagcacggccggatcgccaagttcagcaaggtgagaaccatcaccacccgaagcaacagcatcaaacaaggcaaggaccagcactttcctgtgttcatgaacgagaaggaggacatcctgtggtgtaccgagatggagagagtgttcgggttcccagtccactacacagatgtcagcaacatgtctagactggccagacagagactgctgggaagaagctggtccgtccctgtgatcagacacctgttcgcccctctgaaggagtacttcgcctgcgtgagcagcggcaacagcaacgccaacagccggggccccagcttctctagcggcctggtgccactgtccctgagagggagccacatgggccccatggagatctacaaaaccgtgagcgcctggaagcggcagcctgtgcgcgtgctgagcctgtttcggaatatcgataaagtcctgaaaagcctgggattcctggagagcggctctggctccggcggtggcaccctgaagtacgtggaggatgtgacaaacgtggtcagacgggatgtggagaagtggggccccttcgatctggtgtacggcagcacccaacccctgggcagctcttgtgaccggtgccctggctggtacatgtttcagttccaccggatcctgcagtacgccctgccgagacaggagtcccagcggccattcttttggattttcatggacaacttgctgctgaccgaggatgaccaggaaactaccactcggttcctgcagaccgaagccgtgaccctgcaggacgtgagaggccgggactaccagaacgccatgcgggtgtggtccaacatccctggactgaaaagcaagcacgcacctctgacccctaaagaagaggagtacctgcaggcccaggtgcggagcagaagcaagctggacgcccctaaggtggatctgctggtgaagaattgcctcctgcccctgagagagtacttcaagtatttcagccagaatagtctgcccctgggaggcagcggcggcggcttccaggaggccgtgaccttcaaggacgtggccgtggccttcaccgaggaggagctgggcctgctggaccccgcccagaggaagctgtacagggacgtgatgctggagaacttcaggaacctggtgagcgtgggccaccagagcttcaagcccgacatgatcagccagctggagagggaggagaagctgtggatgaaggagttccagacccagaggggcaagcacagcggcgacaggaacctgggcggcccaagcagcggcgcccctcctcccagcggcggcagcccagccggctccccaacctctaccgaggagggcacctctgagtccgccacccccgagagcggccctggcacctccaccgagcccagcgagggcagcgcacccggcagccctgccggcagccccacctccacagaggagggaaccagcaccgagcccagcgaaggcagcgccccaggcaccagcaccgagcctagtgagcaggagattaaacggatcaacaagatcagaagaagacttgtgaaagacagcaacaccaagaaggccggcaagacaggccccatgaaaaccctgctggttagagtgatgacacccgatctgagagagcggctggaaaacctgagaaagaagcctgaaaatatcccccagcccatcagcaatacatctagagccaacctgaataagctgctgaccgattacaccgaaatgaagaaggcgatcctgcatgtgtactgggaagagttccagaaggaccctgtgggcctgatgagccgggtggcccagcctgccagcaagaagatcgatcagaacaagctgaaacctgagatggacgagaagggcaacctgaccaccgccggctttgcctgctctcagtgtggccagcccctgttcgtgtacaagctggagcaggtgtctgagaagggcaaggcttacaccaactacttcggacggtgcaatgtggccgagcacgaaaagctgatcctgctggcccagctgaagcccgagaaggatagcgacgaagccgtgacatatagcctgggaaagtttgggcagagggccctggatttctacagcattcatgtgaccaaggagtccacccaccccgtgaagcccctggcccagatcgccggaaacagatacgcctccggacctgtgggaaaggccctgagcgacgcatgtatgggcacaatcgcctccttcctgtctaagtaccaggacatcatcatcgaacaccagaaggtggtgaagggcaaccagaagagactggagagcctgcgggagctggccggcaaggaaaacctggaataccctagcgtgaccctgccacctcagcctcacaccaaggagggcgttgatgcctacaacgaagtgatcgcccgggtgcgaatgtgggtgaacctgaacctgtggcagaagctgaagctaagcagagatgatgccaagcctctgctgagactgaagggattcccttcctttcctctggtcgagagacaggccaacgaagtggactggtgggacatggtgtgtaacgtgaagaagctgatcaacgagaaaaaggaggatggcaaggtgttttggcagaatctggctggctacaagagacaggaagccctgagaccatacctgagcagcgaggaagatcggaagaagggaaagaaattcgctcggtaccagctgggcgacctgctgctgcacctggaaaagaagcacggcgaggactggggaaaggtgtacgacgaggcctgggagcggattgacaagaaagtggaaggcctgagcaagcacatcaagctggaagaggaacggagaagcgaggacgcccagagcaaggccgccctgaccgactggctgcgggctaaggccagcttcgtgatcgagggcctgaaggaggccgacaaggacgagttctgcagatgcgagctgaagctgcagaagtggtacggggacctgcggggaaagcccttcgccatcgaagccgagaacagcatcctggacatcagcggcttcagcaagcagtacaactgtgccttcatctggcagaaggacggcgtgaagaagctgaacctgtacctgatcatcaactacttcaagggcggcaagctgcggttcaagaagatcaaacctgaagccttcgaagccaacagattctacaccgtgatcaacaaaaagagcggcgagatcgtgcccatggaggtgaacttcaacttcgacgaccccaacctgatcatcctgcctctggcctttggcaagagacagggcagagaattcatctggaacgacctgctgtccctggaaaccggcagcctgaagctggccaacggaagagtgatcgagaagacactgtacaacagaagaacccggcaggatgagcctgccctgttcgtggccctgaccttcgagcggcgggaggtcctggactcctccaatatcaaaccaatgaacctgatcggcgtggcaagaggcgaaaacatccccgccgtgatcgccctgaccgaccccgagggctgcccactgagccggtttaaggatagcctgggaaacccaacccacatcctgagaatcggcgagagctataaggagaagcagcggaccatccaggccaagaaggaggtggagcagcggagagccggcggctacagccggaagtacgccagcaaagccaagaatctggcagacgatatggtgagaaacaccgctagagatctgctgtactacgccgtgacccaggatgccatgctgatcttcgccaacctgagccggggcttcggccggcagggcaagcggaccttcatggccgagagacagtacacacggatggaggactggctgaccgccaagctggcctacgagggcctgagcaagacctacctgtccaagacactggcccagtacacctccaagacatgcagcaactgtgggtttaccatcaccagcgccgactacgacagggtgctggagaagctgaagaagacagcaacaggctggatgaccacaattaacggcaaggagctgaaggtggagggccagattacctactacaacagatacaagagacagaacgtagtcaaggacctgtccgtcgagctggatagactgagcgaagaatctgtgaacaacgacatctcctcctggacaaagggcagaagcggagaagctctgagcctcctgaagaaaagattctcccatagacccgtgcaggagaagttcgtgtgcctgaactgcggcttcgagacacacgcagccgagcaagccgccctgaacatcgccagatcctggctgttcctgcggagccaggagtacaagaaataccagacaaacaagacaaccggcaacaccgataagagagccttcgtcgagacctggcagtccttttaccggaagaagcttaaggaggtgtggaaacctgccgtgcggtctggcggatctggcggaggctccaccagccccaagaaaaagagaaaagtctaagctgccttctgcggggcttgccttctggccatgcccttcttctctcccttgcacctgtacctcttggtctttgaataaagcctgagtaggaaggctagcaaaaaaaaaaaaaaaaaaaaaaaaaaaaaaaaaaaaaaaaaaaaaaaaaaaaaaaaaaaaaaaaaaaaaaaaaaaaaaaa

SEQ ID NO: 12874 - RNA, 5785 nt, synthetic construct
  source 1..5785: mol_type = other RNA
aggaaataagagagaaaagaagagtaagaagaaatataagagccaccatggcccctaagaagaagcgtaaagtgagccggatggaacgcctcgtctacgaggtgcggcagaagtgcagaaacatcgaggacatctgcatctcctgcggatctctgaacgtgaccctggagcacccactgttcatcggcggcatgtgccagaactgtaaaaactgttttctggagtgtgcctatcaatacgacgatgacggctaccagagctactgcaccatctgttgcggcggaagagaggtgctgatgtgtggaaataacaactgctgccggtgcttctgcgtggaatgcgtggacctgctggtgggccccggcgccgcccaggccgctattaaggaagatccttggaactgctacatgtgcggccacaagggcacatacggcctgctgagacggagagaggactggcctagcagactgcagatgttcttcgccaataaccacgaccaggagttcgacccccctaaggtgtaccctcccgtccccgccgagaagagaaagcccatccgggtcctgagcctgttcgatggcatcgccaccggtctgctggtgctgaaggacctgggcatccaggtggataggtacattgcctccgaggtgtgcgaggactccatcaccgtgggaatggtgcgtcatcagggcaagatcatgtacgtgggcgacgtgcggagcgtgacacagaagcatatccaggagtggggccctttcgacctggtgatcggcggcagcccttgcaatgacctgagcatcgtgaacccagcccggaagggcctgtacgagggaaccggcagactgttcttcgagttttacagactgctgcacgacgcccggcctaaggaaggcgacgaccggcccttcttttggctgttcgagaatgtggtggccatgggagtcagcgacaagcgggatattagccggttcctggagagcaaccccgtgatgatcgatgccaaggaagtgagcgccgcccaccgggccagatacttctggggcaatctgcctggcatgaacagacccctggccagcaccgtgaacgacaagctggagctgcaggagtgcctggagcacggccggatcgccaagttcagcaaggtgagaaccatcaccacccgaagcaacagcatcaaacaaggcaaggaccagcactttcctgtgttcatgaacgagaaggaggacatcctgtggtgtaccgagatggagagagtgttcgggttcccagtccactacacagatgtcagcaacatgtctagactggccagacagagactgctgggaagaagctggtccgtccctgtgatcagacacctgttcgcccctctgaaggagtacttcgcctgcgtgagcagcggcaacagcaacgccaacagccggggccccagcttctctagcggcctggtgccactgtccctgagagggagccacatgggccccatggagatctacaaaaccgtgagcgcctggaagcggcagcctgtgcgcgtgctgagcctgtttcggaatatcgataaagtcctgaaaagcctgggattcctggagagcggctctggctccggcggtggcaccctgaagtacgtggaggatgtgacaaacgtggtcagacgggatgtggagaagtggggccccttcgatctggtgtacggcagcacccaacccctgggcagctcttgtgaccggtgccctggctggtacatgtttcagttccaccggatcctgcagtacgccctgccgagacaggagtcccagcggccattcttttggattttcatggacaacttgctgctgaccgaggatgaccaggaaactaccactcggttcctgcagaccgaagccgtgaccctgcaggacgtgagaggccgggactaccagaacgccatgcgggtgtggtccaacatccctggactgaaaagcaagcacgcacctctgacccctaaagaagaggagtacctgcaggcccaggtgcggagcagaagcaagctggacgcccctaaggtggatctgctggtgaagaattgcctcctgcccctgagagagtacttcaagtatttcagccagaatagtctgcccctgggaggcagcggcggcggcagccaggtgagcgtgaccttcgaggacgtggccgtgctgttcaccagggacgagtggaagaagctggtgcccagccagaggagcctgtacagggaggtgatgctggagaactacagcaacctggccagcctggccggcttccccttcaccaagcccaaggtgatcagcctgctgcagcagggcgaggacccctggaaggtggaggaggagggccccggcggcttcagcctgggcctgaagtgcggcggcccaagcagcggcgcccctcctcccagcggcggcagcccagccggctccccaacctctaccgaggagggcacctctgagtccgccacccccgagagcggccctggcacctccaccgagcccagcgagggcagcgcacccggcagccctgccggcagccccacctccacagaggagggaaccagcaccgagcccagcgaaggcagcgccccaggcaccagcaccgagcctagtgagcaggagattaaacggatcaacaagatcagaagaagacttgtgaaagacagcaacaccaagaaggccggcaagacaggccccatgaaaaccctgctggttagagtgatgacacccgatctgagagagcggctggaaaacctgagaaagaagcctgaaaatatcccccagcccatcagcaatacatctagagccaacctgaataagctgctgaccgattacaccgaaatgaagaaggcgatcctgcatgtgtactgggaagagttccagaaggaccctgtgggcctgatgagccgggtggcccagcctgccagcaagaagatcgatcagaacaagctgaaacctgagatggacgagaagggcaacctgaccaccgccggctttgcctgctctcagtgtggccagcccctgttcgtgtacaagctggagcaggtgtctgagaagggcaaggcttacaccaactacttcggacggtgcaatgtggccgagcacgaaaagctgatcctgctggcccagctgaagcccgagaaggatagcgacgaagccgtgacatatagcctgggaaagtttgggcagagggccctggatttctacagcattcatgtgaccaaggagtccacccaccccgtgaagcccctggcccagatcgccggaaacagatacgcctccggacctgtgggaaaggccctgagcgacgcatgtatgggcacaatcgcctccttcctgtctaagtaccaggacatcatcatcgaacaccagaaggtggtgaagggcaaccagaagagactggagagcctgcgggagctggccggcaaggaaaacctggaataccctagcgtgaccctgccacctcagcctcacaccaaggagggcgttgatgcctacaacgaagtgatcgcccgggtgcgaatgtgggtgaacctgaacctgtggcagaagctgaagctaagcagagatgatgccaagcctctgctgagactgaagggattcccttcctttcctctggtcgagagacaggccaacgaagtggactggtgggacatggtgtgtaacgtgaagaagctgatcaacgagaaaaaggaggatggcaaggtgttttggcagaatctggctggctacaagagacaggaagccctgagaccatacctgagcagcgaggaagatcggaagaagggaaagaaattcgctcggtaccagctgggcgacctgctgctgcacctggaaaagaagcacggcgaggactggggaaaggtgtacgacgaggcctgggagcggattgacaagaaagtggaaggcctgagcaagcacatcaagctggaagaggaacggagaagcgaggacgcccagagcaaggccgccctgaccgactggctgcgggctaaggccagcttcgtgatcgagggcctgaaggaggccgacaaggacgagttctgcagatgcgagctgaagctgcagaagtggtacggggacctgcggggaaagcccttcgccatcgaagccgagaacagcatcctggacatcagcggcttcagcaagcagtacaactgtgccttcatctggcagaaggacggcgtgaagaagctgaacctgtacctgatcatcaactacttcaagggcggcaagctgcggttcaagaagatcaaacctgaagccttcgaagccaacagattctacaccgtgatcaacaaaaagagcggcgagatcgtgcccatggaggtgaacttcaacttcgacgaccccaacctgatcatcctgcctctggcctttggcaagagacagggcagagaattcatctggaacgacctgctgtccctggaaaccggcagcctgaagctggccaacggaagagtgatcgagaagacactgtacaacagaagaacccggcaggatgagcctgccctgttcgtggccctgaccttcgagcggcgggaggtcctggactcctccaatatcaaaccaatgaacctgatcggcgtggcaagaggcgaaaacatccccgccgtgatcgccctgaccgaccccgagggctgcccactgagccggtttaaggatagcctgggaaacccaacccacatcctgagaatcggcgagagctataaggagaagcagcggaccatccaggccaagaaggaggtggagcagcggagagccggcggctacagccggaagtacgccagcaaagccaagaatctggcagacgatatggtgagaaacaccgctagagatctgctgtactacgccgtgacccaggatgccatgctgatcttcgccaacctgagccggggcttcggccggcagggcaagcggaccttcatggccgagagacagtacacacggatggaggactggctgaccgccaagctggcctacgagggcctgagcaagacctacctgtccaagacactggcccagtacacctccaagacatgcagcaactgtgggtttaccatcaccagcgccgactacgacagggtgctggagaagctgaagaagacagcaacaggctggatgaccacaattaacggcaaggagctgaaggtggagggccagattacctactacaacagatacaagagacagaacgtagtcaaggacctgtccgtcgagctggatagactgagcgaagaatctgtgaacaacgacatctcctcctggacaaagggcagaagcggagaagctctgagcctcctgaagaaaagattctcccatagacccgtgcaggagaagttcgtgtgcctgaactgcggcttcgagacacacgcagccgagcaagccgccctgaacatcgccagatcctggctgttcctgcggagccaggagtacaagaaataccagacaaacaagacaaccggcaacaccgataagagagccttcgtcgagacctggcagtccttttaccggaagaagcttaaggaggtgtggaaacctgccgtgcggtctggcggatctggcggaggctccaccagccccaagaaaaagagaaaagtctaagctgccttctgcggggcttgccttctggccatgcccttcttctctcccttgcacctgtacctcttggtctttgaataaagcctgagtaggaaggctagcaaaaaaaaaaaaaaaaaaaaaaaaaaaaaaaaaaaaaaaaaaaaaaaaaaaaaaaaaaaaaaaaaaaaaaaaaaaaaaaa

SEQ ID NO: 12875 - RNA, 5785 nt, synthetic construct
  source 1..5785: mol_type = other RNA
aggaaataagagagaaaagaagagtaagaagaaatataagagccaccatggcccctaagaagaagcgtaaagtgagccggatggaacgcctcgtctacgaggtgcggcagaagtgcagaaacatcgaggacatctgcatctcctgcggatctctgaacgtgaccctggagcacccactgttcatcggcggcatgtgccagaactgtaaaaactgttttctggagtgtgcctatcaatacgacgatgacggctaccagagctactgcaccatctgttgcggcggaagagaggtgctgatgtgtggaaataacaactgctgccggtgcttctgcgtggaatgcgtggacctgctggtgggccccggcgccgcccaggccgctattaaggaagatccttggaactgctacatgtgcggccacaagggcacatacggcctgctgagacggagagaggactggcctagcagactgcagatgttcttcgccaataaccacgaccaggagttcgacccccctaaggtgtaccctcccgtccccgccgagaagagaaagcccatccgggtcctgagcctgttcgatggcatcgccaccggtctgctggtgctgaaggacctgggcatccaggtggataggtacattgcctccgaggtgtgcgaggactccatcaccgtgggaatggtgcgtcatcagggcaagatcatgtacgtgggcgacgtgcggagcgtgacacagaagcatatccaggagtggggccctttcgacctggtgatcggcggcagcccttgcaatgacctgagcatcgtgaacccagcccggaagggcctgtacgagggaaccggcagactgttcttcgagttttacagactgctgcacgacgcccggcctaaggaaggcgacgaccggcccttcttttggctgttcgagaatgtggtggccatgggagtcagcgacaagcgggatattagccggttcctggagagcaaccccgtgatgatcgatgccaaggaagtgagcgccgcccaccgggccagatacttctggggcaatctgcctggcatgaacagacccctggccagcaccgtgaacgacaagctggagctgcaggagtgcctggagcacggccggatcgccaagttcagcaaggtgagaaccatcaccacccgaagcaacagcatcaaacaaggcaaggaccagcactttcctgtgttcatgaacgagaaggaggacatcctgtggtgtaccgagatggagagagtgttcgggttcccagtccactacacagatgtcagcaacatgtctagactggccagacagagactgctgggaagaagctggtccgtccctgtgatcagacacctgttcgcccctctgaaggagtacttcgcctgcgtgagcagcggcaacagcaacgccaacagccggggccccagcttctctagcggcctggtgccactgtccctgagagggagccacatgggccccatggagatctacaaaaccgtgagcgcctggaagcggcagcctgtgcgcgtgctgagcctgtttcggaatatcgataaagtcctgaaaagcctgggattcctggagagcggctctggctccggcggtggcaccctgaagtacgtggaggatgtgacaaacgtggtcagacgggatgtggagaagtggggccccttcgatctggtgtacggcagcacccaacccctgggcagctcttgtgaccggtgccctggctggtacatgtttcagttccaccggatcctgcagtacgccctgccgagacaggagtcccagcggccattcttttggattttcatggacaacttgctgctgaccgaggatgaccaggaaactaccactcggttcctgcagaccgaagccgtgaccctgcaggacgtgagaggccgggactaccagaacgccatgcgggtgtggtccaacatccctggactgaaaagcaagcacgcacctctgacccctaaagaagaggagtacctgcaggcccaggtgcggagcagaagcaagctggacgcccctaaggtggatctgctggtgaagaattgcctcctgcccctgagagagtacttcaagtatttcagccagaatagtctgcccctgggaggcagcggcggcggcttccaggtgcccgtgaccttcagggacgtggccgtgtacttctgcagggaggagtgggagtgcctgagccccagccagaggaccctgtacaggaacgtgatgctggagaacttcaggaacctgaacgagctgggctgctgcagcaggaggcccggcctgatcaccaggctggagcagtgggacgagccctgggtggacgactgggacaggagcgagttccccgacggccagaagagcttctgcggcggcccaagcagcggcgcccctcctcccagcggcggcagcccagccggctccccaacctctaccgaggagggcacctctgagtccgccacccccgagagcggccctggcacctccaccgagcccagcgagggcagcgcacccggcagccctgccggcagccccacctccacagaggagggaaccagcaccgagcccagcgaaggcagcgccccaggcaccagcaccgagcctagtgagcaggagattaaacggatcaacaagatcagaagaagacttgtgaaagacagcaacaccaagaaggccggcaagacaggccccatgaaaaccctgctggttagagtgatgacacccgatctgagagagcggctggaaaacctgagaaagaagcctgaaaatatcccccagcccatcagcaatacatctagagccaacctgaataagctgctgaccgattacaccgaaatgaagaaggcgatcctgcatgtgtactgggaagagttccagaaggaccctgtgggcctgatgagccgggtggcccagcctgccagcaagaagatcgatcagaacaagctgaaacctgagatggacgagaagggcaacctgaccaccgccggctttgcctgctctcagtgtggccagcccctgttcgtgtacaagctggagcaggtgtctgagaagggcaaggcttacaccaactacttcggacggtgcaatgtggccgagcacgaaaagctgatcctgctggcccagctgaagcccgagaaggatagcgacgaagccgtgacatatagcctgggaaagtttgggcagagggccctggatttctacagcattcatgtgaccaaggagtccacccaccccgtgaagcccctggcccagatcgccggaaacagatacgcctccggacctgtgggaaaggccctgagcgacgcatgtatgggcacaatcgcctccttcctgtctaagtaccaggacatcatcatcgaacaccagaaggtggtgaagggcaaccagaagagactggagagcctgcgggagctggccggcaaggaaaacctggaataccctagcgtgaccctgccacctcagcctcacaccaaggagggcgttgatgcctacaacgaagtgatcgcccgggtgcgaatgtgggtgaacctgaacctgtggcagaagctgaagctaagcagagatgatgccaagcctctgctgagactgaagggattcccttcctttcctctggtcgagagacaggccaacgaagtggactggtgggacatggtgtgtaacgtgaagaagctgatcaacgagaaaaaggaggatggcaaggtgttttggcagaatctggctggctacaagagacaggaagccctgagaccatacctgagcagcgaggaagatcggaagaagggaaagaaattcgctcggtaccagctgggcgacctgctgctgcacctggaaaagaagcacggcgaggactggggaaaggtgtacgacgaggcctgggagcggattgacaagaaagtggaaggcctgagcaagcacatcaagctggaagaggaacggagaagcgaggacgcccagagcaaggccgccctgaccgactggctgcgggctaaggccagcttcgtgatcgagggcctgaaggaggccgacaaggacgagttctgcagatgcgagctgaagctgcagaagtggtacggggacctgcggggaaagcccttcgccatcgaagccgagaacagcatcctggacatcagcggcttcagcaagcagtacaactgtgccttcatctggcagaaggacggcgtgaagaagctgaacctgtacctgatcatcaactacttcaagggcggcaagctgcggttcaagaagatcaaacctgaagccttcgaagccaacagattctacaccgtgatcaacaaaaagagcggcgagatcgtgcccatggaggtgaacttcaacttcgacgaccccaacctgatcatcctgcctctggcctttggcaagagacagggcagagaattcatctggaacgacctgctgtccctggaaaccggcagcctgaagctggccaacggaagagtgatcgagaagacactgtacaacagaagaacccggcaggatgagcctgccctgttcgtggccctgaccttcgagcggcgggaggtcctggactcctccaatatcaaaccaatgaacctgatcggcgtggcaagaggcgaaaacatccccgccgtgatcgccctgaccgaccccgagggctgcccactgagccggtttaaggatagcctgggaaacccaacccacatcctgagaatcggcgagagctataaggagaagcagcggaccatccaggccaagaaggaggtggagcagcggagagccggcggctacagccggaagtacgccagcaaagccaagaatctggcagacgatatggtgagaaacaccgctagagatctgctgtactacgccgtgacccaggatgccatgctgatcttcgccaacctgagccggggcttcggccggcagggcaagcggaccttcatggccgagagacagtacacacggatggaggactggctgaccgccaagctggcctacgagggcctgagcaagacctacctgtccaagacactggcccagtacacctccaagacatgcagcaactgtgggtttaccatcaccagcgccgactacgacagggtgctggagaagctgaagaagacagcaacaggctggatgaccacaattaacggcaaggagctgaaggtggagggccagattacctactacaacagatacaagagacagaacgtagtcaaggacctgtccgtcgagctggatagactgagcgaagaatctgtgaacaacgacatctcctcctggacaaagggcagaagcggagaagctctgagcctcctgaagaaaagattctcccatagacccgtgcaggagaagttcgtgtgcctgaactgcggcttcgagacacacgcagccgagcaagccgccctgaacatcgccagatcctggctgttcctgcggagccaggagtacaagaaataccagacaaacaagacaaccggcaacaccgataagagagccttcgtcgagacctggcagtccttttaccggaagaagcttaaggaggtgtggaaacctgccgtgcggtctggcggatctggcggaggctccaccagccccaagaaaaagagaaaagtctaagctgccttctgcggggcttgccttctggccatgcccttcttctctcccttgcacctgtacctcttggtctttgaataaagcctgagtaggaaggctagcaaaaaaaaaaaaaaaaaaaaaaaaaaaaaaaaaaaaaaaaaaaaaaaaaaaaaaaaaaaaaaaaaaaaaaaaaaaaaaaa

SEQ ID NO: 12876 - RNA, 5785 nt, synthetic construct
  source 1..5785: mol_type = other RNA
aggaaataagagagaaaagaagagtaagaagaaatataagagccaccatggcccctaagaagaagcgtaaagtgagccggatggaacgcctcgtctacgaggtgcggcagaagtgcagaaacatcgaggacatctgcatctcctgcggatctctgaacgtgaccctggagcacccactgttcatcggcggcatgtgccagaactgtaaaaactgttttctggagtgtgcctatcaatacgacgatgacggctaccagagctactgcaccatctgttgcggcggaagagaggtgctgatgtgtggaaataacaactgctgccggtgcttctgcgtggaatgcgtggacctgctggtgggccccggcgccgcccaggccgctattaaggaagatccttggaactgctacatgtgcggccacaagggcacatacggcctgctgagacggagagaggactggcctagcagactgcagatgttcttcgccaataaccacgaccaggagttcgacccccctaaggtgtaccctcccgtccccgccgagaagagaaagcccatccgggtcctgagcctgttcgatggcatcgccaccggtctgctggtgctgaaggacctgggcatccaggtggataggtacattgcctccgaggtgtgcgaggactccatcaccgtgggaatggtgcgtcatcagggcaagatcatgtacgtgggcgacgtgcggagcgtgacacagaagcatatccaggagtggggccctttcgacctggtgatcggcggcagcccttgcaatgacctgagcatcgtgaacccagcccggaagggcctgtacgagggaaccggcagactgttcttcgagttttacagactgctgcacgacgcccggcctaaggaaggcgacgaccggcccttcttttggctgttcgagaatgtggtggccatgggagtcagcgacaagcgggatattagccggttcctggagagcaaccccgtgatgatcgatgccaaggaagtgagcgccgcccaccgggccagatacttctggggcaatctgcctggcatgaacagacccctggccagcaccgtgaacgacaagctggagctgcaggagtgcctggagcacggccggatcgccaagttcagcaaggtgagaaccatcaccacccgaagcaacagcatcaaacaaggcaaggaccagcactttcctgtgttcatgaacgagaaggaggacatcctgtggtgtaccgagatggagagagtgttcgggttcccagtccactacacagatgtcagcaacatgtctagactggccagacagagactgctgggaagaagctggtccgtccctgtgatcagacacctgttcgcccctctgaaggagtacttcgcctgcgtgagcagcggcaacagcaacgccaacagccggggccccagcttctctagcggcctggtgccactgtccctgagagggagccacatgggccccatggagatctacaaaaccgtgagcgcctggaagcggcagcctgtgcgcgtgctgagcctgtttcggaatatcgataaagtcctgaaaagcctgggattcctggagagcggctctggctccggcggtggcaccctgaagtacgtggaggatgtgacaaacgtggtcagacgggatgtggagaagtggggccccttcgatctggtgtacggcagcacccaacccctgggcagctcttgtgaccggtgccctggctggtacatgtttcagttccaccggatcctgcagtacgccctgccgagacaggagtcccagcggccattcttttggattttcatggacaacttgctgctgaccgaggatgaccaggaaactaccactcggttcctgcagaccgaagccgtgaccctgcaggacgtgagaggccgggactaccagaacgccatgcgggtgtggtccaacatccctggactgaaaagcaagcacgcacctctgacccctaaagaagaggagtacctgcaggcccaggtgcggagcagaagcaagctggacgcccctaaggtggatctgctggtgaagaattgcctcctgcccctgagagagtacttcaagtatttcagccagaatagtctgcccctgggaggcagcggcggcggcagcgtgaccttcgaggacgtggccgtgtacttcagctgggaggagtgggccctgctggacgaggcccagaggtgcctgtaccacgacgtgatgctggagaacttcgccctgaccagcagcctgggctgctggcacggcgccgaggacaagggcgcccccagcgagaagagcatcagcgtggagggcgtgagccagatcaagaccctgaaggccgacagctgcccccagaagggccagcccttcggcggcccaagcagcggcgcccctcctcccagcggcggcagcccagccggctccccaacctctaccgaggagggcacctctgagtccgccacccccgagagcggccctggcacctccaccgagcccagcgagggcagcgcacccggcagccctgccggcagccccacctccacagaggagggaaccagcaccgagcccagcgaaggcagcgccccaggcaccagcaccgagcctagtgagcaggagattaaacggatcaacaagatcagaagaagacttgtgaaagacagcaacaccaagaaggccggcaagacaggccccatgaaaaccctgctggttagagtgatgacacccgatctgagagagcggctggaaaacctgagaaagaagcctgaaaatatcccccagcccatcagcaatacatctagagccaacctgaataagctgctgaccgattacaccgaaatgaagaaggcgatcctgcatgtgtactgggaagagttccagaaggaccctgtgggcctgatgagccgggtggcccagcctgccagcaagaagatcgatcagaacaagctgaaacctgagatggacgagaagggcaacctgaccaccgccggctttgcctgctctcagtgtggccagcccctgttcgtgtacaagctggagcaggtgtctgagaagggcaaggcttacaccaactacttcggacggtgcaatgtggccgagcacgaaaagctgatcctgctggcccagctgaagcccgagaaggatagcgacgaagccgtgacatatagcctgggaaagtttgggcagagggccctggatttctacagcattcatgtgaccaaggagtccacccaccccgtgaagcccctggcccagatcgccggaaacagatacgcctccggacctgtgggaaaggccctgagcgacgcatgtatgggcacaatcgcctccttcctgtctaagtaccaggacatcatcatcgaacaccagaaggtggtgaagggcaaccagaagagactggagagcctgcgggagctggccggcaaggaaaacctggaataccctagcgtgaccctgccacctcagcctcacaccaaggagggcgttgatgcctacaacgaagtgatcgcccgggtgcgaatgtgggtgaacctgaacctgtggcagaagctgaagctaagcagagatgatgccaagcctctgctgagactgaagggattcccttcctttcctctggtcgagagacaggccaacgaagtggactggtgggacatggtgtgtaacgtgaagaagctgatcaacgagaaaaaggaggatggcaaggtgttttggcagaatctggctggctacaagagacaggaagccctgagaccatacctgagcagcgaggaagatcggaagaagggaaagaaattcgctcggtaccagctgggcgacctgctgctgcacctggaaaagaagcacggcgaggactggggaaaggtgtacgacgaggcctgggagcggattgacaagaaagtggaaggcctgagcaagcacatcaagctggaagaggaacggagaagcgaggacgcccagagcaaggccgccctgaccgactggctgcgggctaaggccagcttcgtgatcgagggcctgaaggaggccgacaaggacgagttctgcagatgcgagctgaagctgcagaagtggtacggggacctgcggggaaagcccttcgccatcgaagccgagaacagcatcctggacatcagcggcttcagcaagcagtacaactgtgccttcatctggcagaaggacggcgtgaagaagctgaacctgtacctgatcatcaactacttcaagggcggcaagctgcggttcaagaagatcaaacctgaagccttcgaagccaacagattctacaccgtgatcaacaaaaagagcggcgagatcgtgcccatggaggtgaacttcaacttcgacgaccccaacctgatcatcctgcctctggcctttggcaagagacagggcagagaattcatctggaacgacctgctgtccctggaaaccggcagcctgaagctggccaacggaagagtgatcgagaagacactgtacaacagaagaacccggcaggatgagcctgccctgttcgtggccctgaccttcgagcggcgggaggtcctggactcctccaatatcaaaccaatgaacctgatcggcgtggcaagaggcgaaaacatccccgccgtgatcgccctgaccgaccccgagggctgcccactgagccggtttaaggatagcctgggaaacccaacccacatcctgagaatcggcgagagctataaggagaagcagcggaccatccaggccaagaaggaggtggagcagcggagagccggcggctacagccggaagtacgccagcaaagccaagaatctggcagacgatatggtgagaaacaccgctagagatctgctgtactacgccgtgacccaggatgccatgctgatcttcgccaacctgagccggggcttcggccggcagggcaagcggaccttcatggccgagagacagtacacacggatggaggactggctgaccgccaagctggcctacgagggcctgagcaagacctacctgtccaagacactggcccagtacacctccaagacatgcagcaactgtgggtttaccatcaccagcgccgactacgacagggtgctggagaagctgaagaagacagcaacaggctggatgaccacaattaacggcaaggagctgaaggtggagggccagattacctactacaacagatacaagagacagaacgtagtcaaggacctgtccgtcgagctggatagactgagcgaagaatctgtgaacaacgacatctcctcctggacaaagggcagaagcggagaagctctgagcctcctgaagaaaagattctcccatagacccgtgcaggagaagttcgtgtgcctgaactgcggcttcgagacacacgcagccgagcaagccgccctgaacatcgccagatcctggctgttcctgcggagccaggagtacaagaaataccagacaaacaagacaaccggcaacaccgataagagagccttcgtcgagacctggcagtccttttaccggaagaagcttaaggaggtgtggaaacctgccgtgcggtctggcggatctggcggaggctccaccagccccaagaaaaagagaaaagtctaagctgccttctgcggggcttgccttctggccatgcccttcttctctcccttgcacctgtacctcttggtctttgaataaagcctgagtaggaaggctagcaaaaaaaaaaaaaaaaaaaaaaaaaaaaaaaaaaaaaaaaaaaaaaaaaaaaaaaaaaaaaaaaaaaaaaaaaaaaaaaa

SEQ ID NO: 12877 - RNA, 5785 nt, synthetic construct
  source 1..5785: mol_type = other RNA
aggaaataagagagaaaagaagagtaagaagaaatataagagccaccatggcccctaagaagaagcgtaaagtgagccggatggaacgcctcgtctacgaggtgcggcagaagtgcagaaacatcgaggacatctgcatctcctgcggatctctgaacgtgaccctggagcacccactgttcatcggcggcatgtgccagaactgtaaaaactgttttctggagtgtgcctatcaatacgacgatgacggctaccagagctactgcaccatctgttgcggcggaagagaggtgctgatgtgtggaaataacaactgctgccggtgcttctgcgtggaatgcgtggacctgctggtgggccccggcgccgcccaggccgctattaaggaagatccttggaactgctacatgtgcggccacaagggcacatacggcctgctgagacggagagaggactggcctagcagactgcagatgttcttcgccaataaccacgaccaggagttcgacccccctaaggtgtaccctcccgtccccgccgagaagagaaagcccatccgggtcctgagcctgttcgatggcatcgccaccggtctgctggtgctgaaggacctgggcatccaggtggataggtacattgcctccgaggtgtgcgaggactccatcaccgtgggaatggtgcgtcatcagggcaagatcatgtacgtgggcgacgtgcggagcgtgacacagaagcatatccaggagtggggccctttcgacctggtgatcggcggcagcccttgcaatgacctgagcatcgtgaacccagcccggaagggcctgtacgagggaaccggcagactgttcttcgagttttacagactgctgcacgacgcccggcctaaggaaggcgacgaccggcccttcttttggctgttcgagaatgtggtggccatgggagtcagcgacaagcgggatattagccggttcctggagagcaaccccgtgatgatcgatgccaaggaagtgagcgccgcccaccgggccagatacttctggggcaatctgcctggcatgaacagacccctggccagcaccgtgaacgacaagctggagctgcaggagtgcctggagcacggccggatcgccaagttcagcaaggtgagaaccatcaccacccgaagcaacagcatcaaacaaggcaaggaccagcactttcctgtgttcatgaacgagaaggaggacatcctgtggtgtaccgagatggagagagtgttcgggttcccagtccactacacagatgtcagcaacatgtctagactggccagacagagactgctgggaagaagctggtccgtccctgtgatcagacacctgttcgcccctctgaaggagtacttcgcctgcgtgagcagcggcaacagcaacgccaacagccggggccccagcttctctagcggcctggtgccactgtccctgagagggagccacatgggccccatggagatctacaaaaccgtgagcgcctggaagcggcagcctgtgcgcgtgctgagcctgtttcggaatatcgataaagtcctgaaaagcctgggattcctggagagcggctctggctccggcggtggcaccctgaagtacgtggaggatgtgacaaacgtggtcagacgggatgtggagaagtggggccccttcgatctggtgtacggcagcacccaacccctgggcagctcttgtgaccggtgccctggctggtacatgtttcagttccaccggatcctgcagtacgccctgccgagacaggagtcccagcggccattcttttggattttcatggacaacttgctgctgaccgaggatgaccaggaaactaccactcggttcctgcagaccgaagccgtgaccctgcaggacgtgagaggccgggactaccagaacgccatgcgggtgtggtccaacatccctggactgaaaagcaagcacgcacctctgacccctaaagaagaggagtacctgcaggcccaggtgcggagcagaagcaagctggacgcccctaaggtggatctgctggtgaagaattgcctcctgcccctgagagagtacttcaagtatttcagccagaatagtctgcccctgggaggcagcggcggcggcatggcccacctgatgatgttcagggacgtggccgtggacttcagccaggaggagtgggagtgcctggacctggagcagagggacctgtacagggacgtgatgctggagaactacagcaacatggtgagcctgggcctgtgcatctaccagcccgaggccttcagcctgctggagaagggcaaggacccctggaagatcctgagggacgagaccaggaggccctgccccgacatgcagagcaggggcggcccaagcagcggcgcccctcctcccagcggcggcagcccagccggctccccaacctctaccgaggagggcacctctgagtccgccacccccgagagcggccctggcacctccaccgagcccagcgagggcagcgcacccggcagccctgccggcagccccacctccacagaggagggaaccagcaccgagcccagcgaaggcagcgccccaggcaccagcaccgagcctagtgagcaggagattaaacggatcaacaagatcagaagaagacttgtgaaagacagcaacaccaagaaggccggcaagacaggccccatgaaaaccctgctggttagagtgatgacacccgatctgagagagcggctggaaaacctgagaaagaagcctgaaaatatcccccagcccatcagcaatacatctagagccaacctgaataagctgctgaccgattacaccgaaatgaagaaggcgatcctgcatgtgtactgggaagagttccagaaggaccctgtgggcctgatgagccgggtggcccagcctgccagcaagaagatcgatcagaacaagctgaaacctgagatggacgagaagggcaacctgaccaccgccggctttgcctgctctcagtgtggccagcccctgttcgtgtacaagctggagcaggtgtctgagaagggcaaggcttacaccaactacttcggacggtgcaatgtggccgagcacgaaaagctgatcctgctggcccagctgaagcccgagaaggatagcgacgaagccgtgacatatagcctgggaaagtttgggcagagggccctggatttctacagcattcatgtgaccaaggagtccacccaccccgtgaagcccctggcccagatcgccggaaacagatacgcctccggacctgtgggaaaggccctgagcgacgcatgtatgggcacaatcgcctccttcctgtctaagtaccaggacatcatcatcgaacaccagaaggtggtgaagggcaaccagaagagactggagagcctgcgggagctggccggcaaggaaaacctggaataccctagcgtgaccctgccacctcagcctcacaccaaggagggcgttgatgcctacaacgaagtgatcgcccgggtgcgaatgtgggtgaacctgaacctgtggcagaagctgaagctaagcagagatgatgccaagcctctgctgagactgaagggattcccttcctttcctctggtcgagagacaggccaacgaagtggactggtgggacatggtgtgtaacgtgaagaagctgatcaacgagaaaaaggaggatggcaaggtgttttggcagaatctggctggctacaagagacaggaagccctgagaccatacctgagcagcgaggaagatcggaagaagggaaagaaattcgctcggtaccagctgggcgacctgctgctgcacctggaaaagaagcacggcgaggactggggaaaggtgtacgacgaggcctgggagcggattgacaagaaagtggaaggcctgagcaagcacatcaagctggaagaggaacggagaagcgaggacgcccagagcaaggccgccctgaccgactggctgcgggctaaggccagcttcgtgatcgagggcctgaaggaggccgacaaggacgagttctgcagatgcgagctgaagctgcagaagtggtacggggacctgcggggaaagcccttcgccatcgaagccgagaacagcatcctggacatcagcggcttcagcaagcagtacaactgtgccttcatctggcagaaggacggcgtgaagaagctgaacctgtacctgatcatcaactacttcaagggcggcaagctgcggttcaagaagatcaaacctgaagccttcgaagccaacagattctacaccgtgatcaacaaaaagagcggcgagatcgtgcccatggaggtgaacttcaacttcgacgaccccaacctgatcatcctgcctctggcctttggcaagagacagggcagagaattcatctggaacgacctgctgtccctggaaaccggcagcctgaagctggccaacggaagagtgatcgagaagacactgtacaacagaagaacccggcaggatgagcctgccctgttcgtggccctgaccttcgagcggcgggaggtcctggactcctccaatatcaaaccaatgaacctgatcggcgtggcaagaggcgaaaacatccccgccgtgatcgccctgaccgaccccgagggctgcccactgagccggtttaaggatagcctgggaaacccaacccacatcctgagaatcggcgagagctataaggagaagcagcggaccatccaggccaagaaggaggtggagcagcggagagccggcggctacagccggaagtacgccagcaaagccaagaatctggcagacgatatggtgagaaacaccgctagagatctgctgtactacgccgtgacccaggatgccatgctgatcttcgccaacctgagccggggcttcggccggcagggcaagcggaccttcatggccgagagacagtacacacggatggaggactggctgaccgccaagctggcctacgagggcctgagcaagacctacctgtccaagacactggcccagtacacctccaagacatgcagcaactgtgggtttaccatcaccagcgccgactacgacagggtgctggagaagctgaagaagacagcaacaggctggatgaccacaattaacggcaaggagctgaaggtggagggccagattacctactacaacagatacaagagacagaacgtagtcaaggacctgtccgtcgagctggatagactgagcgaagaatctgtgaacaacgacatctcctcctggacaaagggcagaagcggagaagctctgagcctcctgaagaaaagattctcccatagacccgtgcaggagaagttcgtgtgcctgaactgcggcttcgagacacacgcagccgagcaagccgccctgaacatcgccagatcctggctgttcctgcggagccaggagtacaagaaataccagacaaacaagacaaccggcaacaccgataagagagccttcgtcgagacctggcagtccttttaccggaagaagcttaaggaggtgtggaaacctgccgtgcggtctggcggatctggcggaggctccaccagccccaagaaaaagagaaaagtctaagctgccttctgcggggcttgccttctggccatgcccttcttctctcccttgcacctgtacctcttggtctttgaataaagcctgagtaggaaggctagcaaaaaaaaaaaaaaaaaaaaaaaaaaaaaaaaaaaaaaaaaaaaaaaaaaaaaaaaaaaaaaaaaaaaaaaaaaaaaaaa

SEQ ID NO: 12878 - RNA, 5785 nt, synthetic construct
  source 1..5785: mol_type = other RNA
aggaaataagagagaaaagaagagtaagaagaaatataagagccaccatggcccctaagaagaagcgtaaagtgagccggatggaacgcctcgtctacgaggtgcggcagaagtgcagaaacatcgaggacatctgcatctcctgcggatctctgaacgtgaccctggagcacccactgttcatcggcggcatgtgccagaactgtaaaaactgttttctggagtgtgcctatcaatacgacgatgacggctaccagagctactgcaccatctgttgcggcggaagagaggtgctgatgtgtggaaataacaactgctgccggtgcttctgcgtggaatgcgtggacctgctggtgggccccggcgccgcccaggccgctattaaggaagatccttggaactgctacatgtgcggccacaagggcacatacggcctgctgagacggagagaggactggcctagcagactgcagatgttcttcgccaataaccacgaccaggagttcgacccccctaaggtgtaccctcccgtccccgccgagaagagaaagcccatccgggtcctgagcctgttcgatggcatcgccaccggtctgctggtgctgaaggacctgggcatccaggtggataggtacattgcctccgaggtgtgcgaggactccatcaccgtgggaatggtgcgtcatcagggcaagatcatgtacgtgggcgacgtgcggagcgtgacacagaagcatatccaggagtggggccctttcgacctggtgatcggcggcagcccttgcaatgacctgagcatcgtgaacccagcccggaagggcctgtacgagggaaccggcagactgttcttcgagttttacagactgctgcacgacgcccggcctaaggaaggcgacgaccggcccttcttttggctgttcgagaatgtggtggccatgggagtcagcgacaagcgggatattagccggttcctggagagcaaccccgtgatgatcgatgccaaggaagtgagcgccgcccaccgggccagatacttctggggcaatctgcctggcatgaacagacccctggccagcaccgtgaacgacaagctggagctgcaggagtgcctggagcacggccggatcgccaagttcagcaaggtgagaaccatcaccacccgaagcaacagcatcaaacaaggcaaggaccagcactttcctgtgttcatgaacgagaaggaggacatcctgtggtgtaccgagatggagagagtgttcgggttcccagtccactacacagatgtcagcaacatgtctagactggccagacagagactgctgggaagaagctggtccgtccctgtgatcagacacctgttcgcccctctgaaggagtacttcgcctgcgtgagcagcggcaacagcaacgccaacagccggggccccagcttctctagcggcctggtgccactgtccctgagagggagccacatgggccccatggagatctacaaaaccgtgagcgcctggaagcggcagcctgtgcgcgtgctgagcctgtttcggaatatcgataaagtcctgaaaagcctgggattcctggagagcggctctggctccggcggtggcaccctgaagtacgtggaggatgtgacaaacgtggtcagacgggatgtggagaagtggggccccttcgatctggtgtacggcagcacccaacccctgggcagctcttgtgaccggtgccctggctggtacatgtttcagttccaccggatcctgcagtacgccctgccgagacaggagtcccagcggccattcttttggattttcatggacaacttgctgctgaccgaggatgaccaggaaactaccactcggttcctgcagaccgaagccgtgaccctgcaggacgtgagaggccgggactaccagaacgccatgcgggtgtggtccaacatccctggactgaaaagcaagcacgcacctctgacccctaaagaagaggagtacctgcaggcccaggtgcggagcagaagcaagctggacgcccctaaggtggatctgctggtgaagaattgcctcctgcccctgagagagtacttcaagtatttcagccagaatagtctgcccctgggaggcagcggcggcggcaggcccagggccgtgaagttcgccgacgtggccgtgtacttcagcaccgaggagtggggctgcctgaggcccgcccagagggccctgtacagggacgtgatgcaggagacctacggccacctgggcgccctgggctgcgccggccccaagcccgccctgatcagctggctggagaggaacaccgacgactgggagcccgccgccctggacccccaggagtgccccaggggcgtggccgtgcagggcggcccaagcagcggcgcccctcctcccagcggcggcagcccagccggctccccaacctctaccgaggagggcacctctgagtccgccacccccgagagcggccctggcacctccaccgagcccagcgagggcagcgcacccggcagccctgccggcagccccacctccacagaggagggaaccagcaccgagcccagcgaaggcagcgccccaggcaccagcaccgagcctagtgagcaggagattaaacggatcaacaagatcagaagaagacttgtgaaagacagcaacaccaagaaggccggcaagacaggccccatgaaaaccctgctggttagagtgatgacacccgatctgagagagcggctggaaaacctgagaaagaagcctgaaaatatcccccagcccatcagcaatacatctagagccaacctgaataagctgctgaccgattacaccgaaatgaagaaggcgatcctgcatgtgtactgggaagagttccagaaggaccctgtgggcctgatgagccgggtggcccagcctgccagcaagaagatcgatcagaacaagctgaaacctgagatggacgagaagggcaacctgaccaccgccggctttgcctgctctcagtgtggccagcccctgttcgtgtacaagctggagcaggtgtctgagaagggcaaggcttacaccaactacttcggacggtgcaatgtggccgagcacgaaaagctgatcctgctggcccagctgaagcccgagaaggatagcgacgaagccgtgacatatagcctgggaaagtttgggcagagggccctggatttctacagcattcatgtgaccaaggagtccacccaccccgtgaagcccctggcccagatcgccggaaacagatacgcctccggacctgtgggaaaggccctgagcgacgcatgtatgggcacaatcgcctccttcctgtctaagtaccaggacatcatcatcgaacaccagaaggtggtgaagggcaaccagaagagactggagagcctgcgggagctggccggcaaggaaaacctggaataccctagcgtgaccctgccacctcagcctcacaccaaggagggcgttgatgcctacaacgaagtgatcgcccgggtgcgaatgtgggtgaacctgaacctgtggcagaagctgaagctaagcagagatgatgccaagcctctgctgagactgaagggattcccttcctttcctctggtcgagagacaggccaacgaagtggactggtgggacatggtgtgtaacgtgaagaagctgatcaacgagaaaaaggaggatggcaaggtgttttggcagaatctggctggctacaagagacaggaagccctgagaccatacctgagcagcgaggaagatcggaagaagggaaagaaattcgctcggtaccagctgggcgacctgctgctgcacctggaaaagaagcacggcgaggactggggaaaggtgtacgacgaggcctgggagcggattgacaagaaagtggaaggcctgagcaagcacatcaagctggaagaggaacggagaagcgaggacgcccagagcaaggccgccctgaccgactggctgcgggctaaggccagcttcgtgatcgagggcctgaaggaggccgacaaggacgagttctgcagatgcgagctgaagctgcagaagtggtacggggacctgcggggaaagcccttcgccatcgaagccgagaacagcatcctggacatcagcggcttcagcaagcagtacaactgtgccttcatctggcagaaggacggcgtgaagaagctgaacctgtacctgatcatcaactacttcaagggcggcaagctgcggttcaagaagatcaaacctgaagccttcgaagccaacagattctacaccgtgatcaacaaaaagagcggcgagatcgtgcccatggaggtgaacttcaacttcgacgaccccaacctgatcatcctgcctctggcctttggcaagagacagggcagagaattcatctggaacgacctgctgtccctggaaaccggcagcctgaagctggccaacggaagagtgatcgagaagacactgtacaacagaagaacccggcaggatgagcctgccctgttcgtggccctgaccttcgagcggcgggaggtcctggactcctccaatatcaaaccaatgaacctgatcggcgtggcaagaggcgaaaacatccccgccgtgatcgccctgaccgaccccgagggctgcccactgagccggtttaaggatagcctgggaaacccaacccacatcctgagaatcggcgagagctataaggagaagcagcggaccatccaggccaagaaggaggtggagcagcggagagccggcggctacagccggaagtacgccagcaaagccaagaatctggcagacgatatggtgagaaacaccgctagagatctgctgtactacgccgtgacccaggatgccatgctgatcttcgccaacctgagccggggcttcggccggcagggcaagcggaccttcatggccgagagacagtacacacggatggaggactggctgaccgccaagctggcctacgagggcctgagcaagacctacctgtccaagacactggcccagtacacctccaagacatgcagcaactgtgggtttaccatcaccagcgccgactacgacagggtgctggagaagctgaagaagacagcaacaggctggatgaccacaattaacggcaaggagctgaaggtggagggccagattacctactacaacagatacaagagacagaacgtagtcaaggacctgtccgtcgagctggatagactgagcgaagaatctgtgaacaacgacatctcctcctggacaaagggcagaagcggagaagctctgagcctcctgaagaaaagattctcccatagacccgtgcaggagaagttcgtgtgcctgaactgcggcttcgagacacacgcagccgagcaagccgccctgaacatcgccagatcctggctgttcctgcggagccaggagtacaagaaataccagacaaacaagacaaccggcaacaccgataagagagccttcgtcgagacctggcagtccttttaccggaagaagcttaaggaggtgtggaaacctgccgtgcggtctggcggatctggcggaggctccaccagccccaagaaaaagagaaaagtctaagctgccttctgcggggcttgccttctggccatgcccttcttctctcccttgcacctgtacctcttggtctttgaataaagcctgagtaggaaggctagcaaaaaaaaaaaaaaaaaaaaaaaaaaaaaaaaaaaaaaaaaaaaaaaaaaaaaaaaaaaaaaaaaaaaaaaaaaaaaaaa

SEQ ID NO: 12879 - RNA, 5785 nt, synthetic construct
  source 1..5785: mol_type = other RNA
aggaaataagagagaaaagaagagtaagaagaaatataagagccaccatggcccctaagaagaagcgtaaagtgagccggatggaacgcctcgtctacgaggtgcggcagaagtgcagaaacatcgaggacatctgcatctcctgcggatctctgaacgtgaccctggagcacccactgttcatcggcggcatgtgccagaactgtaaaaactgttttctggagtgtgcctatcaatacgacgatgacggctaccagagctactgcaccatctgttgcggcggaagagaggtgctgatgtgtggaaataacaactgctgccggtgcttctgcgtggaatgcgtggacctgctggtgggccccggcgccgcccaggccgctattaaggaagatccttggaactgctacatgtgcggccacaagggcacatacggcctgctgagacggagagaggactggcctagcagactgcagatgttcttcgccaataaccacgaccaggagttcgacccccctaaggtgtaccctcccgtccccgccgagaagagaaagcccatccgggtcctgagcctgttcgatggcatcgccaccggtctgctggtgctgaaggacctgggcatccaggtggataggtacattgcctccgaggtgtgcgaggactccatcaccgtgggaatggtgcgtcatcagggcaagatcatgtacgtgggcgacgtgcggagcgtgacacagaagcatatccaggagtggggccctttcgacctggtgatcggcggcagcccttgcaatgacctgagcatcgtgaacccagcccggaagggcctgtacgagggaaccggcagactgttcttcgagttttacagactgctgcacgacgcccggcctaaggaaggcgacgaccggcccttcttttggctgttcgagaatgtggtggccatgggagtcagcgacaagcgggatattagccggttcctggagagcaaccccgtgatgatcgatgccaaggaagtgagcgccgcccaccgggccagatacttctggggcaatctgcctggcatgaacagacccctggccagcaccgtgaacgacaagctggagctgcaggagtgcctggagcacggccggatcgccaagttcagcaaggtgagaaccatcaccacccgaagcaacagcatcaaacaaggcaaggaccagcactttcctgtgttcatgaacgagaaggaggacatcctgtggtgtaccgagatggagagagtgttcgggttcccagtccactacacagatgtcagcaacatgtctagactggccagacagagactgctgggaagaagctggtccgtccctgtgatcagacacctgttcgcccctctgaaggagtacttcgcctgcgtgagcagcggcaacagcaacgccaacagccggggccccagcttctctagcggcctggtgccactgtccctgagagggagccacatgggccccatggagatctacaaaaccgtgagcgcctggaagcggcagcctgtgcgcgtgctgagcctgtttcggaatatcgataaagtcctgaaaagcctgggattcctggagagcggctctggctccggcggtggcaccctgaagtacgtggaggatgtgacaaacgtggtcagacgggatgtggagaagtggggccccttcgatctggtgtacggcagcacccaacccctgggcagctcttgtgaccggtgccctggctggtacatgtttcagttccaccggatcctgcagtacgccctgccgagacaggagtcccagcggccattcttttggattttcatggacaacttgctgctgaccgaggatgaccaggaaactaccactcggttcctgcagaccgaagccgtgaccctgcaggacgtgagaggccgggactaccagaacgccatgcgggtgtggtccaacatccctggactgaaaagcaagcacgcacctctgacccctaaagaagaggagtacctgcaggcccaggtgcggagcagaagcaagctggacgcccctaaggtggatctgctggtgaagaattgcctcctgcccctgagagagtacttcaagtatttcagccagaatagtctgcccctgggaggcagcggcggcggcaggcccgagagcgtgaccttcgaggacgtggccatctacttcagcgagaacgagtggaccggcctggcccccgcccagagggccctgtacagggacgtgatgctggagaactacggcgccctggccagcctggccgccttccccttccccaagcccgccctgatcttccagctggagcagggcgaggccccctggagcagcgccccccagggcgccctggacggcgagggccccaggggcatcggcggcccaagcagcggcgcccctcctcccagcggcggcagcccagccggctccccaacctctaccgaggagggcacctctgagtccgccacccccgagagcggccctggcacctccaccgagcccagcgagggcagcgcacccggcagccctgccggcagccccacctccacagaggagggaaccagcaccgagcccagcgaaggcagcgccccaggcaccagcaccgagcctagtgagcaggagattaaacggatcaacaagatcagaagaagacttgtgaaagacagcaacaccaagaaggccggcaagacaggccccatgaaaaccctgctggttagagtgatgacacccgatctgagagagcggctggaaaacctgagaaagaagcctgaaaatatcccccagcccatcagcaatacatctagagccaacctgaataagctgctgaccgattacaccgaaatgaagaaggcgatcctgcatgtgtactgggaagagttccagaaggaccctgtgggcctgatgagccgggtggcccagcctgccagcaagaagatcgatcagaacaagctgaaacctgagatggacgagaagggcaacctgaccaccgccggctttgcctgctctcagtgtggccagcccctgttcgtgtacaagctggagcaggtgtctgagaagggcaaggcttacaccaactacttcggacggtgcaatgtggccgagcacgaaaagctgatcctgctggcccagctgaagcccgagaaggatagcgacgaagccgtgacatatagcctgggaaagtttgggcagagggccctggatttctacagcattcatgtgaccaaggagtccacccaccccgtgaagcccctggcccagatcgccggaaacagatacgcctccggacctgtgggaaaggccctgagcgacgcatgtatgggcacaatcgcctccttcctgtctaagtaccaggacatcatcatcgaacaccagaaggtggtgaagggcaaccagaagagactggagagcctgcgggagctggccggcaaggaaaacctggaataccctagcgtgaccctgccacctcagcctcacaccaaggagggcgttgatgcctacaacgaagtgatcgcccgggtgcgaatgtgggtgaacctgaacctgtggcagaagctgaagctaagcagagatgatgccaagcctctgctgagactgaagggattcccttcctttcctctggtcgagagacaggccaacgaagtggactggtgggacatggtgtgtaacgtgaagaagctgatcaacgagaaaaaggaggatggcaaggtgttttggcagaatctggctggctacaagagacaggaagccctgagaccatacctgagcagcgaggaagatcggaagaagggaaagaaattcgctcggtaccagctgggcgacctgctgctgcacctggaaaagaagcacggcgaggactggggaaaggtgtacgacgaggcctgggagcggattgacaagaaagtggaaggcctgagcaagcacatcaagctggaagaggaacggagaagcgaggacgcccagagcaaggccgccctgaccgactggctgcgggctaaggccagcttcgtgatcgagggcctgaaggaggccgacaaggacgagttctgcagatgcgagctgaagctgcagaagtggtacggggacctgcggggaaagcccttcgccatcgaagccgagaacagcatcctggacatcagcggcttcagcaagcagtacaactgtgccttcatctggcagaaggacggcgtgaagaagctgaacctgtacctgatcatcaactacttcaagggcggcaagctgcggttcaagaagatcaaacctgaagccttcgaagccaacagattctacaccgtgatcaacaaaaagagcggcgagatcgtgcccatggaggtgaacttcaacttcgacgaccccaacctgatcatcctgcctctggcctttggcaagagacagggcagagaattcatctggaacgacctgctgtccctggaaaccggcagcctgaagctggccaacggaagagtgatcgagaagacactgtacaacagaagaacccggcaggatgagcctgccctgttcgtggccctgaccttcgagcggcgggaggtcctggactcctccaatatcaaaccaatgaacctgatcggcgtggcaagaggcgaaaacatccccgccgtgatcgccctgaccgaccccgagggctgcccactgagccggtttaaggatagcctgggaaacccaacccacatcctgagaatcggcgagagctataaggagaagcagcggaccatccaggccaagaaggaggtggagcagcggagagccggcggctacagccggaagtacgccagcaaagccaagaatctggcagacgatatggtgagaaacaccgctagagatctgctgtactacgccgtgacccaggatgccatgctgatcttcgccaacctgagccggggcttcggccggcagggcaagcggaccttcatggccgagagacagtacacacggatggaggactggctgaccgccaagctggcctacgagggcctgagcaagacctacctgtccaagacactggcccagtacacctccaagacatgcagcaactgtgggtttaccatcaccagcgccgactacgacagggtgctggagaagctgaagaagacagcaacaggctggatgaccacaattaacggcaaggagctgaaggtggagggccagattacctactacaacagatacaagagacagaacgtagtcaaggacctgtccgtcgagctggatagactgagcgaagaatctgtgaacaacgacatctcctcctggacaaagggcagaagcggagaagctctgagcctcctgaagaaaagattctcccatagacccgtgcaggagaagttcgtgtgcctgaactgcggcttcgagacacacgcagccgagcaagccgccctgaacatcgccagatcctggctgttcctgcggagccaggagtacaagaaataccagacaaacaagacaaccggcaacaccgataagagagccttcgtcgagacctggcagtccttttaccggaagaagcttaaggaggtgtggaaacctgccgtgcggtctggcggatctggcggaggctccaccagccccaagaaaaagagaaaagtctaagctgccttctgcggggcttgccttctggccatgcccttcttctctcccttgcacctgtacctcttggtctttgaataaagcctgagtaggaaggctagcaaaaaaaaaaaaaaaaaaaaaaaaaaaaaaaaaaaaaaaaaaaaaaaaaaaaaaaaaaaaaaaaaaaaaaaaaaaaaaaa

SEQ ID NO: 12880 - RNA, 5785 nt, synthetic construct
  source 1..5785: mol_type = other RNA
aggaaataagagagaaaagaagagtaagaagaaatataagagccaccatggcccctaagaagaagcgtaaagtgagccggatggaacgcctcgtctacgaggtgcggcagaagtgcagaaacatcgaggacatctgcatctcctgcggatctctgaacgtgaccctggagcacccactgttcatcggcggcatgtgccagaactgtaaaaactgttttctggagtgtgcctatcaatacgacgatgacggctaccagagctactgcaccatctgttgcggcggaagagaggtgctgatgtgtggaaataacaactgctgccggtgcttctgcgtggaatgcgtggacctgctggtgggccccggcgccgcccaggccgctattaaggaagatccttggaactgctacatgtgcggccacaagggcacatacggcctgctgagacggagagaggactggcctagcagactgcagatgttcttcgccaataaccacgaccaggagttcgacccccctaaggtgtaccctcccgtccccgccgagaagagaaagcccatccgggtcctgagcctgttcgatggcatcgccaccggtctgctggtgctgaaggacctgggcatccaggtggataggtacattgcctccgaggtgtgcgaggactccatcaccgtgggaatggtgcgtcatcagggcaagatcatgtacgtgggcgacgtgcggagcgtgacacagaagcatatccaggagtggggccctttcgacctggtgatcggcggcagcccttgcaatgacctgagcatcgtgaacccagcccggaagggcctgtacgagggaaccggcagactgttcttcgagttttacagactgctgcacgacgcccggcctaaggaaggcgacgaccggcccttcttttggctgttcgagaatgtggtggccatgggagtcagcgacaagcgggatattagccggttcctggagagcaaccccgtgatgatcgatgccaaggaagtgagcgccgcccaccgggccagatacttctggggcaatctgcctggcatgaacagacccctggccagcaccgtgaacgacaagctggagctgcaggagtgcctggagcacggccggatcgccaagttcagcaaggtgagaaccatcaccacccgaagcaacagcatcaaacaaggcaaggaccagcactttcctgtgttcatgaacgagaaggaggacatcctgtggtgtaccgagatggagagagtgttcgggttcccagtccactacacagatgtcagcaacatgtctagactggccagacagagactgctgggaagaagctggtccgtccctgtgatcagacacctgttcgcccctctgaaggagtacttcgcctgcgtgagcagcggcaacagcaacgccaacagccggggccccagcttctctagcggcctggtgccactgtccctgagagggagccacatgggccccatggagatctacaaaaccgtgagcgcctggaagcggcagcctgtgcgcgtgctgagcctgtttcggaatatcgataaagtcctgaaaagcctgggattcctggagagcggctctggctccggcggtggcaccctgaagtacgtggaggatgtgacaaacgtggtcagacgggatgtggagaagtggggccccttcgatctggtgtacggcagcacccaacccctgggcagctcttgtgaccggtgccctggctggtacatgtttcagttccaccggatcctgcagtacgccctgccgagacaggagtcccagcggccattcttttggattttcatggacaacttgctgctgaccgaggatgaccaggaaactaccactcggttcctgcagaccgaagccgtgaccctgcaggacgtgagaggccgggactaccagaacgccatgcgggtgtggtccaacatccctggactgaaaagcaagcacgcacctctgacccctaaagaagaggagtacctgcaggcccaggtgcggagcagaagcaagctggacgcccctaaggtggatctgctggtgaagaattgcctcctgcccctgagagagtacttcaagtatttcagccagaatagtctgcccctgggaggcagcggcggcggcccccagggccacctgaccttcatggacgtggccatcgagttcagccaggaggagtggaagtgcctggaccccggccagagggccctgtacagggacgtgatgctggagaactacaggaacctggtgagcctgggcatctgcctgcccgacctgagcatcatcagcatgctgaagcagaggagggagcccctgaccctgcagagcgaggtgaagatcgtgaagaaccccgacggcagggagtgcggcggcccaagcagcggcgcccctcctcccagcggcggcagcccagccggctccccaacctctaccgaggagggcacctctgagtccgccacccccgagagcggccctggcacctccaccgagcccagcgagggcagcgcacccggcagccctgccggcagccccacctccacagaggagggaaccagcaccgagcccagcgaaggcagcgccccaggcaccagcaccgagcctagtgagcaggagattaaacggatcaacaagatcagaagaagacttgtgaaagacagcaacaccaagaaggccggcaagacaggccccatgaaaaccctgctggttagagtgatgacacccgatctgagagagcggctggaaaacctgagaaagaagcctgaaaatatcccccagcccatcagcaatacatctagagccaacctgaataagctgctgaccgattacaccgaaatgaagaaggcgatcctgcatgtgtactgggaagagttccagaaggaccctgtgggcctgatgagccgggtggcccagcctgccagcaagaagatcgatcagaacaagctgaaacctgagatggacgagaagggcaacctgaccaccgccggctttgcctgctctcagtgtggccagcccctgttcgtgtacaagctggagcaggtgtctgagaagggcaaggcttacaccaactacttcggacggtgcaatgtggccgagcacgaaaagctgatcctgctggcccagctgaagcccgagaaggatagcgacgaagccgtgacatatagcctgggaaagtttgggcagagggccctggatttctacagcattcatgtgaccaaggagtccacccaccccgtgaagcccctggcccagatcgccggaaacagatacgcctccggacctgtgggaaaggccctgagcgacgcatgtatgggcacaatcgcctccttcctgtctaagtaccaggacatcatcatcgaacaccagaaggtggtgaagggcaaccagaagagactggagagcctgcgggagctggccggcaaggaaaacctggaataccctagcgtgaccctgccacctcagcctcacaccaaggagggcgttgatgcctacaacgaagtgatcgcccgggtgcgaatgtgggtgaacctgaacctgtggcagaagctgaagctaagcagagatgatgccaagcctctgctgagactgaagggattcccttcctttcctctggtcgagagacaggccaacgaagtggactggtgggacatggtgtgtaacgtgaagaagctgatcaacgagaaaaaggaggatggcaaggtgttttggcagaatctggctggctacaagagacaggaagccctgagaccatacctgagcagcgaggaagatcggaagaagggaaagaaattcgctcggtaccagctgggcgacctgctgctgcacctggaaaagaagcacggcgaggactggggaaaggtgtacgacgaggcctgggagcggattgacaagaaagtggaaggcctgagcaagcacatcaagctggaagaggaacggagaagcgaggacgcccagagcaaggccgccctgaccgactggctgcgggctaaggccagcttcgtgatcgagggcctgaaggaggccgacaaggacgagttctgcagatgcgagctgaagctgcagaagtggtacggggacctgcggggaaagcccttcgccatcgaagccgagaacagcatcctggacatcagcggcttcagcaagcagtacaactgtgccttcatctggcagaaggacggcgtgaagaagctgaacctgtacctgatcatcaactacttcaagggcggcaagctgcggttcaagaagatcaaacctgaagccttcgaagccaacagattctacaccgtgatcaacaaaaagagcggcgagatcgtgcccatggaggtgaacttcaacttcgacgaccccaacctgatcatcctgcctctggcctttggcaagagacagggcagagaattcatctggaacgacctgctgtccctggaaaccggcagcctgaagctggccaacggaagagtgatcgagaagacactgtacaacagaagaacccggcaggatgagcctgccctgttcgtggccctgaccttcgagcggcgggaggtcctggactcctccaatatcaaaccaatgaacctgatcggcgtggcaagaggcgaaaacatccccgccgtgatcgccctgaccgaccccgagggctgcccactgagccggtttaaggatagcctgggaaacccaacccacatcctgagaatcggcgagagctataaggagaagcagcggaccatccaggccaagaaggaggtggagcagcggagagccggcggctacagccggaagtacgccagcaaagccaagaatctggcagacgatatggtgagaaacaccgctagagatctgctgtactacgccgtgacccaggatgccatgctgatcttcgccaacctgagccggggcttcggccggcagggcaagcggaccttcatggccgagagacagtacacacggatggaggactggctgaccgccaagctggcctacgagggcctgagcaagacctacctgtccaagacactggcccagtacacctccaagacatgcagcaactgtgggtttaccatcaccagcgccgactacgacagggtgctggagaagctgaagaagacagcaacaggctggatgaccacaattaacggcaaggagctgaaggtggagggccagattacctactacaacagatacaagagacagaacgtagtcaaggacctgtccgtcgagctggatagactgagcgaagaatctgtgaacaacgacatctcctcctggacaaagggcagaagcggagaagctctgagcctcctgaagaaaagattctcccatagacccgtgcaggagaagttcgtgtgcctgaactgcggcttcgagacacacgcagccgagcaagccgccctgaacatcgccagatcctggctgttcctgcggagccaggagtacaagaaataccagacaaacaagacaaccggcaacaccgataagagagccttcgtcgagacctggcagtccttttaccggaagaagcttaaggaggtgtggaaacctgccgtgcggtctggcggatctggcggaggctccaccagccccaagaaaaagagaaaagtctaagctgccttctgcggggcttgccttctggccatgcccttcttctctcccttgcacctgtacctcttggtctttgaataaagcctgagtaggaaggctagcaaaaaaaaaaaaaaaaaaaaaaaaaaaaaaaaaaaaaaaaaaaaaaaaaaaaaaaaaaaaaaaaaaaaaaaaaaaaaaaa

SEQ ID NO: 12881 - RNA, 5785 nt, synthetic construct
  source 1..5785: mol_type = other RNA
aggaaataagagagaaaagaagagtaagaagaaatataagagccaccatggcccctaagaagaagcgtaaagtgagccggatggaacgcctcgtctacgaggtgcggcagaagtgcagaaacatcgaggacatctgcatctcctgcggatctctgaacgtgaccctggagcacccactgttcatcggcggcatgtgccagaactgtaaaaactgttttctggagtgtgcctatcaatacgacgatgacggctaccagagctactgcaccatctgttgcggcggaagagaggtgctgatgtgtggaaataacaactgctgccggtgcttctgcgtggaatgcgtggacctgctggtgggccccggcgccgcccaggccgctattaaggaagatccttggaactgctacatgtgcggccacaagggcacatacggcctgctgagacggagagaggactggcctagcagactgcagatgttcttcgccaataaccacgaccaggagttcgacccccctaaggtgtaccctcccgtccccgccgagaagagaaagcccatccgggtcctgagcctgttcgatggcatcgccaccggtctgctggtgctgaaggacctgggcatccaggtggataggtacattgcctccgaggtgtgcgaggactccatcaccgtgggaatggtgcgtcatcagggcaagatcatgtacgtgggcgacgtgcggagcgtgacacagaagcatatccaggagtggggccctttcgacctggtgatcggcggcagcccttgcaatgacctgagcatcgtgaacccagcccggaagggcctgtacgagggaaccggcagactgttcttcgagttttacagactgctgcacgacgcccggcctaaggaaggcgacgaccggcccttcttttggctgttcgagaatgtggtggccatgggagtcagcgacaagcgggatattagccggttcctggagagcaaccccgtgatgatcgatgccaaggaagtgagcgccgcccaccgggccagatacttctggggcaatctgcctggcatgaacagacccctggccagcaccgtgaacgacaagctggagctgcaggagtgcctggagcacggccggatcgccaagttcagcaaggtgagaaccatcaccacccgaagcaacagcatcaaacaaggcaaggaccagcactttcctgtgttcatgaacgagaaggaggacatcctgtggtgtaccgagatggagagagtgttcgggttcccagtccactacacagatgtcagcaacatgtctagactggccagacagagactgctgggaagaagctggtccgtccctgtgatcagacacctgttcgcccctctgaaggagtacttcgcctgcgtgagcagcggcaacagcaacgccaacagccggggccccagcttctctagcggcctggtgccactgtccctgagagggagccacatgggccccatggagatctacaaaaccgtgagcgcctggaagcggcagcctgtgcgcgtgctgagcctgtttcggaatatcgataaagtcctgaaaagcctgggattcctggagagcggctctggctccggcggtggcaccctgaagtacgtggaggatgtgacaaacgtggtcagacgggatgtggagaagtggggccccttcgatctggtgtacggcagcacccaacccctgggcagctcttgtgaccggtgccctggctggtacatgtttcagttccaccggatcctgcagtacgccctgccgagacaggagtcccagcggccattcttttggattttcatggacaacttgctgctgaccgaggatgaccaggaaactaccactcggttcctgcagaccgaagccgtgaccctgcaggacgtgagaggccgggactaccagaacgccatgcgggtgtggtccaacatccctggactgaaaagcaagcacgcacctctgacccctaaagaagaggagtacctgcaggcccaggtgcggagcagaagcaagctggacgcccctaaggtggatctgctggtgaagaattgcctcctgcccctgagagagtacttcaagtatttcagccagaatagtctgcccctgggaggcagcggcggcggcagcaaggcccccatcaccttcggcgacctggccatctacttcagccaggaggagtgggagtggctgagccccatccagaaggacctgtacgaggacgtgatgctggagaactacaggaacctggtgagcctgggcctgagcttcaggaggcccaacgtgatcaccctgctggagaagggcaaggccccctggatggtggagcccgtgaggaggaggagggcccccgacagcggcagcaagtgcggcggcccaagcagcggcgcccctcctcccagcggcggcagcccagccggctccccaacctctaccgaggagggcacctctgagtccgccacccccgagagcggccctggcacctccaccgagcccagcgagggcagcgcacccggcagccctgccggcagccccacctccacagaggagggaaccagcaccgagcccagcgaaggcagcgccccaggcaccagcaccgagcctagtgagcaggagattaaacggatcaacaagatcagaagaagacttgtgaaagacagcaacaccaagaaggccggcaagacaggccccatgaaaaccctgctggttagagtgatgacacccgatctgagagagcggctggaaaacctgagaaagaagcctgaaaatatcccccagcccatcagcaatacatctagagccaacctgaataagctgctgaccgattacaccgaaatgaagaaggcgatcctgcatgtgtactgggaagagttccagaaggaccctgtgggcctgatgagccgggtggcccagcctgccagcaagaagatcgatcagaacaagctgaaacctgagatggacgagaagggcaacctgaccaccgccggctttgcctgctctcagtgtggccagcccctgttcgtgtacaagctggagcaggtgtctgagaagggcaaggcttacaccaactacttcggacggtgcaatgtggccgagcacgaaaagctgatcctgctggcccagctgaagcccgagaaggatagcgacgaagccgtgacatatagcctgggaaagtttgggcagagggccctggatttctacagcattcatgtgaccaaggagtccacccaccccgtgaagcccctggcccagatcgccggaaacagatacgcctccggacctgtgggaaaggccctgagcgacgcatgtatgggcacaatcgcctccttcctgtctaagtaccaggacatcatcatcgaacaccagaaggtggtgaagggcaaccagaagagactggagagcctgcgggagctggccggcaaggaaaacctggaataccctagcgtgaccctgccacctcagcctcacaccaaggagggcgttgatgcctacaacgaagtgatcgcccgggtgcgaatgtgggtgaacctgaacctgtggcagaagctgaagctaagcagagatgatgccaagcctctgctgagactgaagggattcccttcctttcctctggtcgagagacaggccaacgaagtggactggtgggacatggtgtgtaacgtgaagaagctgatcaacgagaaaaaggaggatggcaaggtgttttggcagaatctggctggctacaagagacaggaagccctgagaccatacctgagcagcgaggaagatcggaagaagggaaagaaattcgctcggtaccagctgggcgacctgctgctgcacctggaaaagaagcacggcgaggactggggaaaggtgtacgacgaggcctgggagcggattgacaagaaagtggaaggcctgagcaagcacatcaagctggaagaggaacggagaagcgaggacgcccagagcaaggccgccctgaccgactggctgcgggctaaggccagcttcgtgatcgagggcctgaaggaggccgacaaggacgagttctgcagatgcgagctgaagctgcagaagtggtacggggacctgcggggaaagcccttcgccatcgaagccgagaacagcatcctggacatcagcggcttcagcaagcagtacaactgtgccttcatctggcagaaggacggcgtgaagaagctgaacctgtacctgatcatcaactacttcaagggcggcaagctgcggttcaagaagatcaaacctgaagccttcgaagccaacagattctacaccgtgatcaacaaaaagagcggcgagatcgtgcccatggaggtgaacttcaacttcgacgaccccaacctgatcatcctgcctctggcctttggcaagagacagggcagagaattcatctggaacgacctgctgtccctggaaaccggcagcctgaagctggccaacggaagagtgatcgagaagacactgtacaacagaagaacccggcaggatgagcctgccctgttcgtggccctgaccttcgagcggcgggaggtcctggactcctccaatatcaaaccaatgaacctgatcggcgtggcaagaggcgaaaacatccccgccgtgatcgccctgaccgaccccgagggctgcccactgagccggtttaaggatagcctgggaaacccaacccacatcctgagaatcggcgagagctataaggagaagcagcggaccatccaggccaagaaggaggtggagcagcggagagccggcggctacagccggaagtacgccagcaaagccaagaatctggcagacgatatggtgagaaacaccgctagagatctgctgtactacgccgtgacccaggatgccatgctgatcttcgccaacctgagccggggcttcggccggcagggcaagcggaccttcatggccgagagacagtacacacggatggaggactggctgaccgccaagctggcctacgagggcctgagcaagacctacctgtccaagacactggcccagtacacctccaagacatgcagcaactgtgggtttaccatcaccagcgccgactacgacagggtgctggagaagctgaagaagacagcaacaggctggatgaccacaattaacggcaaggagctgaaggtggagggccagattacctactacaacagatacaagagacagaacgtagtcaaggacctgtccgtcgagctggatagactgagcgaagaatctgtgaacaacgacatctcctcctggacaaagggcagaagcggagaagctctgagcctcctgaagaaaagattctcccatagacccgtgcaggagaagttcgtgtgcctgaactgcggcttcgagacacacgcagccgagcaagccgccctgaacatcgccagatcctggctgttcctgcggagccaggagtacaagaaataccagacaaacaagacaaccggcaacaccgataagagagccttcgtcgagacctggcagtccttttaccggaagaagcttaaggaggtgtggaaacctgccgtgcggtctggcggatctggcggaggctccaccagccccaagaaaaagagaaaagtctaagctgccttctgcggggcttgccttctggccatgcccttcttctctcccttgcacctgtacctcttggtctttgaataaagcctgagtaggaaggctagcaaaaaaaaaaaaaaaaaaaaaaaaaaaaaaaaaaaaaaaaaaaaaaaaaaaaaaaaaaaaaaaaaaaaaaaaaaaaaaaa

SEQ ID NO: 12882 - RNA, 5785 nt, synthetic construct
  source 1..5785: mol_type = other RNA
aggaaataagagagaaaagaagagtaagaagaaatataagagccaccatggcccctaagaagaagcgtaaagtgagccggatggaacgcctcgtctacgaggtgcggcagaagtgcagaaacatcgaggacatctgcatctcctgcggatctctgaacgtgaccctggagcacccactgttcatcggcggcatgtgccagaactgtaaaaactgttttctggagtgtgcctatcaatacgacgatgacggctaccagagctactgcaccatctgttgcggcggaagagaggtgctgatgtgtggaaataacaactgctgccggtgcttctgcgtggaatgcgtggacctgctggtgggccccggcgccgcccaggccgctattaaggaagatccttggaactgctacatgtgcggccacaagggcacatacggcctgctgagacggagagaggactggcctagcagactgcagatgttcttcgccaataaccacgaccaggagttcgacccccctaaggtgtaccctcccgtccccgccgagaagagaaagcccatccgggtcctgagcctgttcgatggcatcgccaccggtctgctggtgctgaaggacctgggcatccaggtggataggtacattgcctccgaggtgtgcgaggactccatcaccgtgggaatggtgcgtcatcagggcaagatcatgtacgtgggcgacgtgcggagcgtgacacagaagcatatccaggagtggggccctttcgacctggtgatcggcggcagcccttgcaatgacctgagcatcgtgaacccagcccggaagggcctgtacgagggaaccggcagactgttcttcgagttttacagactgctgcacgacgcccggcctaaggaaggcgacgaccggcccttcttttggctgttcgagaatgtggtggccatgggagtcagcgacaagcgggatattagccggttcctggagagcaaccccgtgatgatcgatgccaaggaagtgagcgccgcccaccgggccagatacttctggggcaatctgcctggcatgaacagacccctggccagcaccgtgaacgacaagctggagctgcaggagtgcctggagcacggccggatcgccaagttcagcaaggtgagaaccatcaccacccgaagcaacagcatcaaacaaggcaaggaccagcactttcctgtgttcatgaacgagaaggaggacatcctgtggtgtaccgagatggagagagtgttcgggttcccagtccactacacagatgtcagcaacatgtctagactggccagacagagactgctgggaagaagctggtccgtccctgtgatcagacacctgttcgcccctctgaaggagtacttcgcctgcgtgagcagcggcaacagcaacgccaacagccggggccccagcttctctagcggcctggtgccactgtccctgagagggagccacatgggccccatggagatctacaaaaccgtgagcgcctggaagcggcagcctgtgcgcgtgctgagcctgtttcggaatatcgataaagtcctgaaaagcctgggattcctggagagcggctctggctccggcggtggcaccctgaagtacgtggaggatgtgacaaacgtggtcagacgggatgtggagaagtggggccccttcgatctggtgtacggcagcacccaacccctgggcagctcttgtgaccggtgccctggctggtacatgtttcagttccaccggatcctgcagtacgccctgccgagacaggagtcccagcggccattcttttggattttcatggacaacttgctgctgaccgaggatgaccaggaaactaccactcggttcctgcagaccgaagccgtgaccctgcaggacgtgagaggccgggactaccagaacgccatgcgggtgtggtccaacatccctggactgaaaagcaagcacgcacctctgacccctaaagaagaggagtacctgcaggcccaggtgcggagcagaagcaagctggacgcccctaaggtggatctgctggtgaagaattgcctcctgcccctgagagagtacttcaagtatttcagccagaatagtctgcccctgggaggcagcggcggcggcagcaaggccagcgtgaccttcggcgacctggccatctacttcagcagggaggagtgggagtggctgagccccatccagaaggacctgtacgaggacgtgatgctggagaactaccagaccctggtgagcctgggcctggtgtgcaggaggcccaacatcatcaccctgctggagaagggcaaggccccctggatggtggagcccagcaggaggaggaggggccccgagagcggcagcaagaggggcggcccaagcagcggcgcccctcctcccagcggcggcagcccagccggctccccaacctctaccgaggagggcacctctgagtccgccacccccgagagcggccctggcacctccaccgagcccagcgagggcagcgcacccggcagccctgccggcagccccacctccacagaggagggaaccagcaccgagcccagcgaaggcagcgccccaggcaccagcaccgagcctagtgagcaggagattaaacggatcaacaagatcagaagaagacttgtgaaagacagcaacaccaagaaggccggcaagacaggccccatgaaaaccctgctggttagagtgatgacacccgatctgagagagcggctggaaaacctgagaaagaagcctgaaaatatcccccagcccatcagcaatacatctagagccaacctgaataagctgctgaccgattacaccgaaatgaagaaggcgatcctgcatgtgtactgggaagagttccagaaggaccctgtgggcctgatgagccgggtggcccagcctgccagcaagaagatcgatcagaacaagctgaaacctgagatggacgagaagggcaacctgaccaccgccggctttgcctgctctcagtgtggccagcccctgttcgtgtacaagctggagcaggtgtctgagaagggcaaggcttacaccaactacttcggacggtgcaatgtggccgagcacgaaaagctgatcctgctggcccagctgaagcccgagaaggatagcgacgaagccgtgacatatagcctgggaaagtttgggcagagggccctggatttctacagcattcatgtgaccaaggagtccacccaccccgtgaagcccctggcccagatcgccggaaacagatacgcctccggacctgtgggaaaggccctgagcgacgcatgtatgggcacaatcgcctccttcctgtctaagtaccaggacatcatcatcgaacaccagaaggtggtgaagggcaaccagaagagactggagagcctgcgggagctggccggcaaggaaaacctggaataccctagcgtgaccctgccacctcagcctcacaccaaggagggcgttgatgcctacaacgaagtgatcgcccgggtgcgaatgtgggtgaacctgaacctgtggcagaagctgaagctaagcagagatgatgccaagcctctgctgagactgaagggattcccttcctttcctctggtcgagagacaggccaacgaagtggactggtgggacatggtgtgtaacgtgaagaagctgatcaacgagaaaaaggaggatggcaaggtgttttggcagaatctggctggctacaagagacaggaagccctgagaccatacctgagcagcgaggaagatcggaagaagggaaagaaattcgctcggtaccagctgggcgacctgctgctgcacctggaaaagaagcacggcgaggactggggaaaggtgtacgacgaggcctgggagcggattgacaagaaagtggaaggcctgagcaagcacatcaagctggaagaggaacggagaagcgaggacgcccagagcaaggccgccctgaccgactggctgcgggctaaggccagcttcgtgatcgagggcctgaaggaggccgacaaggacgagttctgcagatgcgagctgaagctgcagaagtggtacggggacctgcggggaaagcccttcgccatcgaagccgagaacagcatcctggacatcagcggcttcagcaagcagtacaactgtgccttcatctggcagaaggacggcgtgaagaagctgaacctgtacctgatcatcaactacttcaagggcggcaagctgcggttcaagaagatcaaacctgaagccttcgaagccaacagattctacaccgtgatcaacaaaaagagcggcgagatcgtgcccatggaggtgaacttcaacttcgacgaccccaacctgatcatcctgcctctggcctttggcaagagacagggcagagaattcatctggaacgacctgctgtccctggaaaccggcagcctgaagctggccaacggaagagtgatcgagaagacactgtacaacagaagaacccggcaggatgagcctgccctgttcgtggccctgaccttcgagcggcgggaggtcctggactcctccaatatcaaaccaatgaacctgatcggcgtggcaagaggcgaaaacatccccgccgtgatcgccctgaccgaccccgagggctgcccactgagccggtttaaggatagcctgggaaacccaacccacatcctgagaatcggcgagagctataaggagaagcagcggaccatccaggccaagaaggaggtggagcagcggagagccggcggctacagccggaagtacgccagcaaagccaagaatctggcagacgatatggtgagaaacaccgctagagatctgctgtactacgccgtgacccaggatgccatgctgatcttcgccaacctgagccggggcttcggccggcagggcaagcggaccttcatggccgagagacagtacacacggatggaggactggctgaccgccaagctggcctacgagggcctgagcaagacctacctgtccaagacactggcccagtacacctccaagacatgcagcaactgtgggtttaccatcaccagcgccgactacgacagggtgctggagaagctgaagaagacagcaacaggctggatgaccacaattaacggcaaggagctgaaggtggagggccagattacctactacaacagatacaagagacagaacgtagtcaaggacctgtccgtcgagctggatagactgagcgaagaatctgtgaacaacgacatctcctcctggacaaagggcagaagcggagaagctctgagcctcctgaagaaaagattctcccatagacccgtgcaggagaagttcgtgtgcctgaactgcggcttcgagacacacgcagccgagcaagccgccctgaacatcgccagatcctggctgttcctgcggagccaggagtacaagaaataccagacaaacaagacaaccggcaacaccgataagagagccttcgtcgagacctggcagtccttttaccggaagaagcttaaggaggtgtggaaacctgccgtgcggtctggcggatctggcggaggctccaccagccccaagaaaaagagaaaagtctaagctgccttctgcggggcttgccttctggccatgcccttcttctctcccttgcacctgtacctcttggtctttgaataaagcctgagtaggaaggctagcaaaaaaaaaaaaaaaaaaaaaaaaaaaaaaaaaaaaaaaaaaaaaaaaaaaaaaaaaaaaaaaaaaaaaaaaaaaaaaaa

SEQ ID NO: 12883 - RNA, 5785 nt, synthetic construct
  source 1..5785: mol_type = other RNA
aggaaataagagagaaaagaagagtaagaagaaatataagagccaccatggcccctaagaagaagcgtaaagtgagccggatggaacgcctcgtctacgaggtgcggcagaagtgcagaaacatcgaggacatctgcatctcctgcggatctctgaacgtgaccctggagcacccactgttcatcggcggcatgtgccagaactgtaaaaactgttttctggagtgtgcctatcaatacgacgatgacggctaccagagctactgcaccatctgttgcggcggaagagaggtgctgatgtgtggaaataacaactgctgccggtgcttctgcgtggaatgcgtggacctgctggtgggccccggcgccgcccaggccgctattaaggaagatccttggaactgctacatgtgcggccacaagggcacatacggcctgctgagacggagagaggactggcctagcagactgcagatgttcttcgccaataaccacgaccaggagttcgacccccctaaggtgtaccctcccgtccccgccgagaagagaaagcccatccgggtcctgagcctgttcgatggcatcgccaccggtctgctggtgctgaaggacctgggcatccaggtggataggtacattgcctccgaggtgtgcgaggactccatcaccgtgggaatggtgcgtcatcagggcaagatcatgtacgtgggcgacgtgcggagcgtgacacagaagcatatccaggagtggggccctttcgacctggtgatcggcggcagcccttgcaatgacctgagcatcgtgaacccagcccggaagggcctgtacgagggaaccggcagactgttcttcgagttttacagactgctgcacgacgcccggcctaaggaaggcgacgaccggcccttcttttggctgttcgagaatgtggtggccatgggagtcagcgacaagcgggatattagccggttcctggagagcaaccccgtgatgatcgatgccaaggaagtgagcgccgcccaccgggccagatacttctggggcaatctgcctggcatgaacagacccctggccagcaccgtgaacgacaagctggagctgcaggagtgcctggagcacggccggatcgccaagttcagcaaggtgagaaccatcaccacccgaagcaacagcatcaaacaaggcaaggaccagcactttcctgtgttcatgaacgagaaggaggacatcctgtggtgtaccgagatggagagagtgttcgggttcccagtccactacacagatgtcagcaacatgtctagactggccagacagagactgctgggaagaagctggtccgtccctgtgatcagacacctgttcgcccctctgaaggagtacttcgcctgcgtgagcagcggcaacagcaacgccaacagccggggccccagcttctctagcggcctggtgccactgtccctgagagggagccacatgggccccatggagatctacaaaaccgtgagcgcctggaagcggcagcctgtgcgcgtgctgagcctgtttcggaatatcgataaagtcctgaaaagcctgggattcctggagagcggctctggctccggcggtggcaccctgaagtacgtggaggatgtgacaaacgtggtcagacgggatgtggagaagtggggccccttcgatctggtgtacggcagcacccaacccctgggcagctcttgtgaccggtgccctggctggtacatgtttcagttccaccggatcctgcagtacgccctgccgagacaggagtcccagcggccattcttttggattttcatggacaacttgctgctgaccgaggatgaccaggaaactaccactcggttcctgcagaccgaagccgtgaccctgcaggacgtgagaggccgggactaccagaacgccatgcgggtgtggtccaacatccctggactgaaaagcaagcacgcacctctgacccctaaagaagaggagtacctgcaggcccaggtgcggagcagaagcaagctggacgcccctaaggtggatctgctggtgaagaattgcctcctgcccctgagagagtacttcaagtatttcagccagaatagtctgcccctgggaggcagcggcggcggcacccaggagagcctgaccctggaggacgtggccgtggagttcagctgggaggagtggcagctgctggacaccgcccagaaggacctgtacagggacgtgatggtggagaactacaaccacctggtgagcctgggctaccagaccagcaagcccgacgccctgagcaagctggcccacggccaggagccctggatgaccgacgccaagatccagaacaagaactgccccggcatcaggaaggtgggcggcccaagcagcggcgcccctcctcccagcggcggcagcccagccggctccccaacctctaccgaggagggcacctctgagtccgccacccccgagagcggccctggcacctccaccgagcccagcgagggcagcgcacccggcagccctgccggcagccccacctccacagaggagggaaccagcaccgagcccagcgaaggcagcgccccaggcaccagcaccgagcctagtgagcaggagattaaacggatcaacaagatcagaagaagacttgtgaaagacagcaacaccaagaaggccggcaagacaggccccatgaaaaccctgctggttagagtgatgacacccgatctgagagagcggctggaaaacctgagaaagaagcctgaaaatatcccccagcccatcagcaatacatctagagccaacctgaataagctgctgaccgattacaccgaaatgaagaaggcgatcctgcatgtgtactgggaagagttccagaaggaccctgtgggcctgatgagccgggtggcccagcctgccagcaagaagatcgatcagaacaagctgaaacctgagatggacgagaagggcaacctgaccaccgccggctttgcctgctctcagtgtggccagcccctgttcgtgtacaagctggagcaggtgtctgagaagggcaaggcttacaccaactacttcggacggtgcaatgtggccgagcacgaaaagctgatcctgctggcccagctgaagcccgagaaggatagcgacgaagccgtgacatatagcctgggaaagtttgggcagagggccctggatttctacagcattcatgtgaccaaggagtccacccaccccgtgaagcccctggcccagatcgccggaaacagatacgcctccggacctgtgggaaaggccctgagcgacgcatgtatgggcacaatcgcctccttcctgtctaagtaccaggacatcatcatcgaacaccagaaggtggtgaagggcaaccagaagagactggagagcctgcgggagctggccggcaaggaaaacctggaataccctagcgtgaccctgccacctcagcctcacaccaaggagggcgttgatgcctacaacgaagtgatcgcccgggtgcgaatgtgggtgaacctgaacctgtggcagaagctgaagctaagcagagatgatgccaagcctctgctgagactgaagggattcccttcctttcctctggtcgagagacaggccaacgaagtggactggtgggacatggtgtgtaacgtgaagaagctgatcaacgagaaaaaggaggatggcaaggtgttttggcagaatctggctggctacaagagacaggaagccctgagaccatacctgagcagcgaggaagatcggaagaagggaaagaaattcgctcggtaccagctgggcgacctgctgctgcacctggaaaagaagcacggcgaggactggggaaaggtgtacgacgaggcctgggagcggattgacaagaaagtggaaggcctgagcaagcacatcaagctggaagaggaacggagaagcgaggacgcccagagcaaggccgccctgaccgactggctgcgggctaaggccagcttcgtgatcgagggcctgaaggaggccgacaaggacgagttctgcagatgcgagctgaagctgcagaagtggtacggggacctgcggggaaagcccttcgccatcgaagccgagaacagcatcctggacatcagcggcttcagcaagcagtacaactgtgccttcatctggcagaaggacggcgtgaagaagctgaacctgtacctgatcatcaactacttcaagggcggcaagctgcggttcaagaagatcaaacctgaagccttcgaagccaacagattctacaccgtgatcaacaaaaagagcggcgagatcgtgcccatggaggtgaacttcaacttcgacgaccccaacctgatcatcctgcctctggcctttggcaagagacagggcagagaattcatctggaacgacctgctgtccctggaaaccggcagcctgaagctggccaacggaagagtgatcgagaagacactgtacaacagaagaacccggcaggatgagcctgccctgttcgtggccctgaccttcgagcggcgggaggtcctggactcctccaatatcaaaccaatgaacctgatcggcgtggcaagaggcgaaaacatccccgccgtgatcgccctgaccgaccccgagggctgcccactgagccggtttaaggatagcctgggaaacccaacccacatcctgagaatcggcgagagctataaggagaagcagcggaccatccaggccaagaaggaggtggagcagcggagagccggcggctacagccggaagtacgccagcaaagccaagaatctggcagacgatatggtgagaaacaccgctagagatctgctgtactacgccgtgacccaggatgccatgctgatcttcgccaacctgagccggggcttcggccggcagggcaagcggaccttcatggccgagagacagtacacacggatggaggactggctgaccgccaagctggcctacgagggcctgagcaagacctacctgtccaagacactggcccagtacacctccaagacatgcagcaactgtgggtttaccatcaccagcgccgactacgacagggtgctggagaagctgaagaagacagcaacaggctggatgaccacaattaacggcaaggagctgaaggtggagggccagattacctactacaacagatacaagagacagaacgtagtcaaggacctgtccgtcgagctggatagactgagcgaagaatctgtgaacaacgacatctcctcctggacaaagggcagaagcggagaagctctgagcctcctgaagaaaagattctcccatagacccgtgcaggagaagttcgtgtgcctgaactgcggcttcgagacacacgcagccgagcaagccgccctgaacatcgccagatcctggctgttcctgcggagccaggagtacaagaaataccagacaaacaagacaaccggcaacaccgataagagagccttcgtcgagacctggcagtccttttaccggaagaagcttaaggaggtgtggaaacctgccgtgcggtctggcggatctggcggaggctccaccagccccaagaaaaagagaaaagtctaagctgccttctgcggggcttgccttctggccatgcccttcttctctcccttgcacctgtacctcttggtctttgaataaagcctgagtaggaaggctagcaaaaaaaaaaaaaaaaaaaaaaaaaaaaaaaaaaaaaaaaaaaaaaaaaaaaaaaaaaaaaaaaaaaaaaaaaaaaaaaa

SEQ ID NO: 12884 - RNA, 5785 nt, synthetic construct
  source 1..5785: mol_type = other RNA
aggaaataagagagaaaagaagagtaagaagaaatataagagccaccatggcccctaagaagaagcgtaaagtgagccggatggaacgcctcgtctacgaggtgcggcagaagtgcagaaacatcgaggacatctgcatctcctgcggatctctgaacgtgaccctggagcacccactgttcatcggcggcatgtgccagaactgtaaaaactgttttctggagtgtgcctatcaatacgacgatgacggctaccagagctactgcaccatctgttgcggcggaagagaggtgctgatgtgtggaaataacaactgctgccggtgcttctgcgtggaatgcgtggacctgctggtgggccccggcgccgcccaggccgctattaaggaagatccttggaactgctacatgtgcggccacaagggcacatacggcctgctgagacggagagaggactggcctagcagactgcagatgttcttcgccaataaccacgaccaggagttcgacccccctaaggtgtaccctcccgtccccgccgagaagagaaagcccatccgggtcctgagcctgttcgatggcatcgccaccggtctgctggtgctgaaggacctgggcatccaggtggataggtacattgcctccgaggtgtgcgaggactccatcaccgtgggaatggtgcgtcatcagggcaagatcatgtacgtgggcgacgtgcggagcgtgacacagaagcatatccaggagtggggccctttcgacctggtgatcggcggcagcccttgcaatgacctgagcatcgtgaacccagcccggaagggcctgtacgagggaaccggcagactgttcttcgagttttacagactgctgcacgacgcccggcctaaggaaggcgacgaccggcccttcttttggctgttcgagaatgtggtggccatgggagtcagcgacaagcgggatattagccggttcctggagagcaaccccgtgatgatcgatgccaaggaagtgagcgccgcccaccgggccagatacttctggggcaatctgcctggcatgaacagacccctggccagcaccgtgaacgacaagctggagctgcaggagtgcctggagcacggccggatcgccaagttcagcaaggtgagaaccatcaccacccgaagcaacagcatcaaacaaggcaaggaccagcactttcctgtgttcatgaacgagaaggaggacatcctgtggtgtaccgagatggagagagtgttcgggttcccagtccactacacagatgtcagcaacatgtctagactggccagacagagactgctgggaagaagctggtccgtccctgtgatcagacacctgttcgcccctctgaaggagtacttcgcctgcgtgagcagcggcaacagcaacgccaacagccggggccccagcttctctagcggcctggtgccactgtccctgagagggagccacatgggccccatggagatctacaaaaccgtgagcgcctggaagcggcagcctgtgcgcgtgctgagcctgtttcggaatatcgataaagtcctgaaaagcctgggattcctggagagcggctctggctccggcggtggcaccctgaagtacgtggaggatgtgacaaacgtggtcagacgggatgtggagaagtggggccccttcgatctggtgtacggcagcacccaacccctgggcagctcttgtgaccggtgccctggctggtacatgtttcagttccaccggatcctgcagtacgccctgccgagacaggagtcccagcggccattcttttggattttcatggacaacttgctgctgaccgaggatgaccaggaaactaccactcggttcctgcagaccgaagccgtgaccctgcaggacgtgagaggccgggactaccagaacgccatgcgggtgtggtccaacatccctggactgaaaagcaagcacgcacctctgacccctaaagaagaggagtacctgcaggcccaggtgcggagcagaagcaagctggacgcccctaaggtggatctgctggtgaagaattgcctcctgcccctgagagagtacttcaagtatttcagccagaatagtctgcccctgggaggcagcggcggcggcagccagggccccgtgaagttcgaggacgtggccatctacctgtggaaggaggagtgggagctgatggacagcacccagaagaggctgtacaggcaggtgatgctggagacctacgagaacgtgctgagcgtgggcaccccccacgacaagcccgccatgatcgtgcacctggagcagggcgagaccgcctggagccccgccctgcagaggcccggcaaggagaagggcaggctgcacggccacggcggcccaagcagcggcgcccctcctcccagcggcggcagcccagccggctccccaacctctaccgaggagggcacctctgagtccgccacccccgagagcggccctggcacctccaccgagcccagcgagggcagcgcacccggcagccctgccggcagccccacctccacagaggagggaaccagcaccgagcccagcgaaggcagcgccccaggcaccagcaccgagcctagtgagcaggagattaaacggatcaacaagatcagaagaagacttgtgaaagacagcaacaccaagaaggccggcaagacaggccccatgaaaaccctgctggttagagtgatgacacccgatctgagagagcggctggaaaacctgagaaagaagcctgaaaatatcccccagcccatcagcaatacatctagagccaacctgaataagctgctgaccgattacaccgaaatgaagaaggcgatcctgcatgtgtactgggaagagttccagaaggaccctgtgggcctgatgagccgggtggcccagcctgccagcaagaagatcgatcagaacaagctgaaacctgagatggacgagaagggcaacctgaccaccgccggctttgcctgctctcagtgtggccagcccctgttcgtgtacaagctggagcaggtgtctgagaagggcaaggcttacaccaactacttcggacggtgcaatgtggccgagcacgaaaagctgatcctgctggcccagctgaagcccgagaaggatagcgacgaagccgtgacatatagcctgggaaagtttgggcagagggccctggatttctacagcattcatgtgaccaaggagtccacccaccccgtgaagcccctggcccagatcgccggaaacagatacgcctccggacctgtgggaaaggccctgagcgacgcatgtatgggcacaatcgcctccttcctgtctaagtaccaggacatcatcatcgaacaccagaaggtggtgaagggcaaccagaagagactggagagcctgcgggagctggccggcaaggaaaacctggaataccctagcgtgaccctgccacctcagcctcacaccaaggagggcgttgatgcctacaacgaagtgatcgcccgggtgcgaatgtgggtgaacctgaacctgtggcagaagctgaagctaagcagagatgatgccaagcctctgctgagactgaagggattcccttcctttcctctggtcgagagacaggccaacgaagtggactggtgggacatggtgtgtaacgtgaagaagctgatcaacgagaaaaaggaggatggcaaggtgttttggcagaatctggctggctacaagagacaggaagccctgagaccatacctgagcagcgaggaagatcggaagaagggaaagaaattcgctcggtaccagctgggcgacctgctgctgcacctggaaaagaagcacggcgaggactggggaaaggtgtacgacgaggcctgggagcggattgacaagaaagtggaaggcctgagcaagcacatcaagctggaagaggaacggagaagcgaggacgcccagagcaaggccgccctgaccgactggctgcgggctaaggccagcttcgtgatcgagggcctgaaggaggccgacaaggacgagttctgcagatgcgagctgaagctgcagaagtggtacggggacctgcggggaaagcccttcgccatcgaagccgagaacagcatcctggacatcagcggcttcagcaagcagtacaactgtgccttcatctggcagaaggacggcgtgaagaagctgaacctgtacctgatcatcaactacttcaagggcggcaagctgcggttcaagaagatcaaacctgaagccttcgaagccaacagattctacaccgtgatcaacaaaaagagcggcgagatcgtgcccatggaggtgaacttcaacttcgacgaccccaacctgatcatcctgcctctggcctttggcaagagacagggcagagaattcatctggaacgacctgctgtccctggaaaccggcagcctgaagctggccaacggaagagtgatcgagaagacactgtacaacagaagaacccggcaggatgagcctgccctgttcgtggccctgaccttcgagcggcgggaggtcctggactcctccaatatcaaaccaatgaacctgatcggcgtggcaagaggcgaaaacatccccgccgtgatcgccctgaccgaccccgagggctgcccactgagccggtttaaggatagcctgggaaacccaacccacatcctgagaatcggcgagagctataaggagaagcagcggaccatccaggccaagaaggaggtggagcagcggagagccggcggctacagccggaagtacgccagcaaagccaagaatctggcagacgatatggtgagaaacaccgctagagatctgctgtactacgccgtgacccaggatgccatgctgatcttcgccaacctgagccggggcttcggccggcagggcaagcggaccttcatggccgagagacagtacacacggatggaggactggctgaccgccaagctggcctacgagggcctgagcaagacctacctgtccaagacactggcccagtacacctccaagacatgcagcaactgtgggtttaccatcaccagcgccgactacgacagggtgctggagaagctgaagaagacagcaacaggctggatgaccacaattaacggcaaggagctgaaggtggagggccagattacctactacaacagatacaagagacagaacgtagtcaaggacctgtccgtcgagctggatagactgagcgaagaatctgtgaacaacgacatctcctcctggacaaagggcagaagcggagaagctctgagcctcctgaagaaaagattctcccatagacccgtgcaggagaagttcgtgtgcctgaactgcggcttcgagacacacgcagccgagcaagccgccctgaacatcgccagatcctggctgttcctgcggagccaggagtacaagaaataccagacaaacaagacaaccggcaacaccgataagagagccttcgtcgagacctggcagtccttttaccggaagaagcttaaggaggtgtggaaacctgccgtgcggtctggcggatctggcggaggctccaccagccccaagaaaaagagaaaagtctaagctgccttctgcggggcttgccttctggccatgcccttcttctctcccttgcacctgtacctcttggtctttgaataaagcctgagtaggaaggctagcaaaaaaaaaaaaaaaaaaaaaaaaaaaaaaaaaaaaaaaaaaaaaaaaaaaaaaaaaaaaaaaaaaaaaaaaaaaaaaaa

SEQ ID NO: 12885 - RNA, 5785 nt, synthetic construct
  source 1..5785: mol_type = other RNA
aggaaataagagagaaaagaagagtaagaagaaatataagagccaccatggcccctaagaagaagcgtaaagtgagccggatggaacgcctcgtctacgaggtgcggcagaagtgcagaaacatcgaggacatctgcatctcctgcggatctctgaacgtgaccctggagcacccactgttcatcggcggcatgtgccagaactgtaaaaactgttttctggagtgtgcctatcaatacgacgatgacggctaccagagctactgcaccatctgttgcggcggaagagaggtgctgatgtgtggaaataacaactgctgccggtgcttctgcgtggaatgcgtggacctgctggtgggccccggcgccgcccaggccgctattaaggaagatccttggaactgctacatgtgcggccacaagggcacatacggcctgctgagacggagagaggactggcctagcagactgcagatgttcttcgccaataaccacgaccaggagttcgacccccctaaggtgtaccctcccgtccccgccgagaagagaaagcccatccgggtcctgagcctgttcgatggcatcgccaccggtctgctggtgctgaaggacctgggcatccaggtggataggtacattgcctccgaggtgtgcgaggactccatcaccgtgggaatggtgcgtcatcagggcaagatcatgtacgtgggcgacgtgcggagcgtgacacagaagcatatccaggagtggggccctttcgacctggtgatcggcggcagcccttgcaatgacctgagcatcgtgaacccagcccggaagggcctgtacgagggaaccggcagactgttcttcgagttttacagactgctgcacgacgcccggcctaaggaaggcgacgaccggcccttcttttggctgttcgagaatgtggtggccatgggagtcagcgacaagcgggatattagccggttcctggagagcaaccccgtgatgatcgatgccaaggaagtgagcgccgcccaccgggccagatacttctggggcaatctgcctggcatgaacagacccctggccagcaccgtgaacgacaagctggagctgcaggagtgcctggagcacggccggatcgccaagttcagcaaggtgagaaccatcaccacccgaagcaacagcatcaaacaaggcaaggaccagcactttcctgtgttcatgaacgagaaggaggacatcctgtggtgtaccgagatggagagagtgttcgggttcccagtccactacacagatgtcagcaacatgtctagactggccagacagagactgctgggaagaagctggtccgtccctgtgatcagacacctgttcgcccctctgaaggagtacttcgcctgcgtgagcagcggcaacagcaacgccaacagccggggccccagcttctctagcggcctggtgccactgtccctgagagggagccacatgggccccatggagatctacaaaaccgtgagcgcctggaagcggcagcctgtgcgcgtgctgagcctgtttcggaatatcgataaagtcctgaaaagcctgggattcctggagagcggctctggctccggcggtggcaccctgaagtacgtggaggatgtgacaaacgtggtcagacgggatgtggagaagtggggccccttcgatctggtgtacggcagcacccaacccctgggcagctcttgtgaccggtgccctggctggtacatgtttcagttccaccggatcctgcagtacgccctgccgagacaggagtcccagcggccattcttttggattttcatggacaacttgctgctgaccgaggatgaccaggaaactaccactcggttcctgcagaccgaagccgtgaccctgcaggacgtgagaggccgggactaccagaacgccatgcgggtgtggtccaacatccctggactgaaaagcaagcacgcacctctgacccctaaagaagaggagtacctgcaggcccaggtgcggagcagaagcaagctggacgcccctaaggtggatctgctggtgaagaattgcctcctgcccctgagagagtacttcaagtatttcagccagaatagtctgcccctgggaggcagcggcggcggcatgctgagccccgtgaccttcgaggacgtggccgtgtacttcaccgagggccagggcgccctgctggaccccaaccagagggccctgtacagggaggtgatgatggagaactacgagaacatggccagcctgggcttcctgttcatcaagcccgccctgatcagccagctggagcagggcgaggagctgtgggcccccgagagccagggcctggacgccgccgagatcagcgacaccagcgacggcggcccaagcagcggcgcccctcctcccagcggcggcagcccagccggctccccaacctctaccgaggagggcacctctgagtccgccacccccgagagcggccctggcacctccaccgagcccagcgagggcagcgcacccggcagccctgccggcagccccacctccacagaggagggaaccagcaccgagcccagcgaaggcagcgccccaggcaccagcaccgagcctagtgagcaggagattaaacggatcaacaagatcagaagaagacttgtgaaagacagcaacaccaagaaggccggcaagacaggccccatgaaaaccctgctggttagagtgatgacacccgatctgagagagcggctggaaaacctgagaaagaagcctgaaaatatcccccagcccatcagcaatacatctagagccaacctgaataagctgctgaccgattacaccgaaatgaagaaggcgatcctgcatgtgtactgggaagagttccagaaggaccctgtgggcctgatgagccgggtggcccagcctgccagcaagaagatcgatcagaacaagctgaaacctgagatggacgagaagggcaacctgaccaccgccggctttgcctgctctcagtgtggccagcccctgttcgtgtacaagctggagcaggtgtctgagaagggcaaggcttacaccaactacttcggacggtgcaatgtggccgagcacgaaaagctgatcctgctggcccagctgaagcccgagaaggatagcgacgaagccgtgacatatagcctgggaaagtttgggcagagggccctggatttctacagcattcatgtgaccaaggagtccacccaccccgtgaagcccctggcccagatcgccggaaacagatacgcctccggacctgtgggaaaggccctgagcgacgcatgtatgggcacaatcgcctccttcctgtctaagtaccaggacatcatcatcgaacaccagaaggtggtgaagggcaaccagaagagactggagagcctgcgggagctggccggcaaggaaaacctggaataccctagcgtgaccctgccacctcagcctcacaccaaggagggcgttgatgcctacaacgaagtgatcgcccgggtgcgaatgtgggtgaacctgaacctgtggcagaagctgaagctaagcagagatgatgccaagcctctgctgagactgaagggattcccttcctttcctctggtcgagagacaggccaacgaagtggactggtgggacatggtgtgtaacgtgaagaagctgatcaacgagaaaaaggaggatggcaaggtgttttggcagaatctggctggctacaagagacaggaagccctgagaccatacctgagcagcgaggaagatcggaagaagggaaagaaattcgctcggtaccagctgggcgacctgctgctgcacctggaaaagaagcacggcgaggactggggaaaggtgtacgacgaggcctgggagcggattgacaagaaagtggaaggcctgagcaagcacatcaagctggaagaggaacggagaagcgaggacgcccagagcaaggccgccctgaccgactggctgcgggctaaggccagcttcgtgatcgagggcctgaaggaggccgacaaggacgagttctgcagatgcgagctgaagctgcagaagtggtacggggacctgcggggaaagcccttcgccatcgaagccgagaacagcatcctggacatcagcggcttcagcaagcagtacaactgtgccttcatctggcagaaggacggcgtgaagaagctgaacctgtacctgatcatcaactacttcaagggcggcaagctgcggttcaagaagatcaaacctgaagccttcgaagccaacagattctacaccgtgatcaacaaaaagagcggcgagatcgtgcccatggaggtgaacttcaacttcgacgaccccaacctgatcatcctgcctctggcctttggcaagagacagggcagagaattcatctggaacgacctgctgtccctggaaaccggcagcctgaagctggccaacggaagagtgatcgagaagacactgtacaacagaagaacccggcaggatgagcctgccctgttcgtggccctgaccttcgagcggcgggaggtcctggactcctccaatatcaaaccaatgaacctgatcggcgtggcaagaggcgaaaacatccccgccgtgatcgccctgaccgaccccgagggctgcccactgagccggtttaaggatagcctgggaaacccaacccacatcctgagaatcggcgagagctataaggagaagcagcggaccatccaggccaagaaggaggtggagcagcggagagccggcggctacagccggaagtacgccagcaaagccaagaatctggcagacgatatggtgagaaacaccgctagagatctgctgtactacgccgtgacccaggatgccatgctgatcttcgccaacctgagccggggcttcggccggcagggcaagcggaccttcatggccgagagacagtacacacggatggaggactggctgaccgccaagctggcctacgagggcctgagcaagacctacctgtccaagacactggcccagtacacctccaagacatgcagcaactgtgggtttaccatcaccagcgccgactacgacagggtgctggagaagctgaagaagacagcaacaggctggatgaccacaattaacggcaaggagctgaaggtggagggccagattacctactacaacagatacaagagacagaacgtagtcaaggacctgtccgtcgagctggatagactgagcgaagaatctgtgaacaacgacatctcctcctggacaaagggcagaagcggagaagctctgagcctcctgaagaaaagattctcccatagacccgtgcaggagaagttcgtgtgcctgaactgcggcttcgagacacacgcagccgagcaagccgccctgaacatcgccagatcctggctgttcctgcggagccaggagtacaagaaataccagacaaacaagacaaccggcaacaccgataagagagccttcgtcgagacctggcagtccttttaccggaagaagcttaaggaggtgtggaaacctgccgtgcggtctggcggatctggcggaggctccaccagccccaagaaaaagagaaaagtctaagctgccttctgcggggcttgccttctggccatgcccttcttctctcccttgcacctgtacctcttggtctttgaataaagcctgagtaggaaggctagcaaaaaaaaaaaaaaaaaaaaaaaaaaaaaaaaaaaaaaaaaaaaaaaaaaaaaaaaaaaaaaaaaaaaaaaaaaaaaaaa

SEQ ID NO: 12886 - RNA, 5785 nt, synthetic construct
  source 1..5785: mol_type = other RNA
aggaaataagagagaaaagaagagtaagaagaaatataagagccaccatggcccctaagaagaagcgtaaagtgagccggatggaacgcctcgtctacgaggtgcggcagaagtgcagaaacatcgaggacatctgcatctcctgcggatctctgaacgtgaccctggagcacccactgttcatcggcggcatgtgccagaactgtaaaaactgttttctggagtgtgcctatcaatacgacgatgacggctaccagagctactgcaccatctgttgcggcggaagagaggtgctgatgtgtggaaataacaactgctgccggtgcttctgcgtggaatgcgtggacctgctggtgggccccggcgccgcccaggccgctattaaggaagatccttggaactgctacatgtgcggccacaagggcacatacggcctgctgagacggagagaggactggcctagcagactgcagatgttcttcgccaataaccacgaccaggagttcgacccccctaaggtgtaccctcccgtccccgccgagaagagaaagcccatccgggtcctgagcctgttcgatggcatcgccaccggtctgctggtgctgaaggacctgggcatccaggtggataggtacattgcctccgaggtgtgcgaggactccatcaccgtgggaatggtgcgtcatcagggcaagatcatgtacgtgggcgacgtgcggagcgtgacacagaagcatatccaggagtggggccctttcgacctggtgatcggcggcagcccttgcaatgacctgagcatcgtgaacccagcccggaagggcctgtacgagggaaccggcagactgttcttcgagttttacagactgctgcacgacgcccggcctaaggaaggcgacgaccggcccttcttttggctgttcgagaatgtggtggccatgggagtcagcgacaagcgggatattagccggttcctggagagcaaccccgtgatgatcgatgccaaggaagtgagcgccgcccaccgggccagatacttctggggcaatctgcctggcatgaacagacccctggccagcaccgtgaacgacaagctggagctgcaggagtgcctggagcacggccggatcgccaagttcagcaaggtgagaaccatcaccacccgaagcaacagcatcaaacaaggcaaggaccagcactttcctgtgttcatgaacgagaaggaggacatcctgtggtgtaccgagatggagagagtgttcgggttcccagtccactacacagatgtcagcaacatgtctagactggccagacagagactgctgggaagaagctggtccgtccctgtgatcagacacctgttcgcccctctgaaggagtacttcgcctgcgtgagcagcggcaacagcaacgccaacagccggggccccagcttctctagcggcctggtgccactgtccctgagagggagccacatgggccccatggagatctacaaaaccgtgagcgcctggaagcggcagcctgtgcgcgtgctgagcctgtttcggaatatcgataaagtcctgaaaagcctgggattcctggagagcggctctggctccggcggtggcaccctgaagtacgtggaggatgtgacaaacgtggtcagacgggatgtggagaagtggggccccttcgatctggtgtacggcagcacccaacccctgggcagctcttgtgaccggtgccctggctggtacatgtttcagttccaccggatcctgcagtacgccctgccgagacaggagtcccagcggccattcttttggattttcatggacaacttgctgctgaccgaggatgaccaggaaactaccactcggttcctgcagaccgaagccgtgaccctgcaggacgtgagaggccgggactaccagaacgccatgcgggtgtggtccaacatccctggactgaaaagcaagcacgcacctctgacccctaaagaagaggagtacctgcaggcccaggtgcggagcagaagcaagctggacgcccctaaggtggatctgctggtgaagaattgcctcctgcccctgagagagtacttcaagtatttcagccagaatagtctgcccctgggaggcagcggcggcggcatgatgaccttcagggacgtggccatcgacttcagccaggaggagtggaagtggctgcagcccgcccagagggacctgtacaggtgcgtgatgctggagaactacggccacctggtgagcctgggcctgagcatcagcaagcccgacgtggtgagcctgctggagcagggcaaggagccctggctgggcaagaagggcatcagcgagagcagcggcgagatcaaggacttcagccccaagaacggcggcccaagcagcggcgcccctcctcccagcggcggcagcccagccggctccccaacctctaccgaggagggcacctctgagtccgccacccccgagagcggccctggcacctccaccgagcccagcgagggcagcgcacccggcagccctgccggcagccccacctccacagaggagggaaccagcaccgagcccagcgaaggcagcgccccaggcaccagcaccgagcctagtgagcaggagattaaacggatcaacaagatcagaagaagacttgtgaaagacagcaacaccaagaaggccggcaagacaggccccatgaaaaccctgctggttagagtgatgacacccgatctgagagagcggctggaaaacctgagaaagaagcctgaaaatatcccccagcccatcagcaatacatctagagccaacctgaataagctgctgaccgattacaccgaaatgaagaaggcgatcctgcatgtgtactgggaagagttccagaaggaccctgtgggcctgatgagccgggtggcccagcctgccagcaagaagatcgatcagaacaagctgaaacctgagatggacgagaagggcaacctgaccaccgccggctttgcctgctctcagtgtggccagcccctgttcgtgtacaagctggagcaggtgtctgagaagggcaaggcttacaccaactacttcggacggtgcaatgtggccgagcacgaaaagctgatcctgctggcccagctgaagcccgagaaggatagcgacgaagccgtgacatatagcctgggaaagtttgggcagagggccctggatttctacagcattcatgtgaccaaggagtccacccaccccgtgaagcccctggcccagatcgccggaaacagatacgcctccggacctgtgggaaaggccctgagcgacgcatgtatgggcacaatcgcctccttcctgtctaagtaccaggacatcatcatcgaacaccagaaggtggtgaagggcaaccagaagagactggagagcctgcgggagctggccggcaaggaaaacctggaataccctagcgtgaccctgccacctcagcctcacaccaaggagggcgttgatgcctacaacgaagtgatcgcccgggtgcgaatgtgggtgaacctgaacctgtggcagaagctgaagctaagcagagatgatgccaagcctctgctgagactgaagggattcccttcctttcctctggtcgagagacaggccaacgaagtggactggtgggacatggtgtgtaacgtgaagaagctgatcaacgagaaaaaggaggatggcaaggtgttttggcagaatctggctggctacaagagacaggaagccctgagaccatacctgagcagcgaggaagatcggaagaagggaaagaaattcgctcggtaccagctgggcgacctgctgctgcacctggaaaagaagcacggcgaggactggggaaaggtgtacgacgaggcctgggagcggattgacaagaaagtggaaggcctgagcaagcacatcaagctggaagaggaacggagaagcgaggacgcccagagcaaggccgccctgaccgactggctgcgggctaaggccagcttcgtgatcgagggcctgaaggaggccgacaaggacgagttctgcagatgcgagctgaagctgcagaagtggtacggggacctgcggggaaagcccttcgccatcgaagccgagaacagcatcctggacatcagcggcttcagcaagcagtacaactgtgccttcatctggcagaaggacggcgtgaagaagctgaacctgtacctgatcatcaactacttcaagggcggcaagctgcggttcaagaagatcaaacctgaagccttcgaagccaacagattctacaccgtgatcaacaaaaagagcggcgagatcgtgcccatggaggtgaacttcaacttcgacgaccccaacctgatcatcctgcctctggcctttggcaagagacagggcagagaattcatctggaacgacctgctgtccctggaaaccggcagcctgaagctggccaacggaagagtgatcgagaagacactgtacaacagaagaacccggcaggatgagcctgccctgttcgtggccctgaccttcgagcggcgggaggtcctggactcctccaatatcaaaccaatgaacctgatcggcgtggcaagaggcgaaaacatccccgccgtgatcgccctgaccgaccccgagggctgcccactgagccggtttaaggatagcctgggaaacccaacccacatcctgagaatcggcgagagctataaggagaagcagcggaccatccaggccaagaaggaggtggagcagcggagagccggcggctacagccggaagtacgccagcaaagccaagaatctggcagacgatatggtgagaaacaccgctagagatctgctgtactacgccgtgacccaggatgccatgctgatcttcgccaacctgagccggggcttcggccggcagggcaagcggaccttcatggccgagagacagtacacacggatggaggactggctgaccgccaagctggcctacgagggcctgagcaagacctacctgtccaagacactggcccagtacacctccaagacatgcagcaactgtgggtttaccatcaccagcgccgactacgacagggtgctggagaagctgaagaagacagcaacaggctggatgaccacaattaacggcaaggagctgaaggtggagggccagattacctactacaacagatacaagagacagaacgtagtcaaggacctgtccgtcgagctggatagactgagcgaagaatctgtgaacaacgacatctcctcctggacaaagggcagaagcggagaagctctgagcctcctgaagaaaagattctcccatagacccgtgcaggagaagttcgtgtgcctgaactgcggcttcgagacacacgcagccgagcaagccgccctgaacatcgccagatcctggctgttcctgcggagccaggagtacaagaaataccagacaaacaagacaaccggcaacaccgataagagagccttcgtcgagacctggcagtccttttaccggaagaagcttaaggaggtgtggaaacctgccgtgcggtctggcggatctggcggaggctccaccagccccaagaaaaagagaaaagtctaagctgccttctgcggggcttgccttctggccatgcccttcttctctcccttgcacctgtacctcttggtctttgaataaagcctgagtaggaaggctagcaaaaaaaaaaaaaaaaaaaaaaaaaaaaaaaaaaaaaaaaaaaaaaaaaaaaaaaaaaaaaaaaaaaaaaaaaaaaaaaa

SEQ ID NO: 12887 - RNA, 5785 nt, synthetic construct
  source 1..5785: mol_type = other RNA
aggaaataagagagaaaagaagagtaagaagaaatataagagccaccatggcccctaagaagaagcgtaaagtgagccggatggaacgcctcgtctacgaggtgcggcagaagtgcagaaacatcgaggacatctgcatctcctgcggatctctgaacgtgaccctggagcacccactgttcatcggcggcatgtgccagaactgtaaaaactgttttctggagtgtgcctatcaatacgacgatgacggctaccagagctactgcaccatctgttgcggcggaagagaggtgctgatgtgtggaaataacaactgctgccggtgcttctgcgtggaatgcgtggacctgctggtgggccccggcgccgcccaggccgctattaaggaagatccttggaactgctacatgtgcggccacaagggcacatacggcctgctgagacggagagaggactggcctagcagactgcagatgttcttcgccaataaccacgaccaggagttcgacccccctaaggtgtaccctcccgtccccgccgagaagagaaagcccatccgggtcctgagcctgttcgatggcatcgccaccggtctgctggtgctgaaggacctgggcatccaggtggataggtacattgcctccgaggtgtgcgaggactccatcaccgtgggaatggtgcgtcatcagggcaagatcatgtacgtgggcgacgtgcggagcgtgacacagaagcatatccaggagtggggccctttcgacctggtgatcggcggcagcccttgcaatgacctgagcatcgtgaacccagcccggaagggcctgtacgagggaaccggcagactgttcttcgagttttacagactgctgcacgacgcccggcctaaggaaggcgacgaccggcccttcttttggctgttcgagaatgtggtggccatgggagtcagcgacaagcgggatattagccggttcctggagagcaaccccgtgatgatcgatgccaaggaagtgagcgccgcccaccgggccagatacttctggggcaatctgcctggcatgaacagacccctggccagcaccgtgaacgacaagctggagctgcaggagtgcctggagcacggccggatcgccaagttcagcaaggtgagaaccatcaccacccgaagcaacagcatcaaacaaggcaaggaccagcactttcctgtgttcatgaacgagaaggaggacatcctgtggtgtaccgagatggagagagtgttcgggttcccagtccactacacagatgtcagcaacatgtctagactggccagacagagactgctgggaagaagctggtccgtccctgtgatcagacacctgttcgcccctctgaaggagtacttcgcctgcgtgagcagcggcaacagcaacgccaacagccggggccccagcttctctagcggcctggtgccactgtccctgagagggagccacatgggccccatggagatctacaaaaccgtgagcgcctggaagcggcagcctgtgcgcgtgctgagcctgtttcggaatatcgataaagtcctgaaaagcctgggattcctggagagcggctctggctccggcggtggcaccctgaagtacgtggaggatgtgacaaacgtggtcagacgggatgtggagaagtggggccccttcgatctggtgtacggcagcacccaacccctgggcagctcttgtgaccggtgccctggctggtacatgtttcagttccaccggatcctgcagtacgccctgccgagacaggagtcccagcggccattcttttggattttcatggacaacttgctgctgaccgaggatgaccaggaaactaccactcggttcctgcagaccgaagccgtgaccctgcaggacgtgagaggccgggactaccagaacgccatgcgggtgtggtccaacatccctggactgaaaagcaagcacgcacctctgacccctaaagaagaggagtacctgcaggcccaggtgcggagcagaagcaagctggacgcccctaaggtggatctgctggtgaagaattgcctcctgcccctgagagagtacttcaagtatttcagccagaatagtctgcccctgggaggcagcggcggcggcgccgtgacccagctgaccttcgaggacgtggccgtgtacttcaccagggaggagtggaggtgcctgacccccgcccagaggaccctgtacagggacgtgatgctggacacctacaggaacctggtgagcgtgggcgtgagcccccccagcatgagcgtgatcctgcccctggagttccaggaggagccctgggtggcccagagccacgtgaccaccctgggcggcctgaacggctgggagggcggcggcccaagcagcggcgcccctcctcccagcggcggcagcccagccggctccccaacctctaccgaggagggcacctctgagtccgccacccccgagagcggccctggcacctccaccgagcccagcgagggcagcgcacccggcagccctgccggcagccccacctccacagaggagggaaccagcaccgagcccagcgaaggcagcgccccaggcaccagcaccgagcctagtgagcaggagattaaacggatcaacaagatcagaagaagacttgtgaaagacagcaacaccaagaaggccggcaagacaggccccatgaaaaccctgctggttagagtgatgacacccgatctgagagagcggctggaaaacctgagaaagaagcctgaaaatatcccccagcccatcagcaatacatctagagccaacctgaataagctgctgaccgattacaccgaaatgaagaaggcgatcctgcatgtgtactgggaagagttccagaaggaccctgtgggcctgatgagccgggtggcccagcctgccagcaagaagatcgatcagaacaagctgaaacctgagatggacgagaagggcaacctgaccaccgccggctttgcctgctctcagtgtggccagcccctgttcgtgtacaagctggagcaggtgtctgagaagggcaaggcttacaccaactacttcggacggtgcaatgtggccgagcacgaaaagctgatcctgctggcccagctgaagcccgagaaggatagcgacgaagccgtgacatatagcctgggaaagtttgggcagagggccctggatttctacagcattcatgtgaccaaggagtccacccaccccgtgaagcccctggcccagatcgccggaaacagatacgcctccggacctgtgggaaaggccctgagcgacgcatgtatgggcacaatcgcctccttcctgtctaagtaccaggacatcatcatcgaacaccagaaggtggtgaagggcaaccagaagagactggagagcctgcgggagctggccggcaaggaaaacctggaataccctagcgtgaccctgccacctcagcctcacaccaaggagggcgttgatgcctacaacgaagtgatcgcccgggtgcgaatgtgggtgaacctgaacctgtggcagaagctgaagctaagcagagatgatgccaagcctctgctgagactgaagggattcccttcctttcctctggtcgagagacaggccaacgaagtggactggtgggacatggtgtgtaacgtgaagaagctgatcaacgagaaaaaggaggatggcaaggtgttttggcagaatctggctggctacaagagacaggaagccctgagaccatacctgagcagcgaggaagatcggaagaagggaaagaaattcgctcggtaccagctgggcgacctgctgctgcacctggaaaagaagcacggcgaggactggggaaaggtgtacgacgaggcctgggagcggattgacaagaaagtggaaggcctgagcaagcacatcaagctggaagaggaacggagaagcgaggacgcccagagcaaggccgccctgaccgactggctgcgggctaaggccagcttcgtgatcgagggcctgaaggaggccgacaaggacgagttctgcagatgcgagctgaagctgcagaagtggtacggggacctgcggggaaagcccttcgccatcgaagccgagaacagcatcctggacatcagcggcttcagcaagcagtacaactgtgccttcatctggcagaaggacggcgtgaagaagctgaacctgtacctgatcatcaactacttcaagggcggcaagctgcggttcaagaagatcaaacctgaagccttcgaagccaacagattctacaccgtgatcaacaaaaagagcggcgagatcgtgcccatggaggtgaacttcaacttcgacgaccccaacctgatcatcctgcctctggcctttggcaagagacagggcagagaattcatctggaacgacctgctgtccctggaaaccggcagcctgaagctggccaacggaagagtgatcgagaagacactgtacaacagaagaacccggcaggatgagcctgccctgttcgtggccctgaccttcgagcggcgggaggtcctggactcctccaatatcaaaccaatgaacctgatcggcgtggcaagaggcgaaaacatccccgccgtgatcgccctgaccgaccccgagggctgcccactgagccggtttaaggatagcctgggaaacccaacccacatcctgagaatcggcgagagctataaggagaagcagcggaccatccaggccaagaaggaggtggagcagcggagagccggcggctacagccggaagtacgccagcaaagccaagaatctggcagacgatatggtgagaaacaccgctagagatctgctgtactacgccgtgacccaggatgccatgctgatcttcgccaacctgagccggggcttcggccggcagggcaagcggaccttcatggccgagagacagtacacacggatggaggactggctgaccgccaagctggcctacgagggcctgagcaagacctacctgtccaagacactggcccagtacacctccaagacatgcagcaactgtgggtttaccatcaccagcgccgactacgacagggtgctggagaagctgaagaagacagcaacaggctggatgaccacaattaacggcaaggagctgaaggtggagggccagattacctactacaacagatacaagagacagaacgtagtcaaggacctgtccgtcgagctggatagactgagcgaagaatctgtgaacaacgacatctcctcctggacaaagggcagaagcggagaagctctgagcctcctgaagaaaagattctcccatagacccgtgcaggagaagttcgtgtgcctgaactgcggcttcgagacacacgcagccgagcaagccgccctgaacatcgccagatcctggctgttcctgcggagccaggagtacaagaaataccagacaaacaagacaaccggcaacaccgataagagagccttcgtcgagacctggcagtccttttaccggaagaagcttaaggaggtgtggaaacctgccgtgcggtctggcggatctggcggaggctccaccagccccaagaaaaagagaaaagtctaagctgccttctgcggggcttgccttctggccatgcccttcttctctcccttgcacctgtacctcttggtctttgaataaagcctgagtaggaaggctagcaaaaaaaaaaaaaaaaaaaaaaaaaaaaaaaaaaaaaaaaaaaaaaaaaaaaaaaaaaaaaaaaaaaaaaaaaaaaaaaa

SEQ ID NO: 12888 - RNA, 5785 nt, synthetic construct
  source 1..5785: mol_type = other RNA
aggaaataagagagaaaagaagagtaagaagaaatataagagccaccatggcccctaagaagaagcgtaaagtgagccggatggaacgcctcgtctacgaggtgcggcagaagtgcagaaacatcgaggacatctgcatctcctgcggatctctgaacgtgaccctggagcacccactgttcatcggcggcatgtgccagaactgtaaaaactgttttctggagtgtgcctatcaatacgacgatgacggctaccagagctactgcaccatctgttgcggcggaagagaggtgctgatgtgtggaaataacaactgctgccggtgcttctgcgtggaatgcgtggacctgctggtgggccccggcgccgcccaggccgctattaaggaagatccttggaactgctacatgtgcggccacaagggcacatacggcctgctgagacggagagaggactggcctagcagactgcagatgttcttcgccaataaccacgaccaggagttcgacccccctaaggtgtaccctcccgtccccgccgagaagagaaagcccatccgggtcctgagcctgttcgatggcatcgccaccggtctgctggtgctgaaggacctgggcatccaggtggataggtacattgcctccgaggtgtgcgaggactccatcaccgtgggaatggtgcgtcatcagggcaagatcatgtacgtgggcgacgtgcggagcgtgacacagaagcatatccaggagtggggccctttcgacctggtgatcggcggcagcccttgcaatgacctgagcatcgtgaacccagcccggaagggcctgtacgagggaaccggcagactgttcttcgagttttacagactgctgcacgacgcccggcctaaggaaggcgacgaccggcccttcttttggctgttcgagaatgtggtggccatgggagtcagcgacaagcgggatattagccggttcctggagagcaaccccgtgatgatcgatgccaaggaagtgagcgccgcccaccgggccagatacttctggggcaatctgcctggcatgaacagacccctggccagcaccgtgaacgacaagctggagctgcaggagtgcctggagcacggccggatcgccaagttcagcaaggtgagaaccatcaccacccgaagcaacagcatcaaacaaggcaaggaccagcactttcctgtgttcatgaacgagaaggaggacatcctgtggtgtaccgagatggagagagtgttcgggttcccagtccactacacagatgtcagcaacatgtctagactggccagacagagactgctgggaagaagctggtccgtccctgtgatcagacacctgttcgcccctctgaaggagtacttcgcctgcgtgagcagcggcaacagcaacgccaacagccggggccccagcttctctagcggcctggtgccactgtccctgagagggagccacatgggccccatggagatctacaaaaccgtgagcgcctggaagcggcagcctgtgcgcgtgctgagcctgtttcggaatatcgataaagtcctgaaaagcctgggattcctggagagcggctctggctccggcggtggcaccctgaagtacgtggaggatgtgacaaacgtggtcagacgggatgtggagaagtggggccccttcgatctggtgtacggcagcacccaacccctgggcagctcttgtgaccggtgccctggctggtacatgtttcagttccaccggatcctgcagtacgccctgccgagacaggagtcccagcggccattcttttggattttcatggacaacttgctgctgaccgaggatgaccaggaaactaccactcggttcctgcagaccgaagccgtgaccctgcaggacgtgagaggccgggactaccagaacgccatgcgggtgtggtccaacatccctggactgaaaagcaagcacgcacctctgacccctaaagaagaggagtacctgcaggcccaggtgcggagcagaagcaagctggacgcccctaaggtggatctgctggtgaagaattgcctcctgcccctgagagagtacttcaagtatttcagccagaatagtctgcccctgggaggcagcggcggcggcgccctgaggagcgtgatgttcagcgacatcagcatcgacttcagccccgaggagtgggagtacctggacctggagcagaagaacctgtacagggacgtgatgctggagaactacagcaacctggtgagcctgggctgcttcatcagcaagcccgtggtgatcagcctgctggagcagggcaaggagccctggaaggtggtgaggaagaggaggcagtaccccgacctggagaccaagtacgagggcggcccaagcagcggcgcccctcctcccagcggcggcagcccagccggctccccaacctctaccgaggagggcacctctgagtccgccacccccgagagcggccctggcacctccaccgagcccagcgagggcagcgcacccggcagccctgccggcagccccacctccacagaggagggaaccagcaccgagcccagcgaaggcagcgccccaggcaccagcaccgagcctagtgagcaggagattaaacggatcaacaagatcagaagaagacttgtgaaagacagcaacaccaagaaggccggcaagacaggccccatgaaaaccctgctggttagagtgatgacacccgatctgagagagcggctggaaaacctgagaaagaagcctgaaaatatcccccagcccatcagcaatacatctagagccaacctgaataagctgctgaccgattacaccgaaatgaagaaggcgatcctgcatgtgtactgggaagagttccagaaggaccctgtgggcctgatgagccgggtggcccagcctgccagcaagaagatcgatcagaacaagctgaaacctgagatggacgagaagggcaacctgaccaccgccggctttgcctgctctcagtgtggccagcccctgttcgtgtacaagctggagcaggtgtctgagaagggcaaggcttacaccaactacttcggacggtgcaatgtggccgagcacgaaaagctgatcctgctggcccagctgaagcccgagaaggatagcgacgaagccgtgacatatagcctgggaaagtttgggcagagggccctggatttctacagcattcatgtgaccaaggagtccacccaccccgtgaagcccctggcccagatcgccggaaacagatacgcctccggacctgtgggaaaggccctgagcgacgcatgtatgggcacaatcgcctccttcctgtctaagtaccaggacatcatcatcgaacaccagaaggtggtgaagggcaaccagaagagactggagagcctgcgggagctggccggcaaggaaaacctggaataccctagcgtgaccctgccacctcagcctcacaccaaggagggcgttgatgcctacaacgaagtgatcgcccgggtgcgaatgtgggtgaacctgaacctgtggcagaagctgaagctaagcagagatgatgccaagcctctgctgagactgaagggattcccttcctttcctctggtcgagagacaggccaacgaagtggactggtgggacatggtgtgtaacgtgaagaagctgatcaacgagaaaaaggaggatggcaaggtgttttggcagaatctggctggctacaagagacaggaagccctgagaccatacctgagcagcgaggaagatcggaagaagggaaagaaattcgctcggtaccagctgggcgacctgctgctgcacctggaaaagaagcacggcgaggactggggaaaggtgtacgacgaggcctgggagcggattgacaagaaagtggaaggcctgagcaagcacatcaagctggaagaggaacggagaagcgaggacgcccagagcaaggccgccctgaccgactggctgcgggctaaggccagcttcgtgatcgagggcctgaaggaggccgacaaggacgagttctgcagatgcgagctgaagctgcagaagtggtacggggacctgcggggaaagcccttcgccatcgaagccgagaacagcatcctggacatcagcggcttcagcaagcagtacaactgtgccttcatctggcagaaggacggcgtgaagaagctgaacctgtacctgatcatcaactacttcaagggcggcaagctgcggttcaagaagatcaaacctgaagccttcgaagccaacagattctacaccgtgatcaacaaaaagagcggcgagatcgtgcccatggaggtgaacttcaacttcgacgaccccaacctgatcatcctgcctctggcctttggcaagagacagggcagagaattcatctggaacgacctgctgtccctggaaaccggcagcctgaagctggccaacggaagagtgatcgagaagacactgtacaacagaagaacccggcaggatgagcctgccctgttcgtggccctgaccttcgagcggcgggaggtcctggactcctccaatatcaaaccaatgaacctgatcggcgtggcaagaggcgaaaacatccccgccgtgatcgccctgaccgaccccgagggctgcccactgagccggtttaaggatagcctgggaaacccaacccacatcctgagaatcggcgagagctataaggagaagcagcggaccatccaggccaagaaggaggtggagcagcggagagccggcggctacagccggaagtacgccagcaaagccaagaatctggcagacgatatggtgagaaacaccgctagagatctgctgtactacgccgtgacccaggatgccatgctgatcttcgccaacctgagccggggcttcggccggcagggcaagcggaccttcatggccgagagacagtacacacggatggaggactggctgaccgccaagctggcctacgagggcctgagcaagacctacctgtccaagacactggcccagtacacctccaagacatgcagcaactgtgggtttaccatcaccagcgccgactacgacagggtgctggagaagctgaagaagacagcaacaggctggatgaccacaattaacggcaaggagctgaaggtggagggccagattacctactacaacagatacaagagacagaacgtagtcaaggacctgtccgtcgagctggatagactgagcgaagaatctgtgaacaacgacatctcctcctggacaaagggcagaagcggagaagctctgagcctcctgaagaaaagattctcccatagacccgtgcaggagaagttcgtgtgcctgaactgcggcttcgagacacacgcagccgagcaagccgccctgaacatcgccagatcctggctgttcctgcggagccaggagtacaagaaataccagacaaacaagacaaccggcaacaccgataagagagccttcgtcgagacctggcagtccttttaccggaagaagcttaaggaggtgtggaaacctgccgtgcggtctggcggatctggcggaggctccaccagccccaagaaaaagagaaaagtctaagctgccttctgcggggcttgccttctggccatgcccttcttctctcccttgcacctgtacctcttggtctttgaataaagcctgagtaggaaggctagcaaaaaaaaaaaaaaaaaaaaaaaaaaaaaaaaaaaaaaaaaaaaaaaaaaaaaaaaaaaaaaaaaaaaaaaaaaaaaaaa

SEQ ID NO: 12889 - RNA, 5785 nt, synthetic construct
  source 1..5785: mol_type = other RNA
aggaaataagagagaaaagaagagtaagaagaaatataagagccaccatggcccctaagaagaagcgtaaagtgagccggatggaacgcctcgtctacgaggtgcggcagaagtgcagaaacatcgaggacatctgcatctcctgcggatctctgaacgtgaccctggagcacccactgttcatcggcggcatgtgccagaactgtaaaaactgttttctggagtgtgcctatcaatacgacgatgacggctaccagagctactgcaccatctgttgcggcggaagagaggtgctgatgtgtggaaataacaactgctgccggtgcttctgcgtggaatgcgtggacctgctggtgggccccggcgccgcccaggccgctattaaggaagatccttggaactgctacatgtgcggccacaagggcacatacggcctgctgagacggagagaggactggcctagcagactgcagatgttcttcgccaataaccacgaccaggagttcgacccccctaaggtgtaccctcccgtccccgccgagaagagaaagcccatccgggtcctgagcctgttcgatggcatcgccaccggtctgctggtgctgaaggacctgggcatccaggtggataggtacattgcctccgaggtgtgcgaggactccatcaccgtgggaatggtgcgtcatcagggcaagatcatgtacgtgggcgacgtgcggagcgtgacacagaagcatatccaggagtggggccctttcgacctggtgatcggcggcagcccttgcaatgacctgagcatcgtgaacccagcccggaagggcctgtacgagggaaccggcagactgttcttcgagttttacagactgctgcacgacgcccggcctaaggaaggcgacgaccggcccttcttttggctgttcgagaatgtggtggccatgggagtcagcgacaagcgggatattagccggttcctggagagcaaccccgtgatgatcgatgccaaggaagtgagcgccgcccaccgggccagatacttctggggcaatctgcctggcatgaacagacccctggccagcaccgtgaacgacaagctggagctgcaggagtgcctggagcacggccggatcgccaagttcagcaaggtgagaaccatcaccacccgaagcaacagcatcaaacaaggcaaggaccagcactttcctgtgttcatgaacgagaaggaggacatcctgtggtgtaccgagatggagagagtgttcgggttcccagtccactacacagatgtcagcaacatgtctagactggccagacagagactgctgggaagaagctggtccgtccctgtgatcagacacctgttcgcccctctgaaggagtacttcgcctgcgtgagcagcggcaacagcaacgccaacagccggggccccagcttctctagcggcctggtgccactgtccctgagagggagccacatgggccccatggagatctacaaaaccgtgagcgcctggaagcggcagcctgtgcgcgtgctgagcctgtttcggaatatcgataaagtcctgaaaagcctgggattcctggagagcggctctggctccggcggtggcaccctgaagtacgtggaggatgtgacaaacgtggtcagacgggatgtggagaagtggggccccttcgatctggtgtacggcagcacccaacccctgggcagctcttgtgaccggtgccctggctggtacatgtttcagttccaccggatcctgcagtacgccctgccgagacaggagtcccagcggccattcttttggattttcatggacaacttgctgctgaccgaggatgaccaggaaactaccactcggttcctgcagaccgaagccgtgaccctgcaggacgtgagaggccgggactaccagaacgccatgcgggtgtggtccaacatccctggactgaaaagcaagcacgcacctctgacccctaaagaagaggagtacctgcaggcccaggtgcggagcagaagcaagctggacgcccctaaggtggatctgctggtgaagaattgcctcctgcccctgagagagtacttcaagtatttcagccagaatagtctgcccctgggaggcagcggcggcggcgccgagatcaccctgatgaaccaggcccaggacagcaggagcatcctgttccaggagagcgtgaccttcgaggacgtggccgtgaacttcaccaacagggagtggcagtgcctgacctacgcccagaggcacctgtacaaggacgtgatgctggagaactacggcaacatggtgagcctgggcttccccttccccaagccccccctgatcagccacctggagagggaggtggacccctgcgtgggcggcccaagcagcggcgcccctcctcccagcggcggcagcccagccggctccccaacctctaccgaggagggcacctctgagtccgccacccccgagagcggccctggcacctccaccgagcccagcgagggcagcgcacccggcagccctgccggcagccccacctccacagaggagggaaccagcaccgagcccagcgaaggcagcgccccaggcaccagcaccgagcctagtgagcaggagattaaacggatcaacaagatcagaagaagacttgtgaaagacagcaacaccaagaaggccggcaagacaggccccatgaaaaccctgctggttagagtgatgacacccgatctgagagagcggctggaaaacctgagaaagaagcctgaaaatatcccccagcccatcagcaatacatctagagccaacctgaataagctgctgaccgattacaccgaaatgaagaaggcgatcctgcatgtgtactgggaagagttccagaaggaccctgtgggcctgatgagccgggtggcccagcctgccagcaagaagatcgatcagaacaagctgaaacctgagatggacgagaagggcaacctgaccaccgccggctttgcctgctctcagtgtggccagcccctgttcgtgtacaagctggagcaggtgtctgagaagggcaaggcttacaccaactacttcggacggtgcaatgtggccgagcacgaaaagctgatcctgctggcccagctgaagcccgagaaggatagcgacgaagccgtgacatatagcctgggaaagtttgggcagagggccctggatttctacagcattcatgtgaccaaggagtccacccaccccgtgaagcccctggcccagatcgccggaaacagatacgcctccggacctgtgggaaaggccctgagcgacgcatgtatgggcacaatcgcctccttcctgtctaagtaccaggacatcatcatcgaacaccagaaggtggtgaagggcaaccagaagagactggagagcctgcgggagctggccggcaaggaaaacctggaataccctagcgtgaccctgccacctcagcctcacaccaaggagggcgttgatgcctacaacgaagtgatcgcccgggtgcgaatgtgggtgaacctgaacctgtggcagaagctgaagctaagcagagatgatgccaagcctctgctgagactgaagggattcccttcctttcctctggtcgagagacaggccaacgaagtggactggtgggacatggtgtgtaacgtgaagaagctgatcaacgagaaaaaggaggatggcaaggtgttttggcagaatctggctggctacaagagacaggaagccctgagaccatacctgagcagcgaggaagatcggaagaagggaaagaaattcgctcggtaccagctgggcgacctgctgctgcacctggaaaagaagcacggcgaggactggggaaaggtgtacgacgaggcctgggagcggattgacaagaaagtggaaggcctgagcaagcacatcaagctggaagaggaacggagaagcgaggacgcccagagcaaggccgccctgaccgactggctgcgggctaaggccagcttcgtgatcgagggcctgaaggaggccgacaaggacgagttctgcagatgcgagctgaagctgcagaagtggtacggggacctgcggggaaagcccttcgccatcgaagccgagaacagcatcctggacatcagcggcttcagcaagcagtacaactgtgccttcatctggcagaaggacggcgtgaagaagctgaacctgtacctgatcatcaactacttcaagggcggcaagctgcggttcaagaagatcaaacctgaagccttcgaagccaacagattctacaccgtgatcaacaaaaagagcggcgagatcgtgcccatggaggtgaacttcaacttcgacgaccccaacctgatcatcctgcctctggcctttggcaagagacagggcagagaattcatctggaacgacctgctgtccctggaaaccggcagcctgaagctggccaacggaagagtgatcgagaagacactgtacaacagaagaacccggcaggatgagcctgccctgttcgtggccctgaccttcgagcggcgggaggtcctggactcctccaatatcaaaccaatgaacctgatcggcgtggcaagaggcgaaaacatccccgccgtgatcgccctgaccgaccccgagggctgcccactgagccggtttaaggatagcctgggaaacccaacccacatcctgagaatcggcgagagctataaggagaagcagcggaccatccaggccaagaaggaggtggagcagcggagagccggcggctacagccggaagtacgccagcaaagccaagaatctggcagacgatatggtgagaaacaccgctagagatctgctgtactacgccgtgacccaggatgccatgctgatcttcgccaacctgagccggggcttcggccggcagggcaagcggaccttcatggccgagagacagtacacacggatggaggactggctgaccgccaagctggcctacgagggcctgagcaagacctacctgtccaagacactggcccagtacacctccaagacatgcagcaactgtgggtttaccatcaccagcgccgactacgacagggtgctggagaagctgaagaagacagcaacaggctggatgaccacaattaacggcaaggagctgaaggtggagggccagattacctactacaacagatacaagagacagaacgtagtcaaggacctgtccgtcgagctggatagactgagcgaagaatctgtgaacaacgacatctcctcctggacaaagggcagaagcggagaagctctgagcctcctgaagaaaagattctcccatagacccgtgcaggagaagttcgtgtgcctgaactgcggcttcgagacacacgcagccgagcaagccgccctgaacatcgccagatcctggctgttcctgcggagccaggagtacaagaaataccagacaaacaagacaaccggcaacaccgataagagagccttcgtcgagacctggcagtccttttaccggaagaagcttaaggaggtgtggaaacctgccgtgcggtctggcggatctggcggaggctccaccagccccaagaaaaagagaaaagtctaagctgccttctgcggggcttgccttctggccatgcccttcttctctcccttgcacctgtacctcttggtctttgaataaagcctgagtaggaaggctagcaaaaaaaaaaaaaaaaaaaaaaaaaaaaaaaaaaaaaaaaaaaaaaaaaaaaaaaaaaaaaaaaaaaaaaaaaaaaaaaa

SEQ ID NO: 12890 - RNA, 5785 nt, synthetic construct
  source 1..5785: mol_type = other RNA
aggaaataagagagaaaagaagagtaagaagaaatataagagccaccatggcccctaagaagaagcgtaaagtgagccggatggaacgcctcgtctacgaggtgcggcagaagtgcagaaacatcgaggacatctgcatctcctgcggatctctgaacgtgaccctggagcacccactgttcatcggcggcatgtgccagaactgtaaaaactgttttctggagtgtgcctatcaatacgacgatgacggctaccagagctactgcaccatctgttgcggcggaagagaggtgctgatgtgtggaaataacaactgctgccggtgcttctgcgtggaatgcgtggacctgctggtgggccccggcgccgcccaggccgctattaaggaagatccttggaactgctacatgtgcggccacaagggcacatacggcctgctgagacggagagaggactggcctagcagactgcagatgttcttcgccaataaccacgaccaggagttcgacccccctaaggtgtaccctcccgtccccgccgagaagagaaagcccatccgggtcctgagcctgttcgatggcatcgccaccggtctgctggtgctgaaggacctgggcatccaggtggataggtacattgcctccgaggtgtgcgaggactccatcaccgtgggaatggtgcgtcatcagggcaagatcatgtacgtgggcgacgtgcggagcgtgacacagaagcatatccaggagtggggccctttcgacctggtgatcggcggcagcccttgcaatgacctgagcatcgtgaacccagcccggaagggcctgtacgagggaaccggcagactgttcttcgagttttacagactgctgcacgacgcccggcctaaggaaggcgacgaccggcccttcttttggctgttcgagaatgtggtggccatgggagtcagcgacaagcgggatattagccggttcctggagagcaaccccgtgatgatcgatgccaaggaagtgagcgccgcccaccgggccagatacttctggggcaatctgcctggcatgaacagacccctggccagcaccgtgaacgacaagctggagctgcaggagtgcctggagcacggccggatcgccaagttcagcaaggtgagaaccatcaccacccgaagcaacagcatcaaacaaggcaaggaccagcactttcctgtgttcatgaacgagaaggaggacatcctgtggtgtaccgagatggagagagtgttcgggttcccagtccactacacagatgtcagcaacatgtctagactggccagacagagactgctgggaagaagctggtccgtccctgtgatcagacacctgttcgcccctctgaaggagtacttcgcctgcgtgagcagcggcaacagcaacgccaacagccggggccccagcttctctagcggcctggtgccactgtccctgagagggagccacatgggccccatggagatctacaaaaccgtgagcgcctggaagcggcagcctgtgcgcgtgctgagcctgtttcggaatatcgataaagtcctgaaaagcctgggattcctggagagcggctctggctccggcggtggcaccctgaagtacgtggaggatgtgacaaacgtggtcagacgggatgtggagaagtggggccccttcgatctggtgtacggcagcacccaacccctgggcagctcttgtgaccggtgccctggctggtacatgtttcagttccaccggatcctgcagtacgccctgccgagacaggagtcccagcggccattcttttggattttcatggacaacttgctgctgaccgaggatgaccaggaaactaccactcggttcctgcagaccgaagccgtgaccctgcaggacgtgagaggccgggactaccagaacgccatgcgggtgtggtccaacatccctggactgaaaagcaagcacgcacctctgacccctaaagaagaggagtacctgcaggcccaggtgcggagcagaagcaagctggacgcccctaaggtggatctgctggtgaagaattgcctcctgcccctgagagagtacttcaagtatttcagccagaatagtctgcccctgggaggcagcggcggcggcaggcccagggccgtgaagttcgccgacgtggccgtgtacttcagcaccgaggagtggggctgcctgaggcccgcccagagggccctgtacagggacgtgatgagggagacctacggccacctgggcgccctgggctgcgccggccccaagcccgccctgatcagctggctggagaggaacaccgacgactgggagcccgccgccctggacccccaggagtgccccaggggcgtggccgtgcagggcggcccaagcagcggcgcccctcctcccagcggcggcagcccagccggctccccaacctctaccgaggagggcacctctgagtccgccacccccgagagcggccctggcacctccaccgagcccagcgagggcagcgcacccggcagccctgccggcagccccacctccacagaggagggaaccagcaccgagcccagcgaaggcagcgccccaggcaccagcaccgagcctagtgagcaggagattaaacggatcaacaagatcagaagaagacttgtgaaagacagcaacaccaagaaggccggcaagacaggccccatgaaaaccctgctggttagagtgatgacacccgatctgagagagcggctggaaaacctgagaaagaagcctgaaaatatcccccagcccatcagcaatacatctagagccaacctgaataagctgctgaccgattacaccgaaatgaagaaggcgatcctgcatgtgtactgggaagagttccagaaggaccctgtgggcctgatgagccgggtggcccagcctgccagcaagaagatcgatcagaacaagctgaaacctgagatggacgagaagggcaacctgaccaccgccggctttgcctgctctcagtgtggccagcccctgttcgtgtacaagctggagcaggtgtctgagaagggcaaggcttacaccaactacttcggacggtgcaatgtggccgagcacgaaaagctgatcctgctggcccagctgaagcccgagaaggatagcgacgaagccgtgacatatagcctgggaaagtttgggcagagggccctggatttctacagcattcatgtgaccaaggagtccacccaccccgtgaagcccctggcccagatcgccggaaacagatacgcctccggacctgtgggaaaggccctgagcgacgcatgtatgggcacaatcgcctccttcctgtctaagtaccaggacatcatcatcgaacaccagaaggtggtgaagggcaaccagaagagactggagagcctgcgggagctggccggcaaggaaaacctggaataccctagcgtgaccctgccacctcagcctcacaccaaggagggcgttgatgcctacaacgaagtgatcgcccgggtgcgaatgtgggtgaacctgaacctgtggcagaagctgaagctaagcagagatgatgccaagcctctgctgagactgaagggattcccttcctttcctctggtcgagagacaggccaacgaagtggactggtgggacatggtgtgtaacgtgaagaagctgatcaacgagaaaaaggaggatggcaaggtgttttggcagaatctggctggctacaagagacaggaagccctgagaccatacctgagcagcgaggaagatcggaagaagggaaagaaattcgctcggtaccagctgggcgacctgctgctgcacctggaaaagaagcacggcgaggactggggaaaggtgtacgacgaggcctgggagcggattgacaagaaagtggaaggcctgagcaagcacatcaagctggaagaggaacggagaagcgaggacgcccagagcaaggccgccctgaccgactggctgcgggctaaggccagcttcgtgatcgagggcctgaaggaggccgacaaggacgagttctgcagatgcgagctgaagctgcagaagtggtacggggacctgcggggaaagcccttcgccatcgaagccgagaacagcatcctggacatcagcggcttcagcaagcagtacaactgtgccttcatctggcagaaggacggcgtgaagaagctgaacctgtacctgatcatcaactacttcaagggcggcaagctgcggttcaagaagatcaaacctgaagccttcgaagccaacagattctacaccgtgatcaacaaaaagagcggcgagatcgtgcccatggaggtgaacttcaacttcgacgaccccaacctgatcatcctgcctctggcctttggcaagagacagggcagagaattcatctggaacgacctgctgtccctggaaaccggcagcctgaagctggccaacggaagagtgatcgagaagacactgtacaacagaagaacccggcaggatgagcctgccctgttcgtggccctgaccttcgagcggcgggaggtcctggactcctccaatatcaaaccaatgaacctgatcggcgtggcaagaggcgaaaacatccccgccgtgatcgccctgaccgaccccgagggctgcccactgagccggtttaaggatagcctgggaaacccaacccacatcctgagaatcggcgagagctataaggagaagcagcggaccatccaggccaagaaggaggtggagcagcggagagccggcggctacagccggaagtacgccagcaaagccaagaatctggcagacgatatggtgagaaacaccgctagagatctgctgtactacgccgtgacccaggatgccatgctgatcttcgccaacctgagccggggcttcggccggcagggcaagcggaccttcatggccgagagacagtacacacggatggaggactggctgaccgccaagctggcctacgagggcctgagcaagacctacctgtccaagacactggcccagtacacctccaagacatgcagcaactgtgggtttaccatcaccagcgccgactacgacagggtgctggagaagctgaagaagacagcaacaggctggatgaccacaattaacggcaaggagctgaaggtggagggccagattacctactacaacagatacaagagacagaacgtagtcaaggacctgtccgtcgagctggatagactgagcgaagaatctgtgaacaacgacatctcctcctggacaaagggcagaagcggagaagctctgagcctcctgaagaaaagattctcccatagacccgtgcaggagaagttcgtgtgcctgaactgcggcttcgagacacacgcagccgagcaagccgccctgaacatcgccagatcctggctgttcctgcggagccaggagtacaagaaataccagacaaacaagacaaccggcaacaccgataagagagccttcgtcgagacctggcagtccttttaccggaagaagcttaaggaggtgtggaaacctgccgtgcggtctggcggatctggcggaggctccaccagccccaagaaaaagagaaaagtctaagctgccttctgcggggcttgccttctggccatgcccttcttctctcccttgcacctgtacctcttggtctttgaataaagcctgagtaggaaggctagcaaaaaaaaaaaaaaaaaaaaaaaaaaaaaaaaaaaaaaaaaaaaaaaaaaaaaaaaaaaaaaaaaaaaaaaaaaaaaaaa

SEQ ID NO: 12891 - RNA, 5785 nt, synthetic construct
  source 1..5785: mol_type = other RNA
aggaaataagagagaaaagaagagtaagaagaaatataagagccaccatggcccctaagaagaagcgtaaagtgagccggatggaacgcctcgtctacgaggtgcggcagaagtgcagaaacatcgaggacatctgcatctcctgcggatctctgaacgtgaccctggagcacccactgttcatcggcggcatgtgccagaactgtaaaaactgttttctggagtgtgcctatcaatacgacgatgacggctaccagagctactgcaccatctgttgcggcggaagagaggtgctgatgtgtggaaataacaactgctgccggtgcttctgcgtggaatgcgtggacctgctggtgggccccggcgccgcccaggccgctattaaggaagatccttggaactgctacatgtgcggccacaagggcacatacggcctgctgagacggagagaggactggcctagcagactgcagatgttcttcgccaataaccacgaccaggagttcgacccccctaaggtgtaccctcccgtccccgccgagaagagaaagcccatccgggtcctgagcctgttcgatggcatcgccaccggtctgctggtgctgaaggacctgggcatccaggtggataggtacattgcctccgaggtgtgcgaggactccatcaccgtgggaatggtgcgtcatcagggcaagatcatgtacgtgggcgacgtgcggagcgtgacacagaagcatatccaggagtggggccctttcgacctggtgatcggcggcagcccttgcaatgacctgagcatcgtgaacccagcccggaagggcctgtacgagggaaccggcagactgttcttcgagttttacagactgctgcacgacgcccggcctaaggaaggcgacgaccggcccttcttttggctgttcgagaatgtggtggccatgggagtcagcgacaagcgggatattagccggttcctggagagcaaccccgtgatgatcgatgccaaggaagtgagcgccgcccaccgggccagatacttctggggcaatctgcctggcatgaacagacccctggccagcaccgtgaacgacaagctggagctgcaggagtgcctggagcacggccggatcgccaagttcagcaaggtgagaaccatcaccacccgaagcaacagcatcaaacaaggcaaggaccagcactttcctgtgttcatgaacgagaaggaggacatcctgtggtgtaccgagatggagagagtgttcgggttcccagtccactacacagatgtcagcaacatgtctagactggccagacagagactgctgggaagaagctggtccgtccctgtgatcagacacctgttcgcccctctgaaggagtacttcgcctgcgtgagcagcggcaacagcaacgccaacagccggggccccagcttctctagcggcctggtgccactgtccctgagagggagccacatgggccccatggagatctacaaaaccgtgagcgcctggaagcggcagcctgtgcgcgtgctgagcctgtttcggaatatcgataaagtcctgaaaagcctgggattcctggagagcggctctggctccggcggtggcaccctgaagtacgtggaggatgtgacaaacgtggtcagacgggatgtggagaagtggggccccttcgatctggtgtacggcagcacccaacccctgggcagctcttgtgaccggtgccctggctggtacatgtttcagttccaccggatcctgcagtacgccctgccgagacaggagtcccagcggccattcttttggattttcatggacaacttgctgctgaccgaggatgaccaggaaactaccactcggttcctgcagaccgaagccgtgaccctgcaggacgtgagaggccgggactaccagaacgccatgcgggtgtggtccaacatccctggactgaaaagcaagcacgcacctctgacccctaaagaagaggagtacctgcaggcccaggtgcggagcagaagcaagctggacgcccctaaggtggatctgctggtgaagaattgcctcctgcccctgagagagtacttcaagtatttcagccagaatagtctgcccctgggaggcagcggcggcggcggccaggagagcgtgagcttcaaggacgtgaccgtggacttcacctgggacgagtggctgcagctgaccggcatgcagaggaccctgtacagggacgtgatgctggagaactacagccacctggtgagcgtgggctgctgcatcaccaagcccgaggtgatcttcaagctggagcagggcgaggagccctggcccagggagggcgagctgcccggcaggagggaccccgacaggagccaggagggcggcccaagcagcggcgcccctcctcccagcggcggcagcccagccggctccccaacctctaccgaggagggcacctctgagtccgccacccccgagagcggccctggcacctccaccgagcccagcgagggcagcgcacccggcagccctgccggcagccccacctccacagaggagggaaccagcaccgagcccagcgaaggcagcgccccaggcaccagcaccgagcctagtgagcaggagattaaacggatcaacaagatcagaagaagacttgtgaaagacagcaacaccaagaaggccggcaagacaggccccatgaaaaccctgctggttagagtgatgacacccgatctgagagagcggctggaaaacctgagaaagaagcctgaaaatatcccccagcccatcagcaatacatctagagccaacctgaataagctgctgaccgattacaccgaaatgaagaaggcgatcctgcatgtgtactgggaagagttccagaaggaccctgtgggcctgatgagccgggtggcccagcctgccagcaagaagatcgatcagaacaagctgaaacctgagatggacgagaagggcaacctgaccaccgccggctttgcctgctctcagtgtggccagcccctgttcgtgtacaagctggagcaggtgtctgagaagggcaaggcttacaccaactacttcggacggtgcaatgtggccgagcacgaaaagctgatcctgctggcccagctgaagcccgagaaggatagcgacgaagccgtgacatatagcctgggaaagtttgggcagagggccctggatttctacagcattcatgtgaccaaggagtccacccaccccgtgaagcccctggcccagatcgccggaaacagatacgcctccggacctgtgggaaaggccctgagcgacgcatgtatgggcacaatcgcctccttcctgtctaagtaccaggacatcatcatcgaacaccagaaggtggtgaagggcaaccagaagagactggagagcctgcgggagctggccggcaaggaaaacctggaataccctagcgtgaccctgccacctcagcctcacaccaaggagggcgttgatgcctacaacgaagtgatcgcccgggtgcgaatgtgggtgaacctgaacctgtggcagaagctgaagctaagcagagatgatgccaagcctctgctgagactgaagggattcccttcctttcctctggtcgagagacaggccaacgaagtggactggtgggacatggtgtgtaacgtgaagaagctgatcaacgagaaaaaggaggatggcaaggtgttttggcagaatctggctggctacaagagacaggaagccctgagaccatacctgagcagcgaggaagatcggaagaagggaaagaaattcgctcggtaccagctgggcgacctgctgctgcacctggaaaagaagcacggcgaggactggggaaaggtgtacgacgaggcctgggagcggattgacaagaaagtggaaggcctgagcaagcacatcaagctggaagaggaacggagaagcgaggacgcccagagcaaggccgccctgaccgactggctgcgggctaaggccagcttcgtgatcgagggcctgaaggaggccgacaaggacgagttctgcagatgcgagctgaagctgcagaagtggtacggggacctgcggggaaagcccttcgccatcgaagccgagaacagcatcctggacatcagcggcttcagcaagcagtacaactgtgccttcatctggcagaaggacggcgtgaagaagctgaacctgtacctgatcatcaactacttcaagggcggcaagctgcggttcaagaagatcaaacctgaagccttcgaagccaacagattctacaccgtgatcaacaaaaagagcggcgagatcgtgcccatggaggtgaacttcaacttcgacgaccccaacctgatcatcctgcctctggcctttggcaagagacagggcagagaattcatctggaacgacctgctgtccctggaaaccggcagcctgaagctggccaacggaagagtgatcgagaagacactgtacaacagaagaacccggcaggatgagcctgccctgttcgtggccctgaccttcgagcggcgggaggtcctggactcctccaatatcaaaccaatgaacctgatcggcgtggcaagaggcgaaaacatccccgccgtgatcgccctgaccgaccccgagggctgcccactgagccggtttaaggatagcctgggaaacccaacccacatcctgagaatcggcgagagctataaggagaagcagcggaccatccaggccaagaaggaggtggagcagcggagagccggcggctacagccggaagtacgccagcaaagccaagaatctggcagacgatatggtgagaaacaccgctagagatctgctgtactacgccgtgacccaggatgccatgctgatcttcgccaacctgagccggggcttcggccggcagggcaagcggaccttcatggccgagagacagtacacacggatggaggactggctgaccgccaagctggcctacgagggcctgagcaagacctacctgtccaagacactggcccagtacacctccaagacatgcagcaactgtgggtttaccatcaccagcgccgactacgacagggtgctggagaagctgaagaagacagcaacaggctggatgaccacaattaacggcaaggagctgaaggtggagggccagattacctactacaacagatacaagagacagaacgtagtcaaggacctgtccgtcgagctggatagactgagcgaagaatctgtgaacaacgacatctcctcctggacaaagggcagaagcggagaagctctgagcctcctgaagaaaagattctcccatagacccgtgcaggagaagttcgtgtgcctgaactgcggcttcgagacacacgcagccgagcaagccgccctgaacatcgccagatcctggctgttcctgcggagccaggagtacaagaaataccagacaaacaagacaaccggcaacaccgataagagagccttcgtcgagacctggcagtccttttaccggaagaagcttaaggaggtgtggaaacctgccgtgcggtctggcggatctggcggaggctccaccagccccaagaaaaagagaaaagtctaagctgccttctgcggggcttgccttctggccatgcccttcttctctcccttgcacctgtacctcttggtctttgaataaagcctgagtaggaaggctagcaaaaaaaaaaaaaaaaaaaaaaaaaaaaaaaaaaaaaaaaaaaaaaaaaaaaaaaaaaaaaaaaaaaaaaaaaaaaaaaa

SEQ ID NO: 12892 - RNA, 5785 nt, synthetic construct
  source 1..5785: mol_type = other RNA
aggaaataagagagaaaagaagagtaagaagaaatataagagccaccatggcccctaagaagaagcgtaaagtgagccggatggaacgcctcgtctacgaggtgcggcagaagtgcagaaacatcgaggacatctgcatctcctgcggatctctgaacgtgaccctggagcacccactgttcatcggcggcatgtgccagaactgtaaaaactgttttctggagtgtgcctatcaatacgacgatgacggctaccagagctactgcaccatctgttgcggcggaagagaggtgctgatgtgtggaaataacaactgctgccggtgcttctgcgtggaatgcgtggacctgctggtgggccccggcgccgcccaggccgctattaaggaagatccttggaactgctacatgtgcggccacaagggcacatacggcctgctgagacggagagaggactggcctagcagactgcagatgttcttcgccaataaccacgaccaggagttcgacccccctaaggtgtaccctcccgtccccgccgagaagagaaagcccatccgggtcctgagcctgttcgatggcatcgccaccggtctgctggtgctgaaggacctgggcatccaggtggataggtacattgcctccgaggtgtgcgaggactccatcaccgtgggaatggtgcgtcatcagggcaagatcatgtacgtgggcgacgtgcggagcgtgacacagaagcatatccaggagtggggccctttcgacctggtgatcggcggcagcccttgcaatgacctgagcatcgtgaacccagcccggaagggcctgtacgagggaaccggcagactgttcttcgagttttacagactgctgcacgacgcccggcctaaggaaggcgacgaccggcccttcttttggctgttcgagaatgtggtggccatgggagtcagcgacaagcgggatattagccggttcctggagagcaaccccgtgatgatcgatgccaaggaagtgagcgccgcccaccgggccagatacttctggggcaatctgcctggcatgaacagacccctggccagcaccgtgaacgacaagctggagctgcaggagtgcctggagcacggccggatcgccaagttcagcaaggtgagaaccatcaccacccgaagcaacagcatcaaacaaggcaaggaccagcactttcctgtgttcatgaacgagaaggaggacatcctgtggtgtaccgagatggagagagtgttcgggttcccagtccactacacagatgtcagcaacatgtctagactggccagacagagactgctgggaagaagctggtccgtccctgtgatcagacacctgttcgcccctctgaaggagtacttcgcctgcgtgagcagcggcaacagcaacgccaacagccggggccccagcttctctagcggcctggtgccactgtccctgagagggagccacatgggccccatggagatctacaaaaccgtgagcgcctggaagcggcagcctgtgcgcgtgctgagcctgtttcggaatatcgataaagtcctgaaaagcctgggattcctggagagcggctctggctccggcggtggcaccctgaagtacgtggaggatgtgacaaacgtggtcagacgggatgtggagaagtggggccccttcgatctggtgtacggcagcacccaacccctgggcagctcttgtgaccggtgccctggctggtacatgtttcagttccaccggatcctgcagtacgccctgccgagacaggagtcccagcggccattcttttggattttcatggacaacttgctgctgaccgaggatgaccaggaaactaccactcggttcctgcagaccgaagccgtgaccctgcaggacgtgagaggccgggactaccagaacgccatgcgggtgtggtccaacatccctggactgaaaagcaagcacgcacctctgacccctaaagaagaggagtacctgcaggcccaggtgcggagcagaagcaagctggacgcccctaaggtggatctgctggtgaagaattgcctcctgcccctgagagagtacttcaagtatttcagccagaatagtctgcccctgggaggcagcggcggcggccaggacgccgtgaccttcaaggacgtggccatctacttcagccccgaggagtgggtgaggctgagcgccggccagagggagctgtaccaggaggtgatgctggacaactacgagctggtgaccagcctggacagggagtgcaagctgctgtacaagatggaccccgaggaggagccctgcgagggcgtgccctgcaggggcgtggacagcggcgccctggacaacagcagcaccagcgcctgcggcggcccaagcagcggcgcccctcctcccagcggcggcagcccagccggctccccaacctctaccgaggagggcacctctgagtccgccacccccgagagcggccctggcacctccaccgagcccagcgagggcagcgcacccggcagccctgccggcagccccacctccacagaggagggaaccagcaccgagcccagcgaaggcagcgccccaggcaccagcaccgagcctagtgagcaggagattaaacggatcaacaagatcagaagaagacttgtgaaagacagcaacaccaagaaggccggcaagacaggccccatgaaaaccctgctggttagagtgatgacacccgatctgagagagcggctggaaaacctgagaaagaagcctgaaaatatcccccagcccatcagcaatacatctagagccaacctgaataagctgctgaccgattacaccgaaatgaagaaggcgatcctgcatgtgtactgggaagagttccagaaggaccctgtgggcctgatgagccgggtggcccagcctgccagcaagaagatcgatcagaacaagctgaaacctgagatggacgagaagggcaacctgaccaccgccggctttgcctgctctcagtgtggccagcccctgttcgtgtacaagctggagcaggtgtctgagaagggcaaggcttacaccaactacttcggacggtgcaatgtggccgagcacgaaaagctgatcctgctggcccagctgaagcccgagaaggatagcgacgaagccgtgacatatagcctgggaaagtttgggcagagggccctggatttctacagcattcatgtgaccaaggagtccacccaccccgtgaagcccctggcccagatcgccggaaacagatacgcctccggacctgtgggaaaggccctgagcgacgcatgtatgggcacaatcgcctccttcctgtctaagtaccaggacatcatcatcgaacaccagaaggtggtgaagggcaaccagaagagactggagagcctgcgggagctggccggcaaggaaaacctggaataccctagcgtgaccctgccacctcagcctcacaccaaggagggcgttgatgcctacaacgaagtgatcgcccgggtgcgaatgtgggtgaacctgaacctgtggcagaagctgaagctaagcagagatgatgccaagcctctgctgagactgaagggattcccttcctttcctctggtcgagagacaggccaacgaagtggactggtgggacatggtgtgtaacgtgaagaagctgatcaacgagaaaaaggaggatggcaaggtgttttggcagaatctggctggctacaagagacaggaagccctgagaccatacctgagcagcgaggaagatcggaagaagggaaagaaattcgctcggtaccagctgggcgacctgctgctgcacctggaaaagaagcacggcgaggactggggaaaggtgtacgacgaggcctgggagcggattgacaagaaagtggaaggcctgagcaagcacatcaagctggaagaggaacggagaagcgaggacgcccagagcaaggccgccctgaccgactggctgcgggctaaggccagcttcgtgatcgagggcctgaaggaggccgacaaggacgagttctgcagatgcgagctgaagctgcagaagtggtacggggacctgcggggaaagcccttcgccatcgaagccgagaacagcatcctggacatcagcggcttcagcaagcagtacaactgtgccttcatctggcagaaggacggcgtgaagaagctgaacctgtacctgatcatcaactacttcaagggcggcaagctgcggttcaagaagatcaaacctgaagccttcgaagccaacagattctacaccgtgatcaacaaaaagagcggcgagatcgtgcccatggaggtgaacttcaacttcgacgaccccaacctgatcatcctgcctctggcctttggcaagagacagggcagagaattcatctggaacgacctgctgtccctggaaaccggcagcctgaagctggccaacggaagagtgatcgagaagacactgtacaacagaagaacccggcaggatgagcctgccctgttcgtggccctgaccttcgagcggcgggaggtcctggactcctccaatatcaaaccaatgaacctgatcggcgtggcaagaggcgaaaacatccccgccgtgatcgccctgaccgaccccgagggctgcccactgagccggtttaaggatagcctgggaaacccaacccacatcctgagaatcggcgagagctataaggagaagcagcggaccatccaggccaagaaggaggtggagcagcggagagccggcggctacagccggaagtacgccagcaaagccaagaatctggcagacgatatggtgagaaacaccgctagagatctgctgtactacgccgtgacccaggatgccatgctgatcttcgccaacctgagccggggcttcggccggcagggcaagcggaccttcatggccgagagacagtacacacggatggaggactggctgaccgccaagctggcctacgagggcctgagcaagacctacctgtccaagacactggcccagtacacctccaagacatgcagcaactgtgggtttaccatcaccagcgccgactacgacagggtgctggagaagctgaagaagacagcaacaggctggatgaccacaattaacggcaaggagctgaaggtggagggccagattacctactacaacagatacaagagacagaacgtagtcaaggacctgtccgtcgagctggatagactgagcgaagaatctgtgaacaacgacatctcctcctggacaaagggcagaagcggagaagctctgagcctcctgaagaaaagattctcccatagacccgtgcaggagaagttcgtgtgcctgaactgcggcttcgagacacacgcagccgagcaagccgccctgaacatcgccagatcctggctgttcctgcggagccaggagtacaagaaataccagacaaacaagacaaccggcaacaccgataagagagccttcgtcgagacctggcagtccttttaccggaagaagcttaaggaggtgtggaaacctgccgtgcggtctggcggatctggcggaggctccaccagccccaagaaaaagagaaaagtctaagctgccttctgcggggcttgccttctggccatgcccttcttctctcccttgcacctgtacctcttggtctttgaataaagcctgagtaggaaggctagcaaaaaaaaaaaaaaaaaaaaaaaaaaaaaaaaaaaaaaaaaaaaaaaaaaaaaaaaaaaaaaaaaaaaaaaaaaaaaaaa

SEQ ID NO: 12893 - RNA, 5785 nt, synthetic construct
  source 1..5785: mol_type = other RNA
aggaaataagagagaaaagaagagtaagaagaaatataagagccaccatggcccctaagaagaagcgtaaagtgagccggatggaacgcctcgtctacgaggtgcggcagaagtgcagaaacatcgaggacatctgcatctcctgcggatctctgaacgtgaccctggagcacccactgttcatcggcggcatgtgccagaactgtaaaaactgttttctggagtgtgcctatcaatacgacgatgacggctaccagagctactgcaccatctgttgcggcggaagagaggtgctgatgtgtggaaataacaactgctgccggtgcttctgcgtggaatgcgtggacctgctggtgggccccggcgccgcccaggccgctattaaggaagatccttggaactgctacatgtgcggccacaagggcacatacggcctgctgagacggagagaggactggcctagcagactgcagatgttcttcgccaataaccacgaccaggagttcgacccccctaaggtgtaccctcccgtccccgccgagaagagaaagcccatccgggtcctgagcctgttcgatggcatcgccaccggtctgctggtgctgaaggacctgggcatccaggtggataggtacattgcctccgaggtgtgcgaggactccatcaccgtgggaatggtgcgtcatcagggcaagatcatgtacgtgggcgacgtgcggagcgtgacacagaagcatatccaggagtggggccctttcgacctggtgatcggcggcagcccttgcaatgacctgagcatcgtgaacccagcccggaagggcctgtacgagggaaccggcagactgttcttcgagttttacagactgctgcacgacgcccggcctaaggaaggcgacgaccggcccttcttttggctgttcgagaatgtggtggccatgggagtcagcgacaagcgggatattagccggttcctggagagcaaccccgtgatgatcgatgccaaggaagtgagcgccgcccaccgggccagatacttctggggcaatctgcctggcatgaacagacccctggccagcaccgtgaacgacaagctggagctgcaggagtgcctggagcacggccggatcgccaagttcagcaaggtgagaaccatcaccacccgaagcaacagcatcaaacaaggcaaggaccagcactttcctgtgttcatgaacgagaaggaggacatcctgtggtgtaccgagatggagagagtgttcgggttcccagtccactacacagatgtcagcaacatgtctagactggccagacagagactgctgggaagaagctggtccgtccctgtgatcagacacctgttcgcccctctgaaggagtacttcgcctgcgtgagcagcggcaacagcaacgccaacagccggggccccagcttctctagcggcctggtgccactgtccctgagagggagccacatgggccccatggagatctacaaaaccgtgagcgcctggaagcggcagcctgtgcgcgtgctgagcctgtttcggaatatcgataaagtcctgaaaagcctgggattcctggagagcggctctggctccggcggtggcaccctgaagtacgtggaggatgtgacaaacgtggtcagacgggatgtggagaagtggggccccttcgatctggtgtacggcagcacccaacccctgggcagctcttgtgaccggtgccctggctggtacatgtttcagttccaccggatcctgcagtacgccctgccgagacaggagtcccagcggccattcttttggattttcatggacaacttgctgctgaccgaggatgaccaggaaactaccactcggttcctgcagaccgaagccgtgaccctgcaggacgtgagaggccgggactaccagaacgccatgcgggtgtggtccaacatccctggactgaaaagcaagcacgcacctctgacccctaaagaagaggagtacctgcaggcccaggtgcggagcagaagcaagctggacgcccctaaggtggatctgctggtgaagaattgcctcctgcccctgagagagtacttcaagtatttcagccagaatagtctgcccctgggaggcagcggcggcggcatggacagcgtggccttcgaggacgtggccgtgaacttcacccaggaggagtggagcctgctggaccccagccagaagaacctgtacagggaggtgatgcaggagaccctgaggaacctggccagcatcggcgagaagtggaaggaccagtacatcgaggaccagtacaagaaccccaggaacaacctgaggagcctgctgggcgagagggtggacgagaacaccgaggagaaccactgcggcggcggcccaagcagcggcgcccctcctcccagcggcggcagcccagccggctccccaacctctaccgaggagggcacctctgagtccgccacccccgagagcggccctggcacctccaccgagcccagcgagggcagcgcacccggcagccctgccggcagccccacctccacagaggagggaaccagcaccgagcccagcgaaggcagcgccccaggcaccagcaccgagcctagtgagcaggagattaaacggatcaacaagatcagaagaagacttgtgaaagacagcaacaccaagaaggccggcaagacaggccccatgaaaaccctgctggttagagtgatgacacccgatctgagagagcggctggaaaacctgagaaagaagcctgaaaatatcccccagcccatcagcaatacatctagagccaacctgaataagctgctgaccgattacaccgaaatgaagaaggcgatcctgcatgtgtactgggaagagttccagaaggaccctgtgggcctgatgagccgggtggcccagcctgccagcaagaagatcgatcagaacaagctgaaacctgagatggacgagaagggcaacctgaccaccgccggctttgcctgctctcagtgtggccagcccctgttcgtgtacaagctggagcaggtgtctgagaagggcaaggcttacaccaactacttcggacggtgcaatgtggccgagcacgaaaagctgatcctgctggcccagctgaagcccgagaaggatagcgacgaagccgtgacatatagcctgggaaagtttgggcagagggccctggatttctacagcattcatgtgaccaaggagtccacccaccccgtgaagcccctggcccagatcgccggaaacagatacgcctccggacctgtgggaaaggccctgagcgacgcatgtatgggcacaatcgcctccttcctgtctaagtaccaggacatcatcatcgaacaccagaaggtggtgaagggcaaccagaagagactggagagcctgcgggagctggccggcaaggaaaacctggaataccctagcgtgaccctgccacctcagcctcacaccaaggagggcgttgatgcctacaacgaagtgatcgcccgggtgcgaatgtgggtgaacctgaacctgtggcagaagctgaagctaagcagagatgatgccaagcctctgctgagactgaagggattcccttcctttcctctggtcgagagacaggccaacgaagtggactggtgggacatggtgtgtaacgtgaagaagctgatcaacgagaaaaaggaggatggcaaggtgttttggcagaatctggctggctacaagagacaggaagccctgagaccatacctgagcagcgaggaagatcggaagaagggaaagaaattcgctcggtaccagctgggcgacctgctgctgcacctggaaaagaagcacggcgaggactggggaaaggtgtacgacgaggcctgggagcggattgacaagaaagtggaaggcctgagcaagcacatcaagctggaagaggaacggagaagcgaggacgcccagagcaaggccgccctgaccgactggctgcgggctaaggccagcttcgtgatcgagggcctgaaggaggccgacaaggacgagttctgcagatgcgagctgaagctgcagaagtggtacggggacctgcggggaaagcccttcgccatcgaagccgagaacagcatcctggacatcagcggcttcagcaagcagtacaactgtgccttcatctggcagaaggacggcgtgaagaagctgaacctgtacctgatcatcaactacttcaagggcggcaagctgcggttcaagaagatcaaacctgaagccttcgaagccaacagattctacaccgtgatcaacaaaaagagcggcgagatcgtgcccatggaggtgaacttcaacttcgacgaccccaacctgatcatcctgcctctggcctttggcaagagacagggcagagaattcatctggaacgacctgctgtccctggaaaccggcagcctgaagctggccaacggaagagtgatcgagaagacactgtacaacagaagaacccggcaggatgagcctgccctgttcgtggccctgaccttcgagcggcgggaggtcctggactcctccaatatcaaaccaatgaacctgatcggcgtggcaagaggcgaaaacatccccgccgtgatcgccctgaccgaccccgagggctgcccactgagccggtttaaggatagcctgggaaacccaacccacatcctgagaatcggcgagagctataaggagaagcagcggaccatccaggccaagaaggaggtggagcagcggagagccggcggctacagccggaagtacgccagcaaagccaagaatctggcagacgatatggtgagaaacaccgctagagatctgctgtactacgccgtgacccaggatgccatgctgatcttcgccaacctgagccggggcttcggccggcagggcaagcggaccttcatggccgagagacagtacacacggatggaggactggctgaccgccaagctggcctacgagggcctgagcaagacctacctgtccaagacactggcccagtacacctccaagacatgcagcaactgtgggtttaccatcaccagcgccgactacgacagggtgctggagaagctgaagaagacagcaacaggctggatgaccacaattaacggcaaggagctgaaggtggagggccagattacctactacaacagatacaagagacagaacgtagtcaaggacctgtccgtcgagctggatagactgagcgaagaatctgtgaacaacgacatctcctcctggacaaagggcagaagcggagaagctctgagcctcctgaagaaaagattctcccatagacccgtgcaggagaagttcgtgtgcctgaactgcggcttcgagacacacgcagccgagcaagccgccctgaacatcgccagatcctggctgttcctgcggagccaggagtacaagaaataccagacaaacaagacaaccggcaacaccgataagagagccttcgtcgagacctggcagtccttttaccggaagaagcttaaggaggtgtggaaacctgccgtgcggtctggcggatctggcggaggctccaccagccccaagaaaaagagaaaagtctaagctgccttctgcggggcttgccttctggccatgcccttcttctctcccttgcacctgtacctcttggtctttgaataaagcctgagtaggaaggctagcaaaaaaaaaaaaaaaaaaaaaaaaaaaaaaaaaaaaaaaaaaaaaaaaaaaaaaaaaaaaaaaaaaaaaaaaaaaaaaaa

SEQ ID NO: 12894 - RNA, 5785 nt, synthetic construct
  source 1..5785: mol_type = other RNA
aggaaataagagagaaaagaagagtaagaagaaatataagagccaccatggcccctaagaagaagcgtaaagtgagccggatggaacgcctcgtctacgaggtgcggcagaagtgcagaaacatcgaggacatctgcatctcctgcggatctctgaacgtgaccctggagcacccactgttcatcggcggcatgtgccagaactgtaaaaactgttttctggagtgtgcctatcaatacgacgatgacggctaccagagctactgcaccatctgttgcggcggaagagaggtgctgatgtgtggaaataacaactgctgccggtgcttctgcgtggaatgcgtggacctgctggtgggccccggcgccgcccaggccgctattaaggaagatccttggaactgctacatgtgcggccacaagggcacatacggcctgctgagacggagagaggactggcctagcagactgcagatgttcttcgccaataaccacgaccaggagttcgacccccctaaggtgtaccctcccgtccccgccgagaagagaaagcccatccgggtcctgagcctgttcgatggcatcgccaccggtctgctggtgctgaaggacctgggcatccaggtggataggtacattgcctccgaggtgtgcgaggactccatcaccgtgggaatggtgcgtcatcagggcaagatcatgtacgtgggcgacgtgcggagcgtgacacagaagcatatccaggagtggggccctttcgacctggtgatcggcggcagcccttgcaatgacctgagcatcgtgaacccagcccggaagggcctgtacgagggaaccggcagactgttcttcgagttttacagactgctgcacgacgcccggcctaaggaaggcgacgaccggcccttcttttggctgttcgagaatgtggtggccatgggagtcagcgacaagcgggatattagccggttcctggagagcaaccccgtgatgatcgatgccaaggaagtgagcgccgcccaccgggccagatacttctggggcaatctgcctggcatgaacagacccctggccagcaccgtgaacgacaagctggagctgcaggagtgcctggagcacggccggatcgccaagttcagcaaggtgagaaccatcaccacccgaagcaacagcatcaaacaaggcaaggaccagcactttcctgtgttcatgaacgagaaggaggacatcctgtggtgtaccgagatggagagagtgttcgggttcccagtccactacacagatgtcagcaacatgtctagactggccagacagagactgctgggaagaagctggtccgtccctgtgatcagacacctgttcgcccctctgaaggagtacttcgcctgcgtgagcagcggcaacagcaacgccaacagccggggccccagcttctctagcggcctggtgccactgtccctgagagggagccacatgggccccatggagatctacaaaaccgtgagcgcctggaagcggcagcctgtgcgcgtgctgagcctgtttcggaatatcgataaagtcctgaaaagcctgggattcctggagagcggctctggctccggcggtggcaccctgaagtacgtggaggatgtgacaaacgtggtcagacgggatgtggagaagtggggccccttcgatctggtgtacggcagcacccaacccctgggcagctcttgtgaccggtgccctggctggtacatgtttcagttccaccggatcctgcagtacgccctgccgagacaggagtcccagcggccattcttttggattttcatggacaacttgctgctgaccgaggatgaccaggaaactaccactcggttcctgcagaccgaagccgtgaccctgcaggacgtgagaggccgggactaccagaacgccatgcgggtgtggtccaacatccctggactgaaaagcaagcacgcacctctgacccctaaagaagaggagtacctgcaggcccaggtgcggagcagaagcaagctggacgcccctaaggtggatctgctggtgaagaattgcctcctgcccctgagagagtacttcaagtatttcagccagaatagtctgcccctgggaggcagcggcggcggccaggcccaggaggtgctgatgttcgacgacgtggccgtgaggttcacctgggaggagtggcagctgctgaaccccgcccagaaggccctgtacagggacgtgatgctggagaactacaggagcctggtgagcgtgggctggagggccagcaagcccgacctgctgagccagctggagaggggcgagccctggaccatcgagggcgagaaccactgcggcaccccccccgagatctggaaggccggcggcccaagcagcggcgcccctcctcccagcggcggcagcccagccggctccccaacctctaccgaggagggcacctctgagtccgccacccccgagagcggccctggcacctccaccgagcccagcgagggcagcgcacccggcagccctgccggcagccccacctccacagaggagggaaccagcaccgagcccagcgaaggcagcgccccaggcaccagcaccgagcctagtgagcaggagattaaacggatcaacaagatcagaagaagacttgtgaaagacagcaacaccaagaaggccggcaagacaggccccatgaaaaccctgctggttagagtgatgacacccgatctgagagagcggctggaaaacctgagaaagaagcctgaaaatatcccccagcccatcagcaatacatctagagccaacctgaataagctgctgaccgattacaccgaaatgaagaaggcgatcctgcatgtgtactgggaagagttccagaaggaccctgtgggcctgatgagccgggtggcccagcctgccagcaagaagatcgatcagaacaagctgaaacctgagatggacgagaagggcaacctgaccaccgccggctttgcctgctctcagtgtggccagcccctgttcgtgtacaagctggagcaggtgtctgagaagggcaaggcttacaccaactacttcggacggtgcaatgtggccgagcacgaaaagctgatcctgctggcccagctgaagcccgagaaggatagcgacgaagccgtgacatatagcctgggaaagtttgggcagagggccctggatttctacagcattcatgtgaccaaggagtccacccaccccgtgaagcccctggcccagatcgccggaaacagatacgcctccggacctgtgggaaaggccctgagcgacgcatgtatgggcacaatcgcctccttcctgtctaagtaccaggacatcatcatcgaacaccagaaggtggtgaagggcaaccagaagagactggagagcctgcgggagctggccggcaaggaaaacctggaataccctagcgtgaccctgccacctcagcctcacaccaaggagggcgttgatgcctacaacgaagtgatcgcccgggtgcgaatgtgggtgaacctgaacctgtggcagaagctgaagctaagcagagatgatgccaagcctctgctgagactgaagggattcccttcctttcctctggtcgagagacaggccaacgaagtggactggtgggacatggtgtgtaacgtgaagaagctgatcaacgagaaaaaggaggatggcaaggtgttttggcagaatctggctggctacaagagacaggaagccctgagaccatacctgagcagcgaggaagatcggaagaagggaaagaaattcgctcggtaccagctgggcgacctgctgctgcacctggaaaagaagcacggcgaggactggggaaaggtgtacgacgaggcctgggagcggattgacaagaaagtggaaggcctgagcaagcacatcaagctggaagaggaacggagaagcgaggacgcccagagcaaggccgccctgaccgactggctgcgggctaaggccagcttcgtgatcgagggcctgaaggaggccgacaaggacgagttctgcagatgcgagctgaagctgcagaagtggtacggggacctgcggggaaagcccttcgccatcgaagccgagaacagcatcctggacatcagcggcttcagcaagcagtacaactgtgccttcatctggcagaaggacggcgtgaagaagctgaacctgtacctgatcatcaactacttcaagggcggcaagctgcggttcaagaagatcaaacctgaagccttcgaagccaacagattctacaccgtgatcaacaaaaagagcggcgagatcgtgcccatggaggtgaacttcaacttcgacgaccccaacctgatcatcctgcctctggcctttggcaagagacagggcagagaattcatctggaacgacctgctgtccctggaaaccggcagcctgaagctggccaacggaagagtgatcgagaagacactgtacaacagaagaacccggcaggatgagcctgccctgttcgtggccctgaccttcgagcggcgggaggtcctggactcctccaatatcaaaccaatgaacctgatcggcgtggcaagaggcgaaaacatccccgccgtgatcgccctgaccgaccccgagggctgcccactgagccggtttaaggatagcctgggaaacccaacccacatcctgagaatcggcgagagctataaggagaagcagcggaccatccaggccaagaaggaggtggagcagcggagagccggcggctacagccggaagtacgccagcaaagccaagaatctggcagacgatatggtgagaaacaccgctagagatctgctgtactacgccgtgacccaggatgccatgctgatcttcgccaacctgagccggggcttcggccggcagggcaagcggaccttcatggccgagagacagtacacacggatggaggactggctgaccgccaagctggcctacgagggcctgagcaagacctacctgtccaagacactggcccagtacacctccaagacatgcagcaactgtgggtttaccatcaccagcgccgactacgacagggtgctggagaagctgaagaagacagcaacaggctggatgaccacaattaacggcaaggagctgaaggtggagggccagattacctactacaacagatacaagagacagaacgtagtcaaggacctgtccgtcgagctggatagactgagcgaagaatctgtgaacaacgacatctcctcctggacaaagggcagaagcggagaagctctgagcctcctgaagaaaagattctcccatagacccgtgcaggagaagttcgtgtgcctgaactgcggcttcgagacacacgcagccgagcaagccgccctgaacatcgccagatcctggctgttcctgcggagccaggagtacaagaaataccagacaaacaagacaaccggcaacaccgataagagagccttcgtcgagacctggcagtccttttaccggaagaagcttaaggaggtgtggaaacctgccgtgcggtctggcggatctggcggaggctccaccagccccaagaaaaagagaaaagtctaagctgccttctgcggggcttgccttctggccatgcccttcttctctcccttgcacctgtacctcttggtctttgaataaagcctgagtaggaaggctagcaaaaaaaaaaaaaaaaaaaaaaaaaaaaaaaaaaaaaaaaaaaaaaaaaaaaaaaaaaaaaaaaaaaaaaaaaaaaaaaa

SEQ ID NO: 12895 - RNA, 5785 nt, synthetic construct
  source 1..5785: mol_type = other RNA
aggaaataagagagaaaagaagagtaagaagaaatataagagccaccatggcccctaagaagaagcgtaaagtgagccggatggaacgcctcgtctacgaggtgcggcagaagtgcagaaacatcgaggacatctgcatctcctgcggatctctgaacgtgaccctggagcacccactgttcatcggcggcatgtgccagaactgtaaaaactgttttctggagtgtgcctatcaatacgacgatgacggctaccagagctactgcaccatctgttgcggcggaagagaggtgctgatgtgtggaaataacaactgctgccggtgcttctgcgtggaatgcgtggacctgctggtgggccccggcgccgcccaggccgctattaaggaagatccttggaactgctacatgtgcggccacaagggcacatacggcctgctgagacggagagaggactggcctagcagactgcagatgttcttcgccaataaccacgaccaggagttcgacccccctaaggtgtaccctcccgtccccgccgagaagagaaagcccatccgggtcctgagcctgttcgatggcatcgccaccggtctgctggtgctgaaggacctgggcatccaggtggataggtacattgcctccgaggtgtgcgaggactccatcaccgtgggaatggtgcgtcatcagggcaagatcatgtacgtgggcgacgtgcggagcgtgacacagaagcatatccaggagtggggccctttcgacctggtgatcggcggcagcccttgcaatgacctgagcatcgtgaacccagcccggaagggcctgtacgagggaaccggcagactgttcttcgagttttacagactgctgcacgacgcccggcctaaggaaggcgacgaccggcccttcttttggctgttcgagaatgtggtggccatgggagtcagcgacaagcgggatattagccggttcctggagagcaaccccgtgatgatcgatgccaaggaagtgagcgccgcccaccgggccagatacttctggggcaatctgcctggcatgaacagacccctggccagcaccgtgaacgacaagctggagctgcaggagtgcctggagcacggccggatcgccaagttcagcaaggtgagaaccatcaccacccgaagcaacagcatcaaacaaggcaaggaccagcactttcctgtgttcatgaacgagaaggaggacatcctgtggtgtaccgagatggagagagtgttcgggttcccagtccactacacagatgtcagcaacatgtctagactggccagacagagactgctgggaagaagctggtccgtccctgtgatcagacacctgttcgcccctctgaaggagtacttcgcctgcgtgagcagcggcaacagcaacgccaacagccggggccccagcttctctagcggcctggtgccactgtccctgagagggagccacatgggccccatggagatctacaaaaccgtgagcgcctggaagcggcagcctgtgcgcgtgctgagcctgtttcggaatatcgataaagtcctgaaaagcctgggattcctggagagcggctctggctccggcggtggcaccctgaagtacgtggaggatgtgacaaacgtggtcagacgggatgtggagaagtggggccccttcgatctggtgtacggcagcacccaacccctgggcagctcttgtgaccggtgccctggctggtacatgtttcagttccaccggatcctgcagtacgccctgccgagacaggagtcccagcggccattcttttggattttcatggacaacttgctgctgaccgaggatgaccaggaaactaccactcggttcctgcagaccgaagccgtgaccctgcaggacgtgagaggccgggactaccagaacgccatgcgggtgtggtccaacatccctggactgaaaagcaagcacgcacctctgacccctaaagaagaggagtacctgcaggcccaggtgcggagcagaagcaagctggacgcccctaaggtggatctgctggtgaagaattgcctcctgcccctgagagagtacttcaagtatttcagccagaatagtctgcccctgggaggcagcggcggcggcctgcaggagagcgtgaccttcagggacgtggccgtgctgttcagccaggacgagtggctgcacctggacagcgcccagaggaccctgtacagggaggtgatgctggagaactacaacaacctggccagcctgggcatccccttcagcatgcccaaggtgatctgccagctgcagcagggcgaggacccctgcaccgtggagggcgaggtgcccagcgacagctgcatcgacgccaagggccagggcggcccaagcagcggcgcccctcctcccagcggcggcagcccagccggctccccaacctctaccgaggagggcacctctgagtccgccacccccgagagcggccctggcacctccaccgagcccagcgagggcagcgcacccggcagccctgccggcagccccacctccacagaggagggaaccagcaccgagcccagcgaaggcagcgccccaggcaccagcaccgagcctagtgagcaggagattaaacggatcaacaagatcagaagaagacttgtgaaagacagcaacaccaagaaggccggcaagacaggccccatgaaaaccctgctggttagagtgatgacacccgatctgagagagcggctggaaaacctgagaaagaagcctgaaaatatcccccagcccatcagcaatacatctagagccaacctgaataagctgctgaccgattacaccgaaatgaagaaggcgatcctgcatgtgtactgggaagagttccagaaggaccctgtgggcctgatgagccgggtggcccagcctgccagcaagaagatcgatcagaacaagctgaaacctgagatggacgagaagggcaacctgaccaccgccggctttgcctgctctcagtgtggccagcccctgttcgtgtacaagctggagcaggtgtctgagaagggcaaggcttacaccaactacttcggacggtgcaatgtggccgagcacgaaaagctgatcctgctggcccagctgaagcccgagaaggatagcgacgaagccgtgacatatagcctgggaaagtttgggcagagggccctggatttctacagcattcatgtgaccaaggagtccacccaccccgtgaagcccctggcccagatcgccggaaacagatacgcctccggacctgtgggaaaggccctgagcgacgcatgtatgggcacaatcgcctccttcctgtctaagtaccaggacatcatcatcgaacaccagaaggtggtgaagggcaaccagaagagactggagagcctgcgggagctggccggcaaggaaaacctggaataccctagcgtgaccctgccacctcagcctcacaccaaggagggcgttgatgcctacaacgaagtgatcgcccgggtgcgaatgtgggtgaacctgaacctgtggcagaagctgaagctaagcagagatgatgccaagcctctgctgagactgaagggattcccttcctttcctctggtcgagagacaggccaacgaagtggactggtgggacatggtgtgtaacgtgaagaagctgatcaacgagaaaaaggaggatggcaaggtgttttggcagaatctggctggctacaagagacaggaagccctgagaccatacctgagcagcgaggaagatcggaagaagggaaagaaattcgctcggtaccagctgggcgacctgctgctgcacctggaaaagaagcacggcgaggactggggaaaggtgtacgacgaggcctgggagcggattgacaagaaagtggaaggcctgagcaagcacatcaagctggaagaggaacggagaagcgaggacgcccagagcaaggccgccctgaccgactggctgcgggctaaggccagcttcgtgatcgagggcctgaaggaggccgacaaggacgagttctgcagatgcgagctgaagctgcagaagtggtacggggacctgcggggaaagcccttcgccatcgaagccgagaacagcatcctggacatcagcggcttcagcaagcagtacaactgtgccttcatctggcagaaggacggcgtgaagaagctgaacctgtacctgatcatcaactacttcaagggcggcaagctgcggttcaagaagatcaaacctgaagccttcgaagccaacagattctacaccgtgatcaacaaaaagagcggcgagatcgtgcccatggaggtgaacttcaacttcgacgaccccaacctgatcatcctgcctctggcctttggcaagagacagggcagagaattcatctggaacgacctgctgtccctggaaaccggcagcctgaagctggccaacggaagagtgatcgagaagacactgtacaacagaagaacccggcaggatgagcctgccctgttcgtggccctgaccttcgagcggcgggaggtcctggactcctccaatatcaaaccaatgaacctgatcggcgtggcaagaggcgaaaacatccccgccgtgatcgccctgaccgaccccgagggctgcccactgagccggtttaaggatagcctgggaaacccaacccacatcctgagaatcggcgagagctataaggagaagcagcggaccatccaggccaagaaggaggtggagcagcggagagccggcggctacagccggaagtacgccagcaaagccaagaatctggcagacgatatggtgagaaacaccgctagagatctgctgtactacgccgtgacccaggatgccatgctgatcttcgccaacctgagccggggcttcggccggcagggcaagcggaccttcatggccgagagacagtacacacggatggaggactggctgaccgccaagctggcctacgagggcctgagcaagacctacctgtccaagacactggcccagtacacctccaagacatgcagcaactgtgggtttaccatcaccagcgccgactacgacagggtgctggagaagctgaagaagacagcaacaggctggatgaccacaattaacggcaaggagctgaaggtggagggccagattacctactacaacagatacaagagacagaacgtagtcaaggacctgtccgtcgagctggatagactgagcgaagaatctgtgaacaacgacatctcctcctggacaaagggcagaagcggagaagctctgagcctcctgaagaaaagattctcccatagacccgtgcaggagaagttcgtgtgcctgaactgcggcttcgagacacacgcagccgagcaagccgccctgaacatcgccagatcctggctgttcctgcggagccaggagtacaagaaataccagacaaacaagacaaccggcaacaccgataagagagccttcgtcgagacctggcagtccttttaccggaagaagcttaaggaggtgtggaaacctgccgtgcggtctggcggatctggcggaggctccaccagccccaagaaaaagagaaaagtctaagctgccttctgcggggcttgccttctggccatgcccttcttctctcccttgcacctgtacctcttggtctttgaataaagcctgagtaggaaggctagcaaaaaaaaaaaaaaaaaaaaaaaaaaaaaaaaaaaaaaaaaaaaaaaaaaaaaaaaaaaaaaaaaaaaaaaaaaaaaaaa

SEQ ID NO: 12896 - RNA, 5782 nt, synthetic construct
  source 1..5782: mol_type = other RNA
aggaaataagagagaaaagaagagtaagaagaaatataagagccaccatggcccctaagaagaagcgtaaagtgagccggatggaacgcctcgtctacgaggtgcggcagaagtgcagaaacatcgaggacatctgcatctcctgcggatctctgaacgtgaccctggagcacccactgttcatcggcggcatgtgccagaactgtaaaaactgttttctggagtgtgcctatcaatacgacgatgacggctaccagagctactgcaccatctgttgcggcggaagagaggtgctgatgtgtggaaataacaactgctgccggtgcttctgcgtggaatgcgtggacctgctggtgggccccggcgccgcccaggccgctattaaggaagatccttggaactgctacatgtgcggccacaagggcacatacggcctgctgagacggagagaggactggcctagcagactgcagatgttcttcgccaataaccacgaccaggagttcgacccccctaaggtgtaccctcccgtccccgccgagaagagaaagcccatccgggtcctgagcctgttcgatggcatcgccaccggtctgctggtgctgaaggacctgggcatccaggtggataggtacattgcctccgaggtgtgcgaggactccatcaccgtgggaatggtgcgtcatcagggcaagatcatgtacgtgggcgacgtgcggagcgtgacacagaagcatatccaggagtggggccctttcgacctggtgatcggcggcagcccttgcaatgacctgagcatcgtgaacccagcccggaagggcctgtacgagggaaccggcagactgttcttcgagttttacagactgctgcacgacgcccggcctaaggaaggcgacgaccggcccttcttttggctgttcgagaatgtggtggccatgggagtcagcgacaagcgggatattagccggttcctggagagcaaccccgtgatgatcgatgccaaggaagtgagcgccgcccaccgggccagatacttctggggcaatctgcctggcatgaacagacccctggccagcaccgtgaacgacaagctggagctgcaggagtgcctggagcacggccggatcgccaagttcagcaaggtgagaaccatcaccacccgaagcaacagcatcaaacaaggcaaggaccagcactttcctgtgttcatgaacgagaaggaggacatcctgtggtgtaccgagatggagagagtgttcgggttcccagtccactacacagatgtcagcaacatgtctagactggccagacagagactgctgggaagaagctggtccgtccctgtgatcagacacctgttcgcccctctgaaggagtacttcgcctgcgtgagcagcggcaacagcaacgccaacagccggggccccagcttctctagcggcctggtgccactgtccctgagagggagccacatgggccccatggagatctacaaaaccgtgagcgcctggaagcggcagcctgtgcgcgtgctgagcctgtttcggaatatcgataaagtcctgaaaagcctgggattcctggagagcggctctggctccggcggtggcaccctgaagtacgtggaggatgtgacaaacgtggtcagacgggatgtggagaagtggggccccttcgatctggtgtacggcagcacccaacccctgggcagctcttgtgaccggtgccctggctggtacatgtttcagttccaccggatcctgcagtacgccctgccgagacaggagtcccagcggccattcttttggattttcatggacaacttgctgctgaccgaggatgaccaggaaactaccactcggttcctgcagaccgaagccgtgaccctgcaggacgtgagaggccgggactaccagaacgccatgcgggtgtggtccaacatccctggactgaaaagcaagcacgcacctctgacccctaaagaagaggagtacctgcaggcccaggtgcggagcagaagcaagctggacgcccctaaggtggatctgctggtgaagaattgcctcctgcccctgagagagtacttcaagtatttcagccagaatagtctgcccctgggaggcagcggcggcggcagccaggtgaccttcagcgacgtggccatcgacttcagccacgaggagtgggcctgcctggacagcgcccagagagacctgtacaaggacgtgatggtgcagaactacgagaacctggtgagcgtgggcctgagcgtgaccaagccctacgtgatcatgctgctggaggacggcaaggagccctggatgatggagaagaagctgagcaaggcctaccccttccccctgagccacagcgtgggcggcccaagcagcggcgcccctcctcccagcggcggcagcccagccggctccccaacctctaccgaggagggcacctctgagtccgccacccccgagagcggccctggcacctccaccgagcccagcgagggcagcgcacccggcagccctgccggcagccccacctccacagaggagggaaccagcaccgagcccagcgaaggcagcgccccaggcaccagcaccgagcctagtgagcaggagattaaacggatcaacaagatcagaagaagacttgtgaaagacagcaacaccaagaaggccggcaagacaggccccatgaaaaccctgctggttagagtgatgacacccgatctgagagagcggctggaaaacctgagaaagaagcctgaaaatatcccccagcccatcagcaatacatctagagccaacctgaataagctgctgaccgattacaccgaaatgaagaaggcgatcctgcatgtgtactgggaagagttccagaaggaccctgtgggcctgatgagccgggtggcccagcctgccagcaagaagatcgatcagaacaagctgaaacctgagatggacgagaagggcaacctgaccaccgccggctttgcctgctctcagtgtggccagcccctgttcgtgtacaagctggagcaggtgtctgagaagggcaaggcttacaccaactacttcggacggtgcaatgtggccgagcacgaaaagctgatcctgctggcccagctgaagcccgagaaggatagcgacgaagccgtgacatatagcctgggaaagtttgggcagagggccctggatttctacagcattcatgtgaccaaggagtccacccaccccgtgaagcccctggcccagatcgccggaaacagatacgcctccggacctgtgggaaaggccctgagcgacgcatgtatgggcacaatcgcctccttcctgtctaagtaccaggacatcatcatcgaacaccagaaggtggtgaagggcaaccagaagagactggagagcctgcgggagctggccggcaaggaaaacctggaataccctagcgtgaccctgccacctcagcctcacaccaaggagggcgttgatgcctacaacgaagtgatcgcccgggtgcgaatgtgggtgaacctgaacctgtggcagaagctgaagctaagcagagatgatgccaagcctctgctgagactgaagggattcccttcctttcctctggtcgagagacaggccaacgaagtggactggtgggacatggtgtgtaacgtgaagaagctgatcaacgagaaaaaggaggatggcaaggtgttttggcagaatctggctggctacaagagacaggaagccctgagaccatacctgagcagcgaggaagatcggaagaagggaaagaaattcgctcggtaccagctgggcgacctgctgctgcacctggaaaagaagcacggcgaggactggggaaaggtgtacgacgaggcctgggagcggattgacaagaaagtggaaggcctgagcaagcacatcaagctggaagaggaacggagaagcgaggacgcccagagcaaggccgccctgaccgactggctgcgggctaaggccagcttcgtgatcgagggcctgaaggaggccgacaaggacgagttctgcagatgcgagctgaagctgcagaagtggtacggggacctgcggggaaagcccttcgccatcgaagccgagaacagcatcctggacatcagcggcttcagcaagcagtacaactgtgccttcatctggcagaaggacggcgtgaagaagctgaacctgtacctgatcatcaactacttcaagggcggcaagctgcggttcaagaagatcaaacctgaagccttcgaagccaacagattctacaccgtgatcaacaaaaagagcggcgagatcgtgcccatggaggtgaacttcaacttcgacgaccccaacctgatcatcctgcctctggcctttggcaagagacagggcagagaattcatctggaacgacctgctgtccctggaaaccggcagcctgaagctggccaacggaagagtgatcgagaagacactgtacaacagaagaacccggcaggatgagcctgccctgttcgtggccctgaccttcgagcggcgggaggtcctggactcctccaatatcaaaccaatgaacctgatcggcgtggcaagaggcgaaaacatccccgccgtgatcgccctgaccgaccccgagggctgcccactgagccggtttaaggatagcctgggaaacccaacccacatcctgagaatcggcgagagctataaggagaagcagcggaccatccaggccaagaaggaggtggagcagcggagagccggcggctacagccggaagtacgccagcaaagccaagaatctggcagacgatatggtgagaaacaccgctagagatctgctgtactacgccgtgacccaggatgccatgctgatcttcgccaacctgagccggggcttcggccggcagggcaagcggaccttcatggccgagagacagtacacacggatggaggactggctgaccgccaagctggcctacgagggcctgagcaagacctacctgtccaagacactggcccagtacacctccaagacatgcagcaactgtgggtttaccatcaccagcgccgactacgacagggtgctggagaagctgaagaagacagcaacaggctggatgaccacaattaacggcaaggagctgaaggtggagggccagattacctactacaacagatacaagagacagaacgtagtcaaggacctgtccgtcgagctggatagactgagcgaagaatctgtgaacaacgacatctcctcctggacaaagggcagaagcggagaagctctgagcctcctgaagaaaagattctcccatagacccgtgcaggagaagttcgtgtgcctgaactgcggcttcgagacacacgcagccgagcaagccgccctgaacatcgccagatcctggctgttcctgcggagccaggagtacaagaaataccagacaaacaagacaaccggcaacaccgataagagagccttcgtcgagacctggcagtccttttaccggaagaagcttaaggaggtgtggaaacctgccgtgcggtctggcggatctggcggaggctccaccagccccaagaaaaagagaaaagtctaagctgccttctgcggggcttgccttctggccatgcccttcttctctcccttgcacctgtacctcttggtctttgaataaagcctgagtaggaaggctagcaaaaaaaaaaaaaaaaaaaaaaaaaaaaaaaaaaaaaaaaaaaaaaaaaaaaaaaaaaaaaaaaaaaaaaaaaaaaaaaa

SEQ ID NO: 12897 - RNA, 5785 nt, synthetic construct
  source 1..5785: mol_type = other RNA
aggaaataagagagaaaagaagagtaagaagaaatataagagccaccatggcccctaagaagaagcgtaaagtgagccggatggaacgcctcgtctacgaggtgcggcagaagtgcagaaacatcgaggacatctgcatctcctgcggatctctgaacgtgaccctggagcacccactgttcatcggcggcatgtgccagaactgtaaaaactgttttctggagtgtgcctatcaatacgacgatgacggctaccagagctactgcaccatctgttgcggcggaagagaggtgctgatgtgtggaaataacaactgctgccggtgcttctgcgtggaatgcgtggacctgctggtgggccccggcgccgcccaggccgctattaaggaagatccttggaactgctacatgtgcggccacaagggcacatacggcctgctgagacggagagaggactggcctagcagactgcagatgttcttcgccaataaccacgaccaggagttcgacccccctaaggtgtaccctcccgtccccgccgagaagagaaagcccatccgggtcctgagcctgttcgatggcatcgccaccggtctgctggtgctgaaggacctgggcatccaggtggataggtacattgcctccgaggtgtgcgaggactccatcaccgtgggaatggtgcgtcatcagggcaagatcatgtacgtgggcgacgtgcggagcgtgacacagaagcatatccaggagtggggccctttcgacctggtgatcggcggcagcccttgcaatgacctgagcatcgtgaacccagcccggaagggcctgtacgagggaaccggcagactgttcttcgagttttacagactgctgcacgacgcccggcctaaggaaggcgacgaccggcccttcttttggctgttcgagaatgtggtggccatgggagtcagcgacaagcgggatattagccggttcctggagagcaaccccgtgatgatcgatgccaaggaagtgagcgccgcccaccgggccagatacttctggggcaatctgcctggcatgaacagacccctggccagcaccgtgaacgacaagctggagctgcaggagtgcctggagcacggccggatcgccaagttcagcaaggtgagaaccatcaccacccgaagcaacagcatcaaacaaggcaaggaccagcactttcctgtgttcatgaacgagaaggaggacatcctgtggtgtaccgagatggagagagtgttcgggttcccagtccactacacagatgtcagcaacatgtctagactggccagacagagactgctgggaagaagctggtccgtccctgtgatcagacacctgttcgcccctctgaaggagtacttcgcctgcgtgagcagcggcaacagcaacgccaacagccggggccccagcttctctagcggcctggtgccactgtccctgagagggagccacatgggccccatggagatctacaaaaccgtgagcgcctggaagcggcagcctgtgcgcgtgctgagcctgtttcggaatatcgataaagtcctgaaaagcctgggattcctggagagcggctctggctccggcggtggcaccctgaagtacgtggaggatgtgacaaacgtggtcagacgggatgtggagaagtggggccccttcgatctggtgtacggcagcacccaacccctgggcagctcttgtgaccggtgccctggctggtacatgtttcagttccaccggatcctgcagtacgccctgccgagacaggagtcccagcggccattcttttggattttcatggacaacttgctgctgaccgaggatgaccaggaaactaccactcggttcctgcagaccgaagccgtgaccctgcaggacgtgagaggccgggactaccagaacgccatgcgggtgtggtccaacatccctggactgaaaagcaagcacgcacctctgacccctaaagaagaggagtacctgcaggcccaggtgcggagcagaagcaagctggacgcccctaaggtggatctgctggtgaagaattgcctcctgcccctgagagagtacttcaagtatttcagccagaatagtctgcccctgggaggcagcggcggcggcgacgccgtgaccttccccgacgtggccatcgacttcagcagggacgagtgggagtgcctgaacctggcccagaggaccctgtacaggaaggtgatgctggagaactacaggaccctggtgagcgtgggcctgtgcgtgagcaagcccgacgtgatcagcctgctggagcagggcgaggagccctgggtgaccgacggcgagatggccggcggcctgtgcccccacagcgagtgcgtgtggatgggcggcccaagcagcggcgcccctcctcccagcggcggcagcccagccggctccccaacctctaccgaggagggcacctctgagtccgccacccccgagagcggccctggcacctccaccgagcccagcgagggcagcgcacccggcagccctgccggcagccccacctccacagaggagggaaccagcaccgagcccagcgaaggcagcgccccaggcaccagcaccgagcctagtgagcaggagattaaacggatcaacaagatcagaagaagacttgtgaaagacagcaacaccaagaaggccggcaagacaggccccatgaaaaccctgctggttagagtgatgacacccgatctgagagagcggctggaaaacctgagaaagaagcctgaaaatatcccccagcccatcagcaatacatctagagccaacctgaataagctgctgaccgattacaccgaaatgaagaaggcgatcctgcatgtgtactgggaagagttccagaaggaccctgtgggcctgatgagccgggtggcccagcctgccagcaagaagatcgatcagaacaagctgaaacctgagatggacgagaagggcaacctgaccaccgccggctttgcctgctctcagtgtggccagcccctgttcgtgtacaagctggagcaggtgtctgagaagggcaaggcttacaccaactacttcggacggtgcaatgtggccgagcacgaaaagctgatcctgctggcccagctgaagcccgagaaggatagcgacgaagccgtgacatatagcctgggaaagtttgggcagagggccctggatttctacagcattcatgtgaccaaggagtccacccaccccgtgaagcccctggcccagatcgccggaaacagatacgcctccggacctgtgggaaaggccctgagcgacgcatgtatgggcacaatcgcctccttcctgtctaagtaccaggacatcatcatcgaacaccagaaggtggtgaagggcaaccagaagagactggagagcctgcgggagctggccggcaaggaaaacctggaataccctagcgtgaccctgccacctcagcctcacaccaaggagggcgttgatgcctacaacgaagtgatcgcccgggtgcgaatgtgggtgaacctgaacctgtggcagaagctgaagctaagcagagatgatgccaagcctctgctgagactgaagggattcccttcctttcctctggtcgagagacaggccaacgaagtggactggtgggacatggtgtgtaacgtgaagaagctgatcaacgagaaaaaggaggatggcaaggtgttttggcagaatctggctggctacaagagacaggaagccctgagaccatacctgagcagcgaggaagatcggaagaagggaaagaaattcgctcggtaccagctgggcgacctgctgctgcacctggaaaagaagcacggcgaggactggggaaaggtgtacgacgaggcctgggagcggattgacaagaaagtggaaggcctgagcaagcacatcaagctggaagaggaacggagaagcgaggacgcccagagcaaggccgccctgaccgactggctgcgggctaaggccagcttcgtgatcgagggcctgaaggaggccgacaaggacgagttctgcagatgcgagctgaagctgcagaagtggtacggggacctgcggggaaagcccttcgccatcgaagccgagaacagcatcctggacatcagcggcttcagcaagcagtacaactgtgccttcatctggcagaaggacggcgtgaagaagctgaacctgtacctgatcatcaactacttcaagggcggcaagctgcggttcaagaagatcaaacctgaagccttcgaagccaacagattctacaccgtgatcaacaaaaagagcggcgagatcgtgcccatggaggtgaacttcaacttcgacgaccccaacctgatcatcctgcctctggcctttggcaagagacagggcagagaattcatctggaacgacctgctgtccctggaaaccggcagcctgaagctggccaacggaagagtgatcgagaagacactgtacaacagaagaacccggcaggatgagcctgccctgttcgtggccctgaccttcgagcggcgggaggtcctggactcctccaatatcaaaccaatgaacctgatcggcgtggcaagaggcgaaaacatccccgccgtgatcgccctgaccgaccccgagggctgcccactgagccggtttaaggatagcctgggaaacccaacccacatcctgagaatcggcgagagctataaggagaagcagcggaccatccaggccaagaaggaggtggagcagcggagagccggcggctacagccggaagtacgccagcaaagccaagaatctggcagacgatatggtgagaaacaccgctagagatctgctgtactacgccgtgacccaggatgccatgctgatcttcgccaacctgagccggggcttcggccggcagggcaagcggaccttcatggccgagagacagtacacacggatggaggactggctgaccgccaagctggcctacgagggcctgagcaagacctacctgtccaagacactggcccagtacacctccaagacatgcagcaactgtgggtttaccatcaccagcgccgactacgacagggtgctggagaagctgaagaagacagcaacaggctggatgaccacaattaacggcaaggagctgaaggtggagggccagattacctactacaacagatacaagagacagaacgtagtcaaggacctgtccgtcgagctggatagactgagcgaagaatctgtgaacaacgacatctcctcctggacaaagggcagaagcggagaagctctgagcctcctgaagaaaagattctcccatagacccgtgcaggagaagttcgtgtgcctgaactgcggcttcgagacacacgcagccgagcaagccgccctgaacatcgccagatcctggctgttcctgcggagccaggagtacaagaaataccagacaaacaagacaaccggcaacaccgataagagagccttcgtcgagacctggcagtccttttaccggaagaagcttaaggaggtgtggaaacctgccgtgcggtctggcggatctggcggaggctccaccagccccaagaaaaagagaaaagtctaagctgccttctgcggggcttgccttctggccatgcccttcttctctcccttgcacctgtacctcttggtctttgaataaagcctgagtaggaaggctagcaaaaaaaaaaaaaaaaaaaaaaaaaaaaaaaaaaaaaaaaaaaaaaaaaaaaaaaaaaaaaaaaaaaaaaaaaaaaaaaa

SEQ ID NO: 12898 - RNA, 5785 nt, synthetic construct
  source 1..5785: mol_type = other RNA
aggaaataagagagaaaagaagagtaagaagaaatataagagccaccatggcccctaagaagaagcgtaaagtgagccggatggaacgcctcgtctacgaggtgcggcagaagtgcagaaacatcgaggacatctgcatctcctgcggatctctgaacgtgaccctggagcacccactgttcatcggcggcatgtgccagaactgtaaaaactgttttctggagtgtgcctatcaatacgacgatgacggctaccagagctactgcaccatctgttgcggcggaagagaggtgctgatgtgtggaaataacaactgctgccggtgcttctgcgtggaatgcgtggacctgctggtgggccccggcgccgcccaggccgctattaaggaagatccttggaactgctacatgtgcggccacaagggcacatacggcctgctgagacggagagaggactggcctagcagactgcagatgttcttcgccaataaccacgaccaggagttcgacccccctaaggtgtaccctcccgtccccgccgagaagagaaagcccatccgggtcctgagcctgttcgatggcatcgccaccggtctgctggtgctgaaggacctgggcatccaggtggataggtacattgcctccgaggtgtgcgaggactccatcaccgtgggaatggtgcgtcatcagggcaagatcatgtacgtgggcgacgtgcggagcgtgacacagaagcatatccaggagtggggccctttcgacctggtgatcggcggcagcccttgcaatgacctgagcatcgtgaacccagcccggaagggcctgtacgagggaaccggcagactgttcttcgagttttacagactgctgcacgacgcccggcctaaggaaggcgacgaccggcccttcttttggctgttcgagaatgtggtggccatgggagtcagcgacaagcgggatattagccggttcctggagagcaaccccgtgatgatcgatgccaaggaagtgagcgccgcccaccgggccagatacttctggggcaatctgcctggcatgaacagacccctggccagcaccgtgaacgacaagctggagctgcaggagtgcctggagcacggccggatcgccaagttcagcaaggtgagaaccatcaccacccgaagcaacagcatcaaacaaggcaaggaccagcactttcctgtgttcatgaacgagaaggaggacatcctgtggtgtaccgagatggagagagtgttcgggttcccagtccactacacagatgtcagcaacatgtctagactggccagacagagactgctgggaagaagctggtccgtccctgtgatcagacacctgttcgcccctctgaaggagtacttcgcctgcgtgagcagcggcaacagcaacgccaacagccggggccccagcttctctagcggcctggtgccactgtccctgagagggagccacatgggccccatggagatctacaaaaccgtgagcgcctggaagcggcagcctgtgcgcgtgctgagcctgtttcggaatatcgataaagtcctgaaaagcctgggattcctggagagcggctctggctccggcggtggcaccctgaagtacgtggaggatgtgacaaacgtggtcagacgggatgtggagaagtggggccccttcgatctggtgtacggcagcacccaacccctgggcagctcttgtgaccggtgccctggctggtacatgtttcagttccaccggatcctgcagtacgccctgccgagacaggagtcccagcggccattcttttggattttcatggacaacttgctgctgaccgaggatgaccaggaaactaccactcggttcctgcagaccgaagccgtgaccctgcaggacgtgagaggccgggactaccagaacgccatgcgggtgtggtccaacatccctggactgaaaagcaagcacgcacctctgacccctaaagaagaggagtacctgcaggcccaggtgcggagcagaagcaagctggacgcccctaaggtggatctgctggtgaagaattgcctcctgcccctgagagagtacttcaagtatttcagccagaatagtctgcccctgggaggcagcggcggcggcttccagggcctgatgaccttcgaggacgtgaccgtggagttcacccagtgggagtggggccagctggaccccgcccagaaggacctgtacagggaggtgatgctggagaacttcaggaacctggccagcctgggcctgcccctgagcaagccctacgtgatctgccagctggaggagggccaggagccctgcatgctggagaaggagatcagcgtgggcacccagagcgtgggcgaggccaccggcggcccaagcagcggcgcccctcctcccagcggcggcagcccagccggctccccaacctctaccgaggagggcacctctgagtccgccacccccgagagcggccctggcacctccaccgagcccagcgagggcagcgcacccggcagccctgccggcagccccacctccacagaggagggaaccagcaccgagcccagcgaaggcagcgccccaggcaccagcaccgagcctagtgagcaggagattaaacggatcaacaagatcagaagaagacttgtgaaagacagcaacaccaagaaggccggcaagacaggccccatgaaaaccctgctggttagagtgatgacacccgatctgagagagcggctggaaaacctgagaaagaagcctgaaaatatcccccagcccatcagcaatacatctagagccaacctgaataagctgctgaccgattacaccgaaatgaagaaggcgatcctgcatgtgtactgggaagagttccagaaggaccctgtgggcctgatgagccgggtggcccagcctgccagcaagaagatcgatcagaacaagctgaaacctgagatggacgagaagggcaacctgaccaccgccggctttgcctgctctcagtgtggccagcccctgttcgtgtacaagctggagcaggtgtctgagaagggcaaggcttacaccaactacttcggacggtgcaatgtggccgagcacgaaaagctgatcctgctggcccagctgaagcccgagaaggatagcgacgaagccgtgacatatagcctgggaaagtttgggcagagggccctggatttctacagcattcatgtgaccaaggagtccacccaccccgtgaagcccctggcccagatcgccggaaacagatacgcctccggacctgtgggaaaggccctgagcgacgcatgtatgggcacaatcgcctccttcctgtctaagtaccaggacatcatcatcgaacaccagaaggtggtgaagggcaaccagaagagactggagagcctgcgggagctggccggcaaggaaaacctggaataccctagcgtgaccctgccacctcagcctcacaccaaggagggcgttgatgcctacaacgaagtgatcgcccgggtgcgaatgtgggtgaacctgaacctgtggcagaagctgaagctaagcagagatgatgccaagcctctgctgagactgaagggattcccttcctttcctctggtcgagagacaggccaacgaagtggactggtgggacatggtgtgtaacgtgaagaagctgatcaacgagaaaaaggaggatggcaaggtgttttggcagaatctggctggctacaagagacaggaagccctgagaccatacctgagcagcgaggaagatcggaagaagggaaagaaattcgctcggtaccagctgggcgacctgctgctgcacctggaaaagaagcacggcgaggactggggaaaggtgtacgacgaggcctgggagcggattgacaagaaagtggaaggcctgagcaagcacatcaagctggaagaggaacggagaagcgaggacgcccagagcaaggccgccctgaccgactggctgcgggctaaggccagcttcgtgatcgagggcctgaaggaggccgacaaggacgagttctgcagatgcgagctgaagctgcagaagtggtacggggacctgcggggaaagcccttcgccatcgaagccgagaacagcatcctggacatcagcggcttcagcaagcagtacaactgtgccttcatctggcagaaggacggcgtgaagaagctgaacctgtacctgatcatcaactacttcaagggcggcaagctgcggttcaagaagatcaaacctgaagccttcgaagccaacagattctacaccgtgatcaacaaaaagagcggcgagatcgtgcccatggaggtgaacttcaacttcgacgaccccaacctgatcatcctgcctctggcctttggcaagagacagggcagagaattcatctggaacgacctgctgtccctggaaaccggcagcctgaagctggccaacggaagagtgatcgagaagacactgtacaacagaagaacccggcaggatgagcctgccctgttcgtggccctgaccttcgagcggcgggaggtcctggactcctccaatatcaaaccaatgaacctgatcggcgtggcaagaggcgaaaacatccccgccgtgatcgccctgaccgaccccgagggctgcccactgagccggtttaaggatagcctgggaaacccaacccacatcctgagaatcggcgagagctataaggagaagcagcggaccatccaggccaagaaggaggtggagcagcggagagccggcggctacagccggaagtacgccagcaaagccaagaatctggcagacgatatggtgagaaacaccgctagagatctgctgtactacgccgtgacccaggatgccatgctgatcttcgccaacctgagccggggcttcggccggcagggcaagcggaccttcatggccgagagacagtacacacggatggaggactggctgaccgccaagctggcctacgagggcctgagcaagacctacctgtccaagacactggcccagtacacctccaagacatgcagcaactgtgggtttaccatcaccagcgccgactacgacagggtgctggagaagctgaagaagacagcaacaggctggatgaccacaattaacggcaaggagctgaaggtggagggccagattacctactacaacagatacaagagacagaacgtagtcaaggacctgtccgtcgagctggatagactgagcgaagaatctgtgaacaacgacatctcctcctggacaaagggcagaagcggagaagctctgagcctcctgaagaaaagattctcccatagacccgtgcaggagaagttcgtgtgcctgaactgcggcttcgagacacacgcagccgagcaagccgccctgaacatcgccagatcctggctgttcctgcggagccaggagtacaagaaataccagacaaacaagacaaccggcaacaccgataagagagccttcgtcgagacctggcagtccttttaccggaagaagcttaaggaggtgtggaaacctgccgtgcggtctggcggatctggcggaggctccaccagccccaagaaaaagagaaaagtctaagctgccttctgcggggcttgccttctggccatgcccttcttctctcccttgcacctgtacctcttggtctttgaataaagcctgagtaggaaggctagcaaaaaaaaaaaaaaaaaaaaaaaaaaaaaaaaaaaaaaaaaaaaaaaaaaaaaaaaaaaaaaaaaaaaaaaaaaaaaaaa

SEQ ID NO: 12899 - RNA, 5785 nt, synthetic construct
  source 1..5785: mol_type = other RNA
aggaaataagagagaaaagaagagtaagaagaaatataagagccaccatggcccctaagaagaagcgtaaagtgagccggatggaacgcctcgtctacgaggtgcggcagaagtgcagaaacatcgaggacatctgcatctcctgcggatctctgaacgtgaccctggagcacccactgttcatcggcggcatgtgccagaactgtaaaaactgttttctggagtgtgcctatcaatacgacgatgacggctaccagagctactgcaccatctgttgcggcggaagagaggtgctgatgtgtggaaataacaactgctgccggtgcttctgcgtggaatgcgtggacctgctggtgggccccggcgccgcccaggccgctattaaggaagatccttggaactgctacatgtgcggccacaagggcacatacggcctgctgagacggagagaggactggcctagcagactgcagatgttcttcgccaataaccacgaccaggagttcgacccccctaaggtgtaccctcccgtccccgccgagaagagaaagcccatccgggtcctgagcctgttcgatggcatcgccaccggtctgctggtgctgaaggacctgggcatccaggtggataggtacattgcctccgaggtgtgcgaggactccatcaccgtgggaatggtgcgtcatcagggcaagatcatgtacgtgggcgacgtgcggagcgtgacacagaagcatatccaggagtggggccctttcgacctggtgatcggcggcagcccttgcaatgacctgagcatcgtgaacccagcccggaagggcctgtacgagggaaccggcagactgttcttcgagttttacagactgctgcacgacgcccggcctaaggaaggcgacgaccggcccttcttttggctgttcgagaatgtggtggccatgggagtcagcgacaagcgggatattagccggttcctggagagcaaccccgtgatgatcgatgccaaggaagtgagcgccgcccaccgggccagatacttctggggcaatctgcctggcatgaacagacccctggccagcaccgtgaacgacaagctggagctgcaggagtgcctggagcacggccggatcgccaagttcagcaaggtgagaaccatcaccacccgaagcaacagcatcaaacaaggcaaggaccagcactttcctgtgttcatgaacgagaaggaggacatcctgtggtgtaccgagatggagagagtgttcgggttcccagtccactacacagatgtcagcaacatgtctagactggccagacagagactgctgggaagaagctggtccgtccctgtgatcagacacctgttcgcccctctgaaggagtacttcgcctgcgtgagcagcggcaacagcaacgccaacagccggggccccagcttctctagcggcctggtgccactgtccctgagagggagccacatgggccccatggagatctacaaaaccgtgagcgcctggaagcggcagcctgtgcgcgtgctgagcctgtttcggaatatcgataaagtcctgaaaagcctgggattcctggagagcggctctggctccggcggtggcaccctgaagtacgtggaggatgtgacaaacgtggtcagacgggatgtggagaagtggggccccttcgatctggtgtacggcagcacccaacccctgggcagctcttgtgaccggtgccctggctggtacatgtttcagttccaccggatcctgcagtacgccctgccgagacaggagtcccagcggccattcttttggattttcatggacaacttgctgctgaccgaggatgaccaggaaactaccactcggttcctgcagaccgaagccgtgaccctgcaggacgtgagaggccgggactaccagaacgccatgcgggtgtggtccaacatccctggactgaaaagcaagcacgcacctctgacccctaaagaagaggagtacctgcaggcccaggtgcggagcagaagcaagctggacgcccctaaggtggatctgctggtgaagaattgcctcctgcccctgagagagtacttcaagtatttcagccagaatagtctgcccctgggaggcagcggcggcggcagcgaggagagcgtgaccttcgaggacgtggccatctacttcagcgagaacgagtggaccggcctggcccccgcccagagggtgctgtacagggacgtgatgctggagaactacggcgccgtggccgccctggccgccttccccttccccaagcccgccctgatcagccagctggagaggggcgaggccccctggtgcaaggccccccagggcgccctggacggcgagggccccaggggcatcggcggcccaagcagcggcgcccctcctcccagcggcggcagcccagccggctccccaacctctaccgaggagggcacctctgagtccgccacccccgagagcggccctggcacctccaccgagcccagcgagggcagcgcacccggcagccctgccggcagccccacctccacagaggagggaaccagcaccgagcccagcgaaggcagcgccccaggcaccagcaccgagcctagtgagcaggagattaaacggatcaacaagatcagaagaagacttgtgaaagacagcaacaccaagaaggccggcaagacaggccccatgaaaaccctgctggttagagtgatgacacccgatctgagagagcggctggaaaacctgagaaagaagcctgaaaatatcccccagcccatcagcaatacatctagagccaacctgaataagctgctgaccgattacaccgaaatgaagaaggcgatcctgcatgtgtactgggaagagttccagaaggaccctgtgggcctgatgagccgggtggcccagcctgccagcaagaagatcgatcagaacaagctgaaacctgagatggacgagaagggcaacctgaccaccgccggctttgcctgctctcagtgtggccagcccctgttcgtgtacaagctggagcaggtgtctgagaagggcaaggcttacaccaactacttcggacggtgcaatgtggccgagcacgaaaagctgatcctgctggcccagctgaagcccgagaaggatagcgacgaagccgtgacatatagcctgggaaagtttgggcagagggccctggatttctacagcattcatgtgaccaaggagtccacccaccccgtgaagcccctggcccagatcgccggaaacagatacgcctccggacctgtgggaaaggccctgagcgacgcatgtatgggcacaatcgcctccttcctgtctaagtaccaggacatcatcatcgaacaccagaaggtggtgaagggcaaccagaagagactggagagcctgcgggagctggccggcaaggaaaacctggaataccctagcgtgaccctgccacctcagcctcacaccaaggagggcgttgatgcctacaacgaagtgatcgcccgggtgcgaatgtgggtgaacctgaacctgtggcagaagctgaagctaagcagagatgatgccaagcctctgctgagactgaagggattcccttcctttcctctggtcgagagacaggccaacgaagtggactggtgggacatggtgtgtaacgtgaagaagctgatcaacgagaaaaaggaggatggcaaggtgttttggcagaatctggctggctacaagagacaggaagccctgagaccatacctgagcagcgaggaagatcggaagaagggaaagaaattcgctcggtaccagctgggcgacctgctgctgcacctggaaaagaagcacggcgaggactggggaaaggtgtacgacgaggcctgggagcggattgacaagaaagtggaaggcctgagcaagcacatcaagctggaagaggaacggagaagcgaggacgcccagagcaaggccgccctgaccgactggctgcgggctaaggccagcttcgtgatcgagggcctgaaggaggccgacaaggacgagttctgcagatgcgagctgaagctgcagaagtggtacggggacctgcggggaaagcccttcgccatcgaagccgagaacagcatcctggacatcagcggcttcagcaagcagtacaactgtgccttcatctggcagaaggacggcgtgaagaagctgaacctgtacctgatcatcaactacttcaagggcggcaagctgcggttcaagaagatcaaacctgaagccttcgaagccaacagattctacaccgtgatcaacaaaaagagcggcgagatcgtgcccatggaggtgaacttcaacttcgacgaccccaacctgatcatcctgcctctggcctttggcaagagacagggcagagaattcatctggaacgacctgctgtccctggaaaccggcagcctgaagctggccaacggaagagtgatcgagaagacactgtacaacagaagaacccggcaggatgagcctgccctgttcgtggccctgaccttcgagcggcgggaggtcctggactcctccaatatcaaaccaatgaacctgatcggcgtggcaagaggcgaaaacatccccgccgtgatcgccctgaccgaccccgagggctgcccactgagccggtttaaggatagcctgggaaacccaacccacatcctgagaatcggcgagagctataaggagaagcagcggaccatccaggccaagaaggaggtggagcagcggagagccggcggctacagccggaagtacgccagcaaagccaagaatctggcagacgatatggtgagaaacaccgctagagatctgctgtactacgccgtgacccaggatgccatgctgatcttcgccaacctgagccggggcttcggccggcagggcaagcggaccttcatggccgagagacagtacacacggatggaggactggctgaccgccaagctggcctacgagggcctgagcaagacctacctgtccaagacactggcccagtacacctccaagacatgcagcaactgtgggtttaccatcaccagcgccgactacgacagggtgctggagaagctgaagaagacagcaacaggctggatgaccacaattaacggcaaggagctgaaggtggagggccagattacctactacaacagatacaagagacagaacgtagtcaaggacctgtccgtcgagctggatagactgagcgaagaatctgtgaacaacgacatctcctcctggacaaagggcagaagcggagaagctctgagcctcctgaagaaaagattctcccatagacccgtgcaggagaagttcgtgtgcctgaactgcggcttcgagacacacgcagccgagcaagccgccctgaacatcgccagatcctggctgttcctgcggagccaggagtacaagaaataccagacaaacaagacaaccggcaacaccgataagagagccttcgtcgagacctggcagtccttttaccggaagaagcttaaggaggtgtggaaacctgccgtgcggtctggcggatctggcggaggctccaccagccccaagaaaaagagaaaagtctaagctgccttctgcggggcttgccttctggccatgcccttcttctctcccttgcacctgtacctcttggtctttgaataaagcctgagtaggaaggctagcaaaaaaaaaaaaaaaaaaaaaaaaaaaaaaaaaaaaaaaaaaaaaaaaaaaaaaaaaaaaaaaaaaaaaaaaaaaaaaaa

SEQ ID NO: 12900 - RNA, 5782 nt, synthetic construct
  source 1..5782: mol_type = other RNA
aggaaataagagagaaaagaagagtaagaagaaatataagagccaccatggcccctaagaagaagcgtaaagtgagccggatggaacgcctcgtctacgaggtgcggcagaagtgcagaaacatcgaggacatctgcatctcctgcggatctctgaacgtgaccctggagcacccactgttcatcggcggcatgtgccagaactgtaaaaactgttttctggagtgtgcctatcaatacgacgatgacggctaccagagctactgcaccatctgttgcggcggaagagaggtgctgatgtgtggaaataacaactgctgccggtgcttctgcgtggaatgcgtggacctgctggtgggccccggcgccgcccaggccgctattaaggaagatccttggaactgctacatgtgcggccacaagggcacatacggcctgctgagacggagagaggactggcctagcagactgcagatgttcttcgccaataaccacgaccaggagttcgacccccctaaggtgtaccctcccgtccccgccgagaagagaaagcccatccgggtcctgagcctgttcgatggcatcgccaccggtctgctggtgctgaaggacctgggcatccaggtggataggtacattgcctccgaggtgtgcgaggactccatcaccgtgggaatggtgcgtcatcagggcaagatcatgtacgtgggcgacgtgcggagcgtgacacagaagcatatccaggagtggggccctttcgacctggtgatcggcggcagcccttgcaatgacctgagcatcgtgaacccagcccggaagggcctgtacgagggaaccggcagactgttcttcgagttttacagactgctgcacgacgcccggcctaaggaaggcgacgaccggcccttcttttggctgttcgagaatgtggtggccatgggagtcagcgacaagcgggatattagccggttcctggagagcaaccccgtgatgatcgatgccaaggaagtgagcgccgcccaccgggccagatacttctggggcaatctgcctggcatgaacagacccctggccagcaccgtgaacgacaagctggagctgcaggagtgcctggagcacggccggatcgccaagttcagcaaggtgagaaccatcaccacccgaagcaacagcatcaaacaaggcaaggaccagcactttcctgtgttcatgaacgagaaggaggacatcctgtggtgtaccgagatggagagagtgttcgggttcccagtccactacacagatgtcagcaacatgtctagactggccagacagagactgctgggaagaagctggtccgtccctgtgatcagacacctgttcgcccctctgaaggagtacttcgcctgcgtgagcagcggcaacagcaacgccaacagccggggccccagcttctctagcggcctggtgccactgtccctgagagggagccacatgggccccatggagatctacaaaaccgtgagcgcctggaagcggcagcctgtgcgcgtgctgagcctgtttcggaatatcgataaagtcctgaaaagcctgggattcctggagagcggctctggctccggcggtggcaccctgaagtacgtggaggatgtgacaaacgtggtcagacgggatgtggagaagtggggccccttcgatctggtgtacggcagcacccaacccctgggcagctcttgtgaccggtgccctggctggtacatgtttcagttccaccggatcctgcagtacgccctgccgagacaggagtcccagcggccattcttttggattttcatggacaacttgctgctgaccgaggatgaccaggaaactaccactcggttcctgcagaccgaagccgtgaccctgcaggacgtgagaggccgggactaccagaacgccatgcgggtgtggtccaacatccctggactgaaaagcaagcacgcacctctgacccctaaagaagaggagtacctgcaggcccaggtgcggagcagaagcaagctggacgcccctaaggtggatctgctggtgaagaattgcctcctgcccctgagagagtacttcaagtatttcagccagaatagtctgcccctgggaggcagcggcggcggcgagcccctgaagttcagagacgtggccatcgagttcagcctggaggagtggcagtgcctggacaccatccagcagaacctgtacagaaacgtgatgctggagaactacagaaacctggtgttcctgggcatcgtggtgagcaagcccgacctgatcacctgcctggagcaggagaaggagccctggaccagaaagagacacagaatggtggccgagccccccgtgatctgcagccacttcggcggcccaagcagcggcgcccctcctcccagcggcggcagcccagccggctccccaacctctaccgaggagggcacctctgagtccgccacccccgagagcggccctggcacctccaccgagcccagcgagggcagcgcacccggcagccctgccggcagccccacctccacagaggagggaaccagcaccgagcccagcgaaggcagcgccccaggcaccagcaccgagcctagtgagcaggagattaaacggatcaacaagatcagaagaagacttgtgaaagacagcaacaccaagaaggccggcaagacaggccccatgaaaaccctgctggttagagtgatgacacccgatctgagagagcggctggaaaacctgagaaagaagcctgaaaatatcccccagcccatcagcaatacatctagagccaacctgaataagctgctgaccgattacaccgaaatgaagaaggcgatcctgcatgtgtactgggaagagttccagaaggaccctgtgggcctgatgagccgggtggcccagcctgccagcaagaagatcgatcagaacaagctgaaacctgagatggacgagaagggcaacctgaccaccgccggctttgcctgctctcagtgtggccagcccctgttcgtgtacaagctggagcaggtgtctgagaagggcaaggcttacaccaactacttcggacggtgcaatgtggccgagcacgaaaagctgatcctgctggcccagctgaagcccgagaaggatagcgacgaagccgtgacatatagcctgggaaagtttgggcagagggccctggatttctacagcattcatgtgaccaaggagtccacccaccccgtgaagcccctggcccagatcgccggaaacagatacgcctccggacctgtgggaaaggccctgagcgacgcatgtatgggcacaatcgcctccttcctgtctaagtaccaggacatcatcatcgaacaccagaaggtggtgaagggcaaccagaagagactggagagcctgcgggagctggccggcaaggaaaacctggaataccctagcgtgaccctgccacctcagcctcacaccaaggagggcgttgatgcctacaacgaagtgatcgcccgggtgcgaatgtgggtgaacctgaacctgtggcagaagctgaagctaagcagagatgatgccaagcctctgctgagactgaagggattcccttcctttcctctggtcgagagacaggccaacgaagtggactggtgggacatggtgtgtaacgtgaagaagctgatcaacgagaaaaaggaggatggcaaggtgttttggcagaatctggctggctacaagagacaggaagccctgagaccatacctgagcagcgaggaagatcggaagaagggaaagaaattcgctcggtaccagctgggcgacctgctgctgcacctggaaaagaagcacggcgaggactggggaaaggtgtacgacgaggcctgggagcggattgacaagaaagtggaaggcctgagcaagcacatcaagctggaagaggaacggagaagcgaggacgcccagagcaaggccgccctgaccgactggctgcgggctaaggccagcttcgtgatcgagggcctgaaggaggccgacaaggacgagttctgcagatgcgagctgaagctgcagaagtggtacggggacctgcggggaaagcccttcgccatcgaagccgagaacagcatcctggacatcagcggcttcagcaagcagtacaactgtgccttcatctggcagaaggacggcgtgaagaagctgaacctgtacctgatcatcaactacttcaagggcggcaagctgcggttcaagaagatcaaacctgaagccttcgaagccaacagattctacaccgtgatcaacaaaaagagcggcgagatcgtgcccatggaggtgaacttcaacttcgacgaccccaacctgatcatcctgcctctggcctttggcaagagacagggcagagaattcatctggaacgacctgctgtccctggaaaccggcagcctgaagctggccaacggaagagtgatcgagaagacactgtacaacagaagaacccggcaggatgagcctgccctgttcgtggccctgaccttcgagcggcgggaggtcctggactcctccaatatcaaaccaatgaacctgatcggcgtggcaagaggcgaaaacatccccgccgtgatcgccctgaccgaccccgagggctgcccactgagccggtttaaggatagcctgggaaacccaacccacatcctgagaatcggcgagagctataaggagaagcagcggaccatccaggccaagaaggaggtggagcagcggagagccggcggctacagccggaagtacgccagcaaagccaagaatctggcagacgatatggtgagaaacaccgctagagatctgctgtactacgccgtgacccaggatgccatgctgatcttcgccaacctgagccggggcttcggccggcagggcaagcggaccttcatggccgagagacagtacacacggatggaggactggctgaccgccaagctggcctacgagggcctgagcaagacctacctgtccaagacactggcccagtacacctccaagacatgcagcaactgtgggtttaccatcaccagcgccgactacgacagggtgctggagaagctgaagaagacagcaacaggctggatgaccacaattaacggcaaggagctgaaggtggagggccagattacctactacaacagatacaagagacagaacgtagtcaaggacctgtccgtcgagctggatagactgagcgaagaatctgtgaacaacgacatctcctcctggacaaagggcagaagcggagaagctctgagcctcctgaagaaaagattctcccatagacccgtgcaggagaagttcgtgtgcctgaactgcggcttcgagacacacgcagccgagcaagccgccctgaacatcgccagatcctggctgttcctgcggagccaggagtacaagaaataccagacaaacaagacaaccggcaacaccgataagagagccttcgtcgagacctggcagtccttttaccggaagaagcttaaggaggtgtggaaacctgccgtgcggtctggcggatctggcggaggctccaccagccccaagaaaaagagaaaagtctaagctgccttctgcggggcttgccttctggccatgcccttcttctctcccttgcacctgtacctcttggtctttgaataaagcctgagtaggaaggctagcaaaaaaaaaaaaaaaaaaaaaaaaaaaaaaaaaaaaaaaaaaaaaaaaaaaaaaaaaaaaaaaaaaaaaaaaaaaaaaaa

SEQ ID NO: 12901 - RNA, 5785 nt, synthetic construct
  source 1..5785: mol_type = other RNA
aggaaataagagagaaaagaagagtaagaagaaatataagagccaccatggcccctaagaagaagcgtaaagtgagccggatggaacgcctcgtctacgaggtgcggcagaagtgcagaaacatcgaggacatctgcatctcctgcggatctctgaacgtgaccctggagcacccactgttcatcggcggcatgtgccagaactgtaaaaactgttttctggagtgtgcctatcaatacgacgatgacggctaccagagctactgcaccatctgttgcggcggaagagaggtgctgatgtgtggaaataacaactgctgccggtgcttctgcgtggaatgcgtggacctgctggtgggccccggcgccgcccaggccgctattaaggaagatccttggaactgctacatgtgcggccacaagggcacatacggcctgctgagacggagagaggactggcctagcagactgcagatgttcttcgccaataaccacgaccaggagttcgacccccctaaggtgtaccctcccgtccccgccgagaagagaaagcccatccgggtcctgagcctgttcgatggcatcgccaccggtctgctggtgctgaaggacctgggcatccaggtggataggtacattgcctccgaggtgtgcgaggactccatcaccgtgggaatggtgcgtcatcagggcaagatcatgtacgtgggcgacgtgcggagcgtgacacagaagcatatccaggagtggggccctttcgacctggtgatcggcggcagcccttgcaatgacctgagcatcgtgaacccagcccggaagggcctgtacgagggaaccggcagactgttcttcgagttttacagactgctgcacgacgcccggcctaaggaaggcgacgaccggcccttcttttggctgttcgagaatgtggtggccatgggagtcagcgacaagcgggatattagccggttcctggagagcaaccccgtgatgatcgatgccaaggaagtgagcgccgcccaccgggccagatacttctggggcaatctgcctggcatgaacagacccctggccagcaccgtgaacgacaagctggagctgcaggagtgcctggagcacggccggatcgccaagttcagcaaggtgagaaccatcaccacccgaagcaacagcatcaaacaaggcaaggaccagcactttcctgtgttcatgaacgagaaggaggacatcctgtggtgtaccgagatggagagagtgttcgggttcccagtccactacacagatgtcagcaacatgtctagactggccagacagagactgctgggaagaagctggtccgtccctgtgatcagacacctgttcgcccctctgaaggagtacttcgcctgcgtgagcagcggcaacagcaacgccaacagccggggccccagcttctctagcggcctggtgccactgtccctgagagggagccacatgggccccatggagatctacaaaaccgtgagcgcctggaagcggcagcctgtgcgcgtgctgagcctgtttcggaatatcgataaagtcctgaaaagcctgggattcctggagagcggctctggctccggcggtggcaccctgaagtacgtggaggatgtgacaaacgtggtcagacgggatgtggagaagtggggccccttcgatctggtgtacggcagcacccaacccctgggcagctcttgtgaccggtgccctggctggtacatgtttcagttccaccggatcctgcagtacgccctgccgagacaggagtcccagcggccattcttttggattttcatggacaacttgctgctgaccgaggatgaccaggaaactaccactcggttcctgcagaccgaagccgtgaccctgcaggacgtgagaggccgggactaccagaacgccatgcgggtgtggtccaacatccctggactgaaaagcaagcacgcacctctgacccctaaagaagaggagtacctgcaggcccaggtgcggagcagaagcaagctggacgcccctaaggtggatctgctggtgaagaattgcctcctgcccctgagagagtacttcaagtatttcagccagaatagtctgcccctgggaggcagcggcggcggcctgctgaccttcgaggacgtggccgtgagcttcagcgaggaggagtggaagctgctggaccccgcccagaagatcctgtacaacgacgtgatgcaggagaactacgagaccgtgatcagcctgggcctgaagctgaagaacgacaccggcaacgaccagcccatcagcgtgagcgccctggagatccaggccagcggcaggaaggtgctgaggaaggccaggatgaaggtggcccagaagaccggcggcccaagcagcggcgcccctcctcccagcggcggcagcccagccggctccccaacctctaccgaggagggcacctctgagtccgccacccccgagagcggccctggcacctccaccgagcccagcgagggcagcgcacccggcagccctgccggcagccccacctccacagaggagggaaccagcaccgagcccagcgaaggcagcgccccaggcaccagcaccgagcctagtgagcaggagattaaacggatcaacaagatcagaagaagacttgtgaaagacagcaacaccaagaaggccggcaagacaggccccatgaaaaccctgctggttagagtgatgacacccgatctgagagagcggctggaaaacctgagaaagaagcctgaaaatatcccccagcccatcagcaatacatctagagccaacctgaataagctgctgaccgattacaccgaaatgaagaaggcgatcctgcatgtgtactgggaagagttccagaaggaccctgtgggcctgatgagccgggtggcccagcctgccagcaagaagatcgatcagaacaagctgaaacctgagatggacgagaagggcaacctgaccaccgccggctttgcctgctctcagtgtggccagcccctgttcgtgtacaagctggagcaggtgtctgagaagggcaaggcttacaccaactacttcggacggtgcaatgtggccgagcacgaaaagctgatcctgctggcccagctgaagcccgagaaggatagcgacgaagccgtgacatatagcctgggaaagtttgggcagagggccctggatttctacagcattcatgtgaccaaggagtccacccaccccgtgaagcccctggcccagatcgccggaaacagatacgcctccggacctgtgggaaaggccctgagcgacgcatgtatgggcacaatcgcctccttcctgtctaagtaccaggacatcatcatcgaacaccagaaggtggtgaagggcaaccagaagagactggagagcctgcgggagctggccggcaaggaaaacctggaataccctagcgtgaccctgccacctcagcctcacaccaaggagggcgttgatgcctacaacgaagtgatcgcccgggtgcgaatgtgggtgaacctgaacctgtggcagaagctgaagctaagcagagatgatgccaagcctctgctgagactgaagggattcccttcctttcctctggtcgagagacaggccaacgaagtggactggtgggacatggtgtgtaacgtgaagaagctgatcaacgagaaaaaggaggatggcaaggtgttttggcagaatctggctggctacaagagacaggaagccctgagaccatacctgagcagcgaggaagatcggaagaagggaaagaaattcgctcggtaccagctgggcgacctgctgctgcacctggaaaagaagcacggcgaggactggggaaaggtgtacgacgaggcctgggagcggattgacaagaaagtggaaggcctgagcaagcacatcaagctggaagaggaacggagaagcgaggacgcccagagcaaggccgccctgaccgactggctgcgggctaaggccagcttcgtgatcgagggcctgaaggaggccgacaaggacgagttctgcagatgcgagctgaagctgcagaagtggtacggggacctgcggggaaagcccttcgccatcgaagccgagaacagcatcctggacatcagcggcttcagcaagcagtacaactgtgccttcatctggcagaaggacggcgtgaagaagctgaacctgtacctgatcatcaactacttcaagggcggcaagctgcggttcaagaagatcaaacctgaagccttcgaagccaacagattctacaccgtgatcaacaaaaagagcggcgagatcgtgcccatggaggtgaacttcaacttcgacgaccccaacctgatcatcctgcctctggcctttggcaagagacagggcagagaattcatctggaacgacctgctgtccctggaaaccggcagcctgaagctggccaacggaagagtgatcgagaagacactgtacaacagaagaacccggcaggatgagcctgccctgttcgtggccctgaccttcgagcggcgggaggtcctggactcctccaatatcaaaccaatgaacctgatcggcgtggcaagaggcgaaaacatccccgccgtgatcgccctgaccgaccccgagggctgcccactgagccggtttaaggatagcctgggaaacccaacccacatcctgagaatcggcgagagctataaggagaagcagcggaccatccaggccaagaaggaggtggagcagcggagagccggcggctacagccggaagtacgccagcaaagccaagaatctggcagacgatatggtgagaaacaccgctagagatctgctgtactacgccgtgacccaggatgccatgctgatcttcgccaacctgagccggggcttcggccggcagggcaagcggaccttcatggccgagagacagtacacacggatggaggactggctgaccgccaagctggcctacgagggcctgagcaagacctacctgtccaagacactggcccagtacacctccaagacatgcagcaactgtgggtttaccatcaccagcgccgactacgacagggtgctggagaagctgaagaagacagcaacaggctggatgaccacaattaacggcaaggagctgaaggtggagggccagattacctactacaacagatacaagagacagaacgtagtcaaggacctgtccgtcgagctggatagactgagcgaagaatctgtgaacaacgacatctcctcctggacaaagggcagaagcggagaagctctgagcctcctgaagaaaagattctcccatagacccgtgcaggagaagttcgtgtgcctgaactgcggcttcgagacacacgcagccgagcaagccgccctgaacatcgccagatcctggctgttcctgcggagccaggagtacaagaaataccagacaaacaagacaaccggcaacaccgataagagagccttcgtcgagacctggcagtccttttaccggaagaagcttaaggaggtgtggaaacctgccgtgcggtctggcggatctggcggaggctccaccagccccaagaaaaagagaaaagtctaagctgccttctgcggggcttgccttctggccatgcccttcttctctcccttgcacctgtacctcttggtctttgaataaagcctgagtaggaaggctagcaaaaaaaaaaaaaaaaaaaaaaaaaaaaaaaaaaaaaaaaaaaaaaaaaaaaaaaaaaaaaaaaaaaaaaaaaaaaaaaa

SEQ ID NO: 12902 - RNA, 5785 nt, synthetic construct
  source 1..5785: mol_type = other RNA
aggaaataagagagaaaagaagagtaagaagaaatataagagccaccatggcccctaagaagaagcgtaaagtgagccggatggaacgcctcgtctacgaggtgcggcagaagtgcagaaacatcgaggacatctgcatctcctgcggatctctgaacgtgaccctggagcacccactgttcatcggcggcatgtgccagaactgtaaaaactgttttctggagtgtgcctatcaatacgacgatgacggctaccagagctactgcaccatctgttgcggcggaagagaggtgctgatgtgtggaaataacaactgctgccggtgcttctgcgtggaatgcgtggacctgctggtgggccccggcgccgcccaggccgctattaaggaagatccttggaactgctacatgtgcggccacaagggcacatacggcctgctgagacggagagaggactggcctagcagactgcagatgttcttcgccaataaccacgaccaggagttcgacccccctaaggtgtaccctcccgtccccgccgagaagagaaagcccatccgggtcctgagcctgttcgatggcatcgccaccggtctgctggtgctgaaggacctgggcatccaggtggataggtacattgcctccgaggtgtgcgaggactccatcaccgtgggaatggtgcgtcatcagggcaagatcatgtacgtgggcgacgtgcggagcgtgacacagaagcatatccaggagtggggccctttcgacctggtgatcggcggcagcccttgcaatgacctgagcatcgtgaacccagcccggaagggcctgtacgagggaaccggcagactgttcttcgagttttacagactgctgcacgacgcccggcctaaggaaggcgacgaccggcccttcttttggctgttcgagaatgtggtggccatgggagtcagcgacaagcgggatattagccggttcctggagagcaaccccgtgatgatcgatgccaaggaagtgagcgccgcccaccgggccagatacttctggggcaatctgcctggcatgaacagacccctggccagcaccgtgaacgacaagctggagctgcaggagtgcctggagcacggccggatcgccaagttcagcaaggtgagaaccatcaccacccgaagcaacagcatcaaacaaggcaaggaccagcactttcctgtgttcatgaacgagaaggaggacatcctgtggtgtaccgagatggagagagtgttcgggttcccagtccactacacagatgtcagcaacatgtctagactggccagacagagactgctgggaagaagctggtccgtccctgtgatcagacacctgttcgcccctctgaaggagtacttcgcctgcgtgagcagcggcaacagcaacgccaacagccggggccccagcttctctagcggcctggtgccactgtccctgagagggagccacatgggccccatggagatctacaaaaccgtgagcgcctggaagcggcagcctgtgcgcgtgctgagcctgtttcggaatatcgataaagtcctgaaaagcctgggattcctggagagcggctctggctccggcggtggcaccctgaagtacgtggaggatgtgacaaacgtggtcagacgggatgtggagaagtggggccccttcgatctggtgtacggcagcacccaacccctgggcagctcttgtgaccggtgccctggctggtacatgtttcagttccaccggatcctgcagtacgccctgccgagacaggagtcccagcggccattcttttggattttcatggacaacttgctgctgaccgaggatgaccaggaaactaccactcggttcctgcagaccgaagccgtgaccctgcaggacgtgagaggccgggactaccagaacgccatgcgggtgtggtccaacatccctggactgaaaagcaagcacgcacctctgacccctaaagaagaggagtacctgcaggcccaggtgcggagcagaagcaagctggacgcccctaaggtggatctgctggtgaagaattgcctcctgcccctgagagagtacttcaagtatttcagccagaatagtctgcccctgggaggcagcggcggcggcccccagggctgcgccatcagcgaggacgtgttcgtgtacttcagcagggaggagtgggtgctgctggacgaggaccagaggctgctgtacagggacgtgatgctggagaacttcgccctgctggccagcctgggcatcgccagcagcaggagccacctggtgacccagctggagcagggcgaggagccctggatgcccgcccaggtggacatgacccccgccaccgagaaggaggcccagaagggcggcccaagcagcggcgcccctcctcccagcggcggcagcccagccggctccccaacctctaccgaggagggcacctctgagtccgccacccccgagagcggccctggcacctccaccgagcccagcgagggcagcgcacccggcagccctgccggcagccccacctccacagaggagggaaccagcaccgagcccagcgaaggcagcgccccaggcaccagcaccgagcctagtgagcaggagattaaacggatcaacaagatcagaagaagacttgtgaaagacagcaacaccaagaaggccggcaagacaggccccatgaaaaccctgctggttagagtgatgacacccgatctgagagagcggctggaaaacctgagaaagaagcctgaaaatatcccccagcccatcagcaatacatctagagccaacctgaataagctgctgaccgattacaccgaaatgaagaaggcgatcctgcatgtgtactgggaagagttccagaaggaccctgtgggcctgatgagccgggtggcccagcctgccagcaagaagatcgatcagaacaagctgaaacctgagatggacgagaagggcaacctgaccaccgccggctttgcctgctctcagtgtggccagcccctgttcgtgtacaagctggagcaggtgtctgagaagggcaaggcttacaccaactacttcggacggtgcaatgtggccgagcacgaaaagctgatcctgctggcccagctgaagcccgagaaggatagcgacgaagccgtgacatatagcctgggaaagtttgggcagagggccctggatttctacagcattcatgtgaccaaggagtccacccaccccgtgaagcccctggcccagatcgccggaaacagatacgcctccggacctgtgggaaaggccctgagcgacgcatgtatgggcacaatcgcctccttcctgtctaagtaccaggacatcatcatcgaacaccagaaggtggtgaagggcaaccagaagagactggagagcctgcgggagctggccggcaaggaaaacctggaataccctagcgtgaccctgccacctcagcctcacaccaaggagggcgttgatgcctacaacgaagtgatcgcccgggtgcgaatgtgggtgaacctgaacctgtggcagaagctgaagctaagcagagatgatgccaagcctctgctgagactgaagggattcccttcctttcctctggtcgagagacaggccaacgaagtggactggtgggacatggtgtgtaacgtgaagaagctgatcaacgagaaaaaggaggatggcaaggtgttttggcagaatctggctggctacaagagacaggaagccctgagaccatacctgagcagcgaggaagatcggaagaagggaaagaaattcgctcggtaccagctgggcgacctgctgctgcacctggaaaagaagcacggcgaggactggggaaaggtgtacgacgaggcctgggagcggattgacaagaaagtggaaggcctgagcaagcacatcaagctggaagaggaacggagaagcgaggacgcccagagcaaggccgccctgaccgactggctgcgggctaaggccagcttcgtgatcgagggcctgaaggaggccgacaaggacgagttctgcagatgcgagctgaagctgcagaagtggtacggggacctgcggggaaagcccttcgccatcgaagccgagaacagcatcctggacatcagcggcttcagcaagcagtacaactgtgccttcatctggcagaaggacggcgtgaagaagctgaacctgtacctgatcatcaactacttcaagggcggcaagctgcggttcaagaagatcaaacctgaagccttcgaagccaacagattctacaccgtgatcaacaaaaagagcggcgagatcgtgcccatggaggtgaacttcaacttcgacgaccccaacctgatcatcctgcctctggcctttggcaagagacagggcagagaattcatctggaacgacctgctgtccctggaaaccggcagcctgaagctggccaacggaagagtgatcgagaagacactgtacaacagaagaacccggcaggatgagcctgccctgttcgtggccctgaccttcgagcggcgggaggtcctggactcctccaatatcaaaccaatgaacctgatcggcgtggcaagaggcgaaaacatccccgccgtgatcgccctgaccgaccccgagggctgcccactgagccggtttaaggatagcctgggaaacccaacccacatcctgagaatcggcgagagctataaggagaagcagcggaccatccaggccaagaaggaggtggagcagcggagagccggcggctacagccggaagtacgccagcaaagccaagaatctggcagacgatatggtgagaaacaccgctagagatctgctgtactacgccgtgacccaggatgccatgctgatcttcgccaacctgagccggggcttcggccggcagggcaagcggaccttcatggccgagagacagtacacacggatggaggactggctgaccgccaagctggcctacgagggcctgagcaagacctacctgtccaagacactggcccagtacacctccaagacatgcagcaactgtgggtttaccatcaccagcgccgactacgacagggtgctggagaagctgaagaagacagcaacaggctggatgaccacaattaacggcaaggagctgaaggtggagggccagattacctactacaacagatacaagagacagaacgtagtcaaggacctgtccgtcgagctggatagactgagcgaagaatctgtgaacaacgacatctcctcctggacaaagggcagaagcggagaagctctgagcctcctgaagaaaagattctcccatagacccgtgcaggagaagttcgtgtgcctgaactgcggcttcgagacacacgcagccgagcaagccgccctgaacatcgccagatcctggctgttcctgcggagccaggagtacaagaaataccagacaaacaagacaaccggcaacaccgataagagagccttcgtcgagacctggcagtccttttaccggaagaagcttaaggaggtgtggaaacctgccgtgcggtctggcggatctggcggaggctccaccagccccaagaaaaagagaaaagtctaagctgccttctgcggggcttgccttctggccatgcccttcttctctcccttgcacctgtacctcttggtctttgaataaagcctgagtaggaaggctagcaaaaaaaaaaaaaaaaaaaaaaaaaaaaaaaaaaaaaaaaaaaaaaaaaaaaaaaaaaaaaaaaaaaaaaaaaaaaaaaa

SEQ ID NO: 12903 - RNA, 5785 nt, synthetic construct
  source 1..5785: mol_type = other RNA
aggaaataagagagaaaagaagagtaagaagaaatataagagccaccatggcccctaagaagaagcgtaaagtgagccggatggaacgcctcgtctacgaggtgcggcagaagtgcagaaacatcgaggacatctgcatctcctgcggatctctgaacgtgaccctggagcacccactgttcatcggcggcatgtgccagaactgtaaaaactgttttctggagtgtgcctatcaatacgacgatgacggctaccagagctactgcaccatctgttgcggcggaagagaggtgctgatgtgtggaaataacaactgctgccggtgcttctgcgtggaatgcgtggacctgctggtgggccccggcgccgcccaggccgctattaaggaagatccttggaactgctacatgtgcggccacaagggcacatacggcctgctgagacggagagaggactggcctagcagactgcagatgttcttcgccaataaccacgaccaggagttcgacccccctaaggtgtaccctcccgtccccgccgagaagagaaagcccatccgggtcctgagcctgttcgatggcatcgccaccggtctgctggtgctgaaggacctgggcatccaggtggataggtacattgcctccgaggtgtgcgaggactccatcaccgtgggaatggtgcgtcatcagggcaagatcatgtacgtgggcgacgtgcggagcgtgacacagaagcatatccaggagtggggccctttcgacctggtgatcggcggcagcccttgcaatgacctgagcatcgtgaacccagcccggaagggcctgtacgagggaaccggcagactgttcttcgagttttacagactgctgcacgacgcccggcctaaggaaggcgacgaccggcccttcttttggctgttcgagaatgtggtggccatgggagtcagcgacaagcgggatattagccggttcctggagagcaaccccgtgatgatcgatgccaaggaagtgagcgccgcccaccgggccagatacttctggggcaatctgcctggcatgaacagacccctggccagcaccgtgaacgacaagctggagctgcaggagtgcctggagcacggccggatcgccaagttcagcaaggtgagaaccatcaccacccgaagcaacagcatcaaacaaggcaaggaccagcactttcctgtgttcatgaacgagaaggaggacatcctgtggtgtaccgagatggagagagtgttcgggttcccagtccactacacagatgtcagcaacatgtctagactggccagacagagactgctgggaagaagctggtccgtccctgtgatcagacacctgttcgcccctctgaaggagtacttcgcctgcgtgagcagcggcaacagcaacgccaacagccggggccccagcttctctagcggcctggtgccactgtccctgagagggagccacatgggccccatggagatctacaaaaccgtgagcgcctggaagcggcagcctgtgcgcgtgctgagcctgtttcggaatatcgataaagtcctgaaaagcctgggattcctggagagcggctctggctccggcggtggcaccctgaagtacgtggaggatgtgacaaacgtggtcagacgggatgtggagaagtggggccccttcgatctggtgtacggcagcacccaacccctgggcagctcttgtgaccggtgccctggctggtacatgtttcagttccaccggatcctgcagtacgccctgccgagacaggagtcccagcggccattcttttggattttcatggacaacttgctgctgaccgaggatgaccaggaaactaccactcggttcctgcagaccgaagccgtgaccctgcaggacgtgagaggccgggactaccagaacgccatgcgggtgtggtccaacatccctggactgaaaagcaagcacgcacctctgacccctaaagaagaggagtacctgcaggcccaggtgcggagcagaagcaagctggacgcccctaaggtggatctgctggtgaagaattgcctcctgcccctgagagagtacttcaagtatttcagccagaatagtctgcccctgggaggcagcggcggcggcgtgcagggcagcgtgaccttcagggacgtggccgtgctgttcagccaggacgagtggctgcacctggacaccgcccagaggaccctgtacagggaggtgatgctggagaactacagcaacctggtgagcctgggcatcctgttcagcaagcccaaggtgatcagccagctggagcagggccaggacccctggaaggtggagcacggcgccccccagggcacctgccccggctgggagagcctgggcggcccaagcagcggcgcccctcctcccagcggcggcagcccagccggctccccaacctctaccgaggagggcacctctgagtccgccacccccgagagcggccctggcacctccaccgagcccagcgagggcagcgcacccggcagccctgccggcagccccacctccacagaggagggaaccagcaccgagcccagcgaaggcagcgccccaggcaccagcaccgagcctagtgagcaggagattaaacggatcaacaagatcagaagaagacttgtgaaagacagcaacaccaagaaggccggcaagacaggccccatgaaaaccctgctggttagagtgatgacacccgatctgagagagcggctggaaaacctgagaaagaagcctgaaaatatcccccagcccatcagcaatacatctagagccaacctgaataagctgctgaccgattacaccgaaatgaagaaggcgatcctgcatgtgtactgggaagagttccagaaggaccctgtgggcctgatgagccgggtggcccagcctgccagcaagaagatcgatcagaacaagctgaaacctgagatggacgagaagggcaacctgaccaccgccggctttgcctgctctcagtgtggccagcccctgttcgtgtacaagctggagcaggtgtctgagaagggcaaggcttacaccaactacttcggacggtgcaatgtggccgagcacgaaaagctgatcctgctggcccagctgaagcccgagaaggatagcgacgaagccgtgacatatagcctgggaaagtttgggcagagggccctggatttctacagcattcatgtgaccaaggagtccacccaccccgtgaagcccctggcccagatcgccggaaacagatacgcctccggacctgtgggaaaggccctgagcgacgcatgtatgggcacaatcgcctccttcctgtctaagtaccaggacatcatcatcgaacaccagaaggtggtgaagggcaaccagaagagactggagagcctgcgggagctggccggcaaggaaaacctggaataccctagcgtgaccctgccacctcagcctcacaccaaggagggcgttgatgcctacaacgaagtgatcgcccgggtgcgaatgtgggtgaacctgaacctgtggcagaagctgaagctaagcagagatgatgccaagcctctgctgagactgaagggattcccttcctttcctctggtcgagagacaggccaacgaagtggactggtgggacatggtgtgtaacgtgaagaagctgatcaacgagaaaaaggaggatggcaaggtgttttggcagaatctggctggctacaagagacaggaagccctgagaccatacctgagcagcgaggaagatcggaagaagggaaagaaattcgctcggtaccagctgggcgacctgctgctgcacctggaaaagaagcacggcgaggactggggaaaggtgtacgacgaggcctgggagcggattgacaagaaagtggaaggcctgagcaagcacatcaagctggaagaggaacggagaagcgaggacgcccagagcaaggccgccctgaccgactggctgcgggctaaggccagcttcgtgatcgagggcctgaaggaggccgacaaggacgagttctgcagatgcgagctgaagctgcagaagtggtacggggacctgcggggaaagcccttcgccatcgaagccgagaacagcatcctggacatcagcggcttcagcaagcagtacaactgtgccttcatctggcagaaggacggcgtgaagaagctgaacctgtacctgatcatcaactacttcaagggcggcaagctgcggttcaagaagatcaaacctgaagccttcgaagccaacagattctacaccgtgatcaacaaaaagagcggcgagatcgtgcccatggaggtgaacttcaacttcgacgaccccaacctgatcatcctgcctctggcctttggcaagagacagggcagagaattcatctggaacgacctgctgtccctggaaaccggcagcctgaagctggccaacggaagagtgatcgagaagacactgtacaacagaagaacccggcaggatgagcctgccctgttcgtggccctgaccttcgagcggcgggaggtcctggactcctccaatatcaaaccaatgaacctgatcggcgtggcaagaggcgaaaacatccccgccgtgatcgccctgaccgaccccgagggctgcccactgagccggtttaaggatagcctgggaaacccaacccacatcctgagaatcggcgagagctataaggagaagcagcggaccatccaggccaagaaggaggtggagcagcggagagccggcggctacagccggaagtacgccagcaaagccaagaatctggcagacgatatggtgagaaacaccgctagagatctgctgtactacgccgtgacccaggatgccatgctgatcttcgccaacctgagccggggcttcggccggcagggcaagcggaccttcatggccgagagacagtacacacggatggaggactggctgaccgccaagctggcctacgagggcctgagcaagacctacctgtccaagacactggcccagtacacctccaagacatgcagcaactgtgggtttaccatcaccagcgccgactacgacagggtgctggagaagctgaagaagacagcaacaggctggatgaccacaattaacggcaaggagctgaaggtggagggccagattacctactacaacagatacaagagacagaacgtagtcaaggacctgtccgtcgagctggatagactgagcgaagaatctgtgaacaacgacatctcctcctggacaaagggcagaagcggagaagctctgagcctcctgaagaaaagattctcccatagacccgtgcaggagaagttcgtgtgcctgaactgcggcttcgagacacacgcagccgagcaagccgccctgaacatcgccagatcctggctgttcctgcggagccaggagtacaagaaataccagacaaacaagacaaccggcaacaccgataagagagccttcgtcgagacctggcagtccttttaccggaagaagcttaaggaggtgtggaaacctgccgtgcggtctggcggatctggcggaggctccaccagccccaagaaaaagagaaaagtctaagctgccttctgcggggcttgccttctggccatgcccttcttctctcccttgcacctgtacctcttggtctttgaataaagcctgagtaggaaggctagcaaaaaaaaaaaaaaaaaaaaaaaaaaaaaaaaaaaaaaaaaaaaaaaaaaaaaaaaaaaaaaaaaaaaaaaaaaaaaaaa

SEQ ID NO: 12904 - RNA, 5785 nt, synthetic construct
  source 1..5785: mol_type = other RNA
aggaaataagagagaaaagaagagtaagaagaaatataagagccaccatggcccctaagaagaagcgtaaagtgagccggatggaacgcctcgtctacgaggtgcggcagaagtgcagaaacatcgaggacatctgcatctcctgcggatctctgaacgtgaccctggagcacccactgttcatcggcggcatgtgccagaactgtaaaaactgttttctggagtgtgcctatcaatacgacgatgacggctaccagagctactgcaccatctgttgcggcggaagagaggtgctgatgtgtggaaataacaactgctgccggtgcttctgcgtggaatgcgtggacctgctggtgggccccggcgccgcccaggccgctattaaggaagatccttggaactgctacatgtgcggccacaagggcacatacggcctgctgagacggagagaggactggcctagcagactgcagatgttcttcgccaataaccacgaccaggagttcgacccccctaaggtgtaccctcccgtccccgccgagaagagaaagcccatccgggtcctgagcctgttcgatggcatcgccaccggtctgctggtgctgaaggacctgggcatccaggtggataggtacattgcctccgaggtgtgcgaggactccatcaccgtgggaatggtgcgtcatcagggcaagatcatgtacgtgggcgacgtgcggagcgtgacacagaagcatatccaggagtggggccctttcgacctggtgatcggcggcagcccttgcaatgacctgagcatcgtgaacccagcccggaagggcctgtacgagggaaccggcagactgttcttcgagttttacagactgctgcacgacgcccggcctaaggaaggcgacgaccggcccttcttttggctgttcgagaatgtggtggccatgggagtcagcgacaagcgggatattagccggttcctggagagcaaccccgtgatgatcgatgccaaggaagtgagcgccgcccaccgggccagatacttctggggcaatctgcctggcatgaacagacccctggccagcaccgtgaacgacaagctggagctgcaggagtgcctggagcacggccggatcgccaagttcagcaaggtgagaaccatcaccacccgaagcaacagcatcaaacaaggcaaggaccagcactttcctgtgttcatgaacgagaaggaggacatcctgtggtgtaccgagatggagagagtgttcgggttcccagtccactacacagatgtcagcaacatgtctagactggccagacagagactgctgggaagaagctggtccgtccctgtgatcagacacctgttcgcccctctgaaggagtacttcgcctgcgtgagcagcggcaacagcaacgccaacagccggggccccagcttctctagcggcctggtgccactgtccctgagagggagccacatgggccccatggagatctacaaaaccgtgagcgcctggaagcggcagcctgtgcgcgtgctgagcctgtttcggaatatcgataaagtcctgaaaagcctgggattcctggagagcggctctggctccggcggtggcaccctgaagtacgtggaggatgtgacaaacgtggtcagacgggatgtggagaagtggggccccttcgatctggtgtacggcagcacccaacccctgggcagctcttgtgaccggtgccctggctggtacatgtttcagttccaccggatcctgcagtacgccctgccgagacaggagtcccagcggccattcttttggattttcatggacaacttgctgctgaccgaggatgaccaggaaactaccactcggttcctgcagaccgaagccgtgaccctgcaggacgtgagaggccgggactaccagaacgccatgcgggtgtggtccaacatccctggactgaaaagcaagcacgcacctctgacccctaaagaagaggagtacctgcaggcccaggtgcggagcagaagcaagctggacgcccctaaggtggatctgctggtgaagaattgcctcctgcccctgagagagtacttcaagtatttcagccagaatagtctgcccctgggaggcagcggcggcggccaccaggacctggtgaccttcaaggacgtggccgtgtacttcacccagaccgagtgggccggcctgagccccgcccagaaggccctgtacaggagcgtgatgctggagaactacggcaacctgaccagcctgggctaccccgtgcccaagcccgccctgatcagcctgctggagggcggcaacctgccctggggcctggaggcccaggacaaccccagcgccgagaggaccaaggacatctgcggcggcccaagcagcggcgcccctcctcccagcggcggcagcccagccggctccccaacctctaccgaggagggcacctctgagtccgccacccccgagagcggccctggcacctccaccgagcccagcgagggcagcgcacccggcagccctgccggcagccccacctccacagaggagggaaccagcaccgagcccagcgaaggcagcgccccaggcaccagcaccgagcctagtgagcaggagattaaacggatcaacaagatcagaagaagacttgtgaaagacagcaacaccaagaaggccggcaagacaggccccatgaaaaccctgctggttagagtgatgacacccgatctgagagagcggctggaaaacctgagaaagaagcctgaaaatatcccccagcccatcagcaatacatctagagccaacctgaataagctgctgaccgattacaccgaaatgaagaaggcgatcctgcatgtgtactgggaagagttccagaaggaccctgtgggcctgatgagccgggtggcccagcctgccagcaagaagatcgatcagaacaagctgaaacctgagatggacgagaagggcaacctgaccaccgccggctttgcctgctctcagtgtggccagcccctgttcgtgtacaagctggagcaggtgtctgagaagggcaaggcttacaccaactacttcggacggtgcaatgtggccgagcacgaaaagctgatcctgctggcccagctgaagcccgagaaggatagcgacgaagccgtgacatatagcctgggaaagtttgggcagagggccctggatttctacagcattcatgtgaccaaggagtccacccaccccgtgaagcccctggcccagatcgccggaaacagatacgcctccggacctgtgggaaaggccctgagcgacgcatgtatgggcacaatcgcctccttcctgtctaagtaccaggacatcatcatcgaacaccagaaggtggtgaagggcaaccagaagagactggagagcctgcgggagctggccggcaaggaaaacctggaataccctagcgtgaccctgccacctcagcctcacaccaaggagggcgttgatgcctacaacgaagtgatcgcccgggtgcgaatgtgggtgaacctgaacctgtggcagaagctgaagctaagcagagatgatgccaagcctctgctgagactgaagggattcccttcctttcctctggtcgagagacaggccaacgaagtggactggtgggacatggtgtgtaacgtgaagaagctgatcaacgagaaaaaggaggatggcaaggtgttttggcagaatctggctggctacaagagacaggaagccctgagaccatacctgagcagcgaggaagatcggaagaagggaaagaaattcgctcggtaccagctgggcgacctgctgctgcacctggaaaagaagcacggcgaggactggggaaaggtgtacgacgaggcctgggagcggattgacaagaaagtggaaggcctgagcaagcacatcaagctggaagaggaacggagaagcgaggacgcccagagcaaggccgccctgaccgactggctgcgggctaaggccagcttcgtgatcgagggcctgaaggaggccgacaaggacgagttctgcagatgcgagctgaagctgcagaagtggtacggggacctgcggggaaagcccttcgccatcgaagccgagaacagcatcctggacatcagcggcttcagcaagcagtacaactgtgccttcatctggcagaaggacggcgtgaagaagctgaacctgtacctgatcatcaactacttcaagggcggcaagctgcggttcaagaagatcaaacctgaagccttcgaagccaacagattctacaccgtgatcaacaaaaagagcggcgagatcgtgcccatggaggtgaacttcaacttcgacgaccccaacctgatcatcctgcctctggcctttggcaagagacagggcagagaattcatctggaacgacctgctgtccctggaaaccggcagcctgaagctggccaacggaagagtgatcgagaagacactgtacaacagaagaacccggcaggatgagcctgccctgttcgtggccctgaccttcgagcggcgggaggtcctggactcctccaatatcaaaccaatgaacctgatcggcgtggcaagaggcgaaaacatccccgccgtgatcgccctgaccgaccccgagggctgcccactgagccggtttaaggatagcctgggaaacccaacccacatcctgagaatcggcgagagctataaggagaagcagcggaccatccaggccaagaaggaggtggagcagcggagagccggcggctacagccggaagtacgccagcaaagccaagaatctggcagacgatatggtgagaaacaccgctagagatctgctgtactacgccgtgacccaggatgccatgctgatcttcgccaacctgagccggggcttcggccggcagggcaagcggaccttcatggccgagagacagtacacacggatggaggactggctgaccgccaagctggcctacgagggcctgagcaagacctacctgtccaagacactggcccagtacacctccaagacatgcagcaactgtgggtttaccatcaccagcgccgactacgacagggtgctggagaagctgaagaagacagcaacaggctggatgaccacaattaacggcaaggagctgaaggtggagggccagattacctactacaacagatacaagagacagaacgtagtcaaggacctgtccgtcgagctggatagactgagcgaagaatctgtgaacaacgacatctcctcctggacaaagggcagaagcggagaagctctgagcctcctgaagaaaagattctcccatagacccgtgcaggagaagttcgtgtgcctgaactgcggcttcgagacacacgcagccgagcaagccgccctgaacatcgccagatcctggctgttcctgcggagccaggagtacaagaaataccagacaaacaagacaaccggcaacaccgataagagagccttcgtcgagacctggcagtccttttaccggaagaagcttaaggaggtgtggaaacctgccgtgcggtctggcggatctggcggaggctccaccagccccaagaaaaagagaaaagtctaagctgccttctgcggggcttgccttctggccatgcccttcttctctcccttgcacctgtacctcttggtctttgaataaagcctgagtaggaaggctagcaaaaaaaaaaaaaaaaaaaaaaaaaaaaaaaaaaaaaaaaaaaaaaaaaaaaaaaaaaaaaaaaaaaaaaaaaaaaaaaa

SEQ ID NO: 12905 - RNA, 5785 nt, synthetic construct
  source 1..5785: mol_type = other RNA
aggaaataagagagaaaagaagagtaagaagaaatataagagccaccatggcccctaagaagaagcgtaaagtgagccggatggaacgcctcgtctacgaggtgcggcagaagtgcagaaacatcgaggacatctgcatctcctgcggatctctgaacgtgaccctggagcacccactgttcatcggcggcatgtgccagaactgtaaaaactgttttctggagtgtgcctatcaatacgacgatgacggctaccagagctactgcaccatctgttgcggcggaagagaggtgctgatgtgtggaaataacaactgctgccggtgcttctgcgtggaatgcgtggacctgctggtgggccccggcgccgcccaggccgctattaaggaagatccttggaactgctacatgtgcggccacaagggcacatacggcctgctgagacggagagaggactggcctagcagactgcagatgttcttcgccaataaccacgaccaggagttcgacccccctaaggtgtaccctcccgtccccgccgagaagagaaagcccatccgggtcctgagcctgttcgatggcatcgccaccggtctgctggtgctgaaggacctgggcatccaggtggataggtacattgcctccgaggtgtgcgaggactccatcaccgtgggaatggtgcgtcatcagggcaagatcatgtacgtgggcgacgtgcggagcgtgacacagaagcatatccaggagtggggccctttcgacctggtgatcggcggcagcccttgcaatgacctgagcatcgtgaacccagcccggaagggcctgtacgagggaaccggcagactgttcttcgagttttacagactgctgcacgacgcccggcctaaggaaggcgacgaccggcccttcttttggctgttcgagaatgtggtggccatgggagtcagcgacaagcgggatattagccggttcctggagagcaaccccgtgatgatcgatgccaaggaagtgagcgccgcccaccgggccagatacttctggggcaatctgcctggcatgaacagacccctggccagcaccgtgaacgacaagctggagctgcaggagtgcctggagcacggccggatcgccaagttcagcaaggtgagaaccatcaccacccgaagcaacagcatcaaacaaggcaaggaccagcactttcctgtgttcatgaacgagaaggaggacatcctgtggtgtaccgagatggagagagtgttcgggttcccagtccactacacagatgtcagcaacatgtctagactggccagacagagactgctgggaagaagctggtccgtccctgtgatcagacacctgttcgcccctctgaaggagtacttcgcctgcgtgagcagcggcaacagcaacgccaacagccggggccccagcttctctagcggcctggtgccactgtccctgagagggagccacatgggccccatggagatctacaaaaccgtgagcgcctggaagcggcagcctgtgcgcgtgctgagcctgtttcggaatatcgataaagtcctgaaaagcctgggattcctggagagcggctctggctccggcggtggcaccctgaagtacgtggaggatgtgacaaacgtggtcagacgggatgtggagaagtggggccccttcgatctggtgtacggcagcacccaacccctgggcagctcttgtgaccggtgccctggctggtacatgtttcagttccaccggatcctgcagtacgccctgccgagacaggagtcccagcggccattcttttggattttcatggacaacttgctgctgaccgaggatgaccaggaaactaccactcggttcctgcagaccgaagccgtgaccctgcaggacgtgagaggccgggactaccagaacgccatgcgggtgtggtccaacatccctggactgaaaagcaagcacgcacctctgacccctaaagaagaggagtacctgcaggcccaggtgcggagcagaagcaagctggacgcccctaaggtggatctgctggtgaagaattgcctcctgcccctgagagagtacttcaagtatttcagccagaatagtctgcccctgggaggcagcggcggcggcgtgaccttcgaggacgtggccctgtacttcagcagggacgagtggaggctgctggacgaggcccagaggaggctgtaccacgacgtgatgctgcagaacttcagcctgatcagcagcctgggctgctgctgcggcgccgaggacgccgagagccccttccagcccagcatgttcagggacgtgagccaggccaggaccctgaaggccgccagcctgagccagaagaaccacccctgcgagaagggcggcccaagcagcggcgcccctcctcccagcggcggcagcccagccggctccccaacctctaccgaggagggcacctctgagtccgccacccccgagagcggccctggcacctccaccgagcccagcgagggcagcgcacccggcagccctgccggcagccccacctccacagaggagggaaccagcaccgagcccagcgaaggcagcgccccaggcaccagcaccgagcctagtgagcaggagattaaacggatcaacaagatcagaagaagacttgtgaaagacagcaacaccaagaaggccggcaagacaggccccatgaaaaccctgctggttagagtgatgacacccgatctgagagagcggctggaaaacctgagaaagaagcctgaaaatatcccccagcccatcagcaatacatctagagccaacctgaataagctgctgaccgattacaccgaaatgaagaaggcgatcctgcatgtgtactgggaagagttccagaaggaccctgtgggcctgatgagccgggtggcccagcctgccagcaagaagatcgatcagaacaagctgaaacctgagatggacgagaagggcaacctgaccaccgccggctttgcctgctctcagtgtggccagcccctgttcgtgtacaagctggagcaggtgtctgagaagggcaaggcttacaccaactacttcggacggtgcaatgtggccgagcacgaaaagctgatcctgctggcccagctgaagcccgagaaggatagcgacgaagccgtgacatatagcctgggaaagtttgggcagagggccctggatttctacagcattcatgtgaccaaggagtccacccaccccgtgaagcccctggcccagatcgccggaaacagatacgcctccggacctgtgggaaaggccctgagcgacgcatgtatgggcacaatcgcctccttcctgtctaagtaccaggacatcatcatcgaacaccagaaggtggtgaagggcaaccagaagagactggagagcctgcgggagctggccggcaaggaaaacctggaataccctagcgtgaccctgccacctcagcctcacaccaaggagggcgttgatgcctacaacgaagtgatcgcccgggtgcgaatgtgggtgaacctgaacctgtggcagaagctgaagctaagcagagatgatgccaagcctctgctgagactgaagggattcccttcctttcctctggtcgagagacaggccaacgaagtggactggtgggacatggtgtgtaacgtgaagaagctgatcaacgagaaaaaggaggatggcaaggtgttttggcagaatctggctggctacaagagacaggaagccctgagaccatacctgagcagcgaggaagatcggaagaagggaaagaaattcgctcggtaccagctgggcgacctgctgctgcacctggaaaagaagcacggcgaggactggggaaaggtgtacgacgaggcctgggagcggattgacaagaaagtggaaggcctgagcaagcacatcaagctggaagaggaacggagaagcgaggacgcccagagcaaggccgccctgaccgactggctgcgggctaaggccagcttcgtgatcgagggcctgaaggaggccgacaaggacgagttctgcagatgcgagctgaagctgcagaagtggtacggggacctgcggggaaagcccttcgccatcgaagccgagaacagcatcctggacatcagcggcttcagcaagcagtacaactgtgccttcatctggcagaaggacggcgtgaagaagctgaacctgtacctgatcatcaactacttcaagggcggcaagctgcggttcaagaagatcaaacctgaagccttcgaagccaacagattctacaccgtgatcaacaaaaagagcggcgagatcgtgcccatggaggtgaacttcaacttcgacgaccccaacctgatcatcctgcctctggcctttggcaagagacagggcagagaattcatctggaacgacctgctgtccctggaaaccggcagcctgaagctggccaacggaagagtgatcgagaagacactgtacaacagaagaacccggcaggatgagcctgccctgttcgtggccctgaccttcgagcggcgggaggtcctggactcctccaatatcaaaccaatgaacctgatcggcgtggcaagaggcgaaaacatccccgccgtgatcgccctgaccgaccccgagggctgcccactgagccggtttaaggatagcctgggaaacccaacccacatcctgagaatcggcgagagctataaggagaagcagcggaccatccaggccaagaaggaggtggagcagcggagagccggcggctacagccggaagtacgccagcaaagccaagaatctggcagacgatatggtgagaaacaccgctagagatctgctgtactacgccgtgacccaggatgccatgctgatcttcgccaacctgagccggggcttcggccggcagggcaagcggaccttcatggccgagagacagtacacacggatggaggactggctgaccgccaagctggcctacgagggcctgagcaagacctacctgtccaagacactggcccagtacacctccaagacatgcagcaactgtgggtttaccatcaccagcgccgactacgacagggtgctggagaagctgaagaagacagcaacaggctggatgaccacaattaacggcaaggagctgaaggtggagggccagattacctactacaacagatacaagagacagaacgtagtcaaggacctgtccgtcgagctggatagactgagcgaagaatctgtgaacaacgacatctcctcctggacaaagggcagaagcggagaagctctgagcctcctgaagaaaagattctcccatagacccgtgcaggagaagttcgtgtgcctgaactgcggcttcgagacacacgcagccgagcaagccgccctgaacatcgccagatcctggctgttcctgcggagccaggagtacaagaaataccagacaaacaagacaaccggcaacaccgataagagagccttcgtcgagacctggcagtccttttaccggaagaagcttaaggaggtgtggaaacctgccgtgcggtctggcggatctggcggaggctccaccagccccaagaaaaagagaaaagtctaagctgccttctgcggggcttgccttctggccatgcccttcttctctcccttgcacctgtacctcttggtctttgaataaagcctgagtaggaaggctagcaaaaaaaaaaaaaaaaaaaaaaaaaaaaaaaaaaaaaaaaaaaaaaaaaaaaaaaaaaaaaaaaaaaaaaaaaaaaaaaa

SEQ ID NO: 12906 - RNA, 5785 nt, synthetic construct
  source 1..5785: mol_type = other RNA
aggaaataagagagaaaagaagagtaagaagaaatataagagccaccatggcccctaagaagaagcgtaaagtgagccggatggaacgcctcgtctacgaggtgcggcagaagtgcagaaacatcgaggacatctgcatctcctgcggatctctgaacgtgaccctggagcacccactgttcatcggcggcatgtgccagaactgtaaaaactgttttctggagtgtgcctatcaatacgacgatgacggctaccagagctactgcaccatctgttgcggcggaagagaggtgctgatgtgtggaaataacaactgctgccggtgcttctgcgtggaatgcgtggacctgctggtgggccccggcgccgcccaggccgctattaaggaagatccttggaactgctacatgtgcggccacaagggcacatacggcctgctgagacggagagaggactggcctagcagactgcagatgttcttcgccaataaccacgaccaggagttcgacccccctaaggtgtaccctcccgtccccgccgagaagagaaagcccatccgggtcctgagcctgttcgatggcatcgccaccggtctgctggtgctgaaggacctgggcatccaggtggataggtacattgcctccgaggtgtgcgaggactccatcaccgtgggaatggtgcgtcatcagggcaagatcatgtacgtgggcgacgtgcggagcgtgacacagaagcatatccaggagtggggccctttcgacctggtgatcggcggcagcccttgcaatgacctgagcatcgtgaacccagcccggaagggcctgtacgagggaaccggcagactgttcttcgagttttacagactgctgcacgacgcccggcctaaggaaggcgacgaccggcccttcttttggctgttcgagaatgtggtggccatgggagtcagcgacaagcgggatattagccggttcctggagagcaaccccgtgatgatcgatgccaaggaagtgagcgccgcccaccgggccagatacttctggggcaatctgcctggcatgaacagacccctggccagcaccgtgaacgacaagctggagctgcaggagtgcctggagcacggccggatcgccaagttcagcaaggtgagaaccatcaccacccgaagcaacagcatcaaacaaggcaaggaccagcactttcctgtgttcatgaacgagaaggaggacatcctgtggtgtaccgagatggagagagtgttcgggttcccagtccactacacagatgtcagcaacatgtctagactggccagacagagactgctgggaagaagctggtccgtccctgtgatcagacacctgttcgcccctctgaaggagtacttcgcctgcgtgagcagcggcaacagcaacgccaacagccggggccccagcttctctagcggcctggtgccactgtccctgagagggagccacatgggccccatggagatctacaaaaccgtgagcgcctggaagcggcagcctgtgcgcgtgctgagcctgtttcggaatatcgataaagtcctgaaaagcctgggattcctggagagcggctctggctccggcggtggcaccctgaagtacgtggaggatgtgacaaacgtggtcagacgggatgtggagaagtggggccccttcgatctggtgtacggcagcacccaacccctgggcagctcttgtgaccggtgccctggctggtacatgtttcagttccaccggatcctgcagtacgccctgccgagacaggagtcccagcggccattcttttggattttcatggacaacttgctgctgaccgaggatgaccaggaaactaccactcggttcctgcagaccgaagccgtgaccctgcaggacgtgagaggccgggactaccagaacgccatgcgggtgtggtccaacatccctggactgaaaagcaagcacgcacctctgacccctaaagaagaggagtacctgcaggcccaggtgcggagcagaagcaagctggacgcccctaaggtggatctgctggtgaagaattgcctcctgcccctgagagagtacttcaagtatttcagccagaatagtctgcccctgggaggcagcggcggcggcatgcccgccaacgaggacaccccccagcccggcggccacggcagcgcctgcgaggtgagcgtgagcttcgaggacgtgaccgtggacttcagcagggaggagtggcagcagctggacagcacccagaggaggctgtaccaggacgtgatgctggagaactacagccacctgctgagcgtgggcttcgaggtgcccaagcccgaggtgatcttcaagctggagcagggcgagggcccctggaccggcggcccaagcagcggcgcccctcctcccagcggcggcagcccagccggctccccaacctctaccgaggagggcacctctgagtccgccacccccgagagcggccctggcacctccaccgagcccagcgagggcagcgcacccggcagccctgccggcagccccacctccacagaggagggaaccagcaccgagcccagcgaaggcagcgccccaggcaccagcaccgagcctagtgagcaggagattaaacggatcaacaagatcagaagaagacttgtgaaagacagcaacaccaagaaggccggcaagacaggccccatgaaaaccctgctggttagagtgatgacacccgatctgagagagcggctggaaaacctgagaaagaagcctgaaaatatcccccagcccatcagcaatacatctagagccaacctgaataagctgctgaccgattacaccgaaatgaagaaggcgatcctgcatgtgtactgggaagagttccagaaggaccctgtgggcctgatgagccgggtggcccagcctgccagcaagaagatcgatcagaacaagctgaaacctgagatggacgagaagggcaacctgaccaccgccggctttgcctgctctcagtgtggccagcccctgttcgtgtacaagctggagcaggtgtctgagaagggcaaggcttacaccaactacttcggacggtgcaatgtggccgagcacgaaaagctgatcctgctggcccagctgaagcccgagaaggatagcgacgaagccgtgacatatagcctgggaaagtttgggcagagggccctggatttctacagcattcatgtgaccaaggagtccacccaccccgtgaagcccctggcccagatcgccggaaacagatacgcctccggacctgtgggaaaggccctgagcgacgcatgtatgggcacaatcgcctccttcctgtctaagtaccaggacatcatcatcgaacaccagaaggtggtgaagggcaaccagaagagactggagagcctgcgggagctggccggcaaggaaaacctggaataccctagcgtgaccctgccacctcagcctcacaccaaggagggcgttgatgcctacaacgaagtgatcgcccgggtgcgaatgtgggtgaacctgaacctgtggcagaagctgaagctaagcagagatgatgccaagcctctgctgagactgaagggattcccttcctttcctctggtcgagagacaggccaacgaagtggactggtgggacatggtgtgtaacgtgaagaagctgatcaacgagaaaaaggaggatggcaaggtgttttggcagaatctggctggctacaagagacaggaagccctgagaccatacctgagcagcgaggaagatcggaagaagggaaagaaattcgctcggtaccagctgggcgacctgctgctgcacctggaaaagaagcacggcgaggactggggaaaggtgtacgacgaggcctgggagcggattgacaagaaagtggaaggcctgagcaagcacatcaagctggaagaggaacggagaagcgaggacgcccagagcaaggccgccctgaccgactggctgcgggctaaggccagcttcgtgatcgagggcctgaaggaggccgacaaggacgagttctgcagatgcgagctgaagctgcagaagtggtacggggacctgcggggaaagcccttcgccatcgaagccgagaacagcatcctggacatcagcggcttcagcaagcagtacaactgtgccttcatctggcagaaggacggcgtgaagaagctgaacctgtacctgatcatcaactacttcaagggcggcaagctgcggttcaagaagatcaaacctgaagccttcgaagccaacagattctacaccgtgatcaacaaaaagagcggcgagatcgtgcccatggaggtgaacttcaacttcgacgaccccaacctgatcatcctgcctctggcctttggcaagagacagggcagagaattcatctggaacgacctgctgtccctggaaaccggcagcctgaagctggccaacggaagagtgatcgagaagacactgtacaacagaagaacccggcaggatgagcctgccctgttcgtggccctgaccttcgagcggcgggaggtcctggactcctccaatatcaaaccaatgaacctgatcggcgtggcaagaggcgaaaacatccccgccgtgatcgccctgaccgaccccgagggctgcccactgagccggtttaaggatagcctgggaaacccaacccacatcctgagaatcggcgagagctataaggagaagcagcggaccatccaggccaagaaggaggtggagcagcggagagccggcggctacagccggaagtacgccagcaaagccaagaatctggcagacgatatggtgagaaacaccgctagagatctgctgtactacgccgtgacccaggatgccatgctgatcttcgccaacctgagccggggcttcggccggcagggcaagcggaccttcatggccgagagacagtacacacggatggaggactggctgaccgccaagctggcctacgagggcctgagcaagacctacctgtccaagacactggcccagtacacctccaagacatgcagcaactgtgggtttaccatcaccagcgccgactacgacagggtgctggagaagctgaagaagacagcaacaggctggatgaccacaattaacggcaaggagctgaaggtggagggccagattacctactacaacagatacaagagacagaacgtagtcaaggacctgtccgtcgagctggatagactgagcgaagaatctgtgaacaacgacatctcctcctggacaaagggcagaagcggagaagctctgagcctcctgaagaaaagattctcccatagacccgtgcaggagaagttcgtgtgcctgaactgcggcttcgagacacacgcagccgagcaagccgccctgaacatcgccagatcctggctgttcctgcggagccaggagtacaagaaataccagacaaacaagacaaccggcaacaccgataagagagccttcgtcgagacctggcagtccttttaccggaagaagcttaaggaggtgtggaaacctgccgtgcggtctggcggatctggcggaggctccaccagccccaagaaaaagagaaaagtctaagctgccttctgcggggcttgccttctggccatgcccttcttctctcccttgcacctgtacctcttggtctttgaataaagcctgagtaggaaggctagcaaaaaaaaaaaaaaaaaaaaaaaaaaaaaaaaaaaaaaaaaaaaaaaaaaaaaaaaaaaaaaaaaaaaaaaaaaaaaaaa

SEQ ID NO: 12907 - RNA, 5785 nt, synthetic construct
  source 1..5785: mol_type = other RNA
aggaaataagagagaaaagaagagtaagaagaaatataagagccaccatggcccctaagaagaagcgtaaagtgagccggatggaacgcctcgtctacgaggtgcggcagaagtgcagaaacatcgaggacatctgcatctcctgcggatctctgaacgtgaccctggagcacccactgttcatcggcggcatgtgccagaactgtaaaaactgttttctggagtgtgcctatcaatacgacgatgacggctaccagagctactgcaccatctgttgcggcggaagagaggtgctgatgtgtggaaataacaactgctgccggtgcttctgcgtggaatgcgtggacctgctggtgggccccggcgccgcccaggccgctattaaggaagatccttggaactgctacatgtgcggccacaagggcacatacggcctgctgagacggagagaggactggcctagcagactgcagatgttcttcgccaataaccacgaccaggagttcgacccccctaaggtgtaccctcccgtccccgccgagaagagaaagcccatccgggtcctgagcctgttcgatggcatcgccaccggtctgctggtgctgaaggacctgggcatccaggtggataggtacattgcctccgaggtgtgcgaggactccatcaccgtgggaatggtgcgtcatcagggcaagatcatgtacgtgggcgacgtgcggagcgtgacacagaagcatatccaggagtggggccctttcgacctggtgatcggcggcagcccttgcaatgacctgagcatcgtgaacccagcccggaagggcctgtacgagggaaccggcagactgttcttcgagttttacagactgctgcacgacgcccggcctaaggaaggcgacgaccggcccttcttttggctgttcgagaatgtggtggccatgggagtcagcgacaagcgggatattagccggttcctggagagcaaccccgtgatgatcgatgccaaggaagtgagcgccgcccaccgggccagatacttctggggcaatctgcctggcatgaacagacccctggccagcaccgtgaacgacaagctggagctgcaggagtgcctggagcacggccggatcgccaagttcagcaaggtgagaaccatcaccacccgaagcaacagcatcaaacaaggcaaggaccagcactttcctgtgttcatgaacgagaaggaggacatcctgtggtgtaccgagatggagagagtgttcgggttcccagtccactacacagatgtcagcaacatgtctagactggccagacagagactgctgggaagaagctggtccgtccctgtgatcagacacctgttcgcccctctgaaggagtacttcgcctgcgtgagcagcggcaacagcaacgccaacagccggggccccagcttctctagcggcctggtgccactgtccctgagagggagccacatgggccccatggagatctacaaaaccgtgagcgcctggaagcggcagcctgtgcgcgtgctgagcctgtttcggaatatcgataaagtcctgaaaagcctgggattcctggagagcggctctggctccggcggtggcaccctgaagtacgtggaggatgtgacaaacgtggtcagacgggatgtggagaagtggggccccttcgatctggtgtacggcagcacccaacccctgggcagctcttgtgaccggtgccctggctggtacatgtttcagttccaccggatcctgcagtacgccctgccgagacaggagtcccagcggccattcttttggattttcatggacaacttgctgctgaccgaggatgaccaggaaactaccactcggttcctgcagaccgaagccgtgaccctgcaggacgtgagaggccgggactaccagaacgccatgcgggtgtggtccaacatccctggactgaaaagcaagcacgcacctctgacccctaaagaagaggagtacctgcaggcccaggtgcggagcagaagcaagctggacgcccctaaggtggatctgctggtgaagaattgcctcctgcccctgagagagtacttcaagtatttcagccagaatagtctgcccctgggaggcagcggcggcggccaggaccccagcgccgagcagctgagcgaggaggtgcccgtggtgttcgaggagctgcccgtggtgttcgaggacgtggccgtgtacttcaccagggaggagtggggcatgctggacaagaggcagaaggagctgtacagggacgtgatgaggatgaactacgagctgctggccagcctgggccccgccgccgccaagcccgacctgatcagcaagctggagaggagggccgccccctggatcggcggcccaagcagcggcgcccctcctcccagcggcggcagcccagccggctccccaacctctaccgaggagggcacctctgagtccgccacccccgagagcggccctggcacctccaccgagcccagcgagggcagcgcacccggcagccctgccggcagccccacctccacagaggagggaaccagcaccgagcccagcgaaggcagcgccccaggcaccagcaccgagcctagtgagcaggagattaaacggatcaacaagatcagaagaagacttgtgaaagacagcaacaccaagaaggccggcaagacaggccccatgaaaaccctgctggttagagtgatgacacccgatctgagagagcggctggaaaacctgagaaagaagcctgaaaatatcccccagcccatcagcaatacatctagagccaacctgaataagctgctgaccgattacaccgaaatgaagaaggcgatcctgcatgtgtactgggaagagttccagaaggaccctgtgggcctgatgagccgggtggcccagcctgccagcaagaagatcgatcagaacaagctgaaacctgagatggacgagaagggcaacctgaccaccgccggctttgcctgctctcagtgtggccagcccctgttcgtgtacaagctggagcaggtgtctgagaagggcaaggcttacaccaactacttcggacggtgcaatgtggccgagcacgaaaagctgatcctgctggcccagctgaagcccgagaaggatagcgacgaagccgtgacatatagcctgggaaagtttgggcagagggccctggatttctacagcattcatgtgaccaaggagtccacccaccccgtgaagcccctggcccagatcgccggaaacagatacgcctccggacctgtgggaaaggccctgagcgacgcatgtatgggcacaatcgcctccttcctgtctaagtaccaggacatcatcatcgaacaccagaaggtggtgaagggcaaccagaagagactggagagcctgcgggagctggccggcaaggaaaacctggaataccctagcgtgaccctgccacctcagcctcacaccaaggagggcgttgatgcctacaacgaagtgatcgcccgggtgcgaatgtgggtgaacctgaacctgtggcagaagctgaagctaagcagagatgatgccaagcctctgctgagactgaagggattcccttcctttcctctggtcgagagacaggccaacgaagtggactggtgggacatggtgtgtaacgtgaagaagctgatcaacgagaaaaaggaggatggcaaggtgttttggcagaatctggctggctacaagagacaggaagccctgagaccatacctgagcagcgaggaagatcggaagaagggaaagaaattcgctcggtaccagctgggcgacctgctgctgcacctggaaaagaagcacggcgaggactggggaaaggtgtacgacgaggcctgggagcggattgacaagaaagtggaaggcctgagcaagcacatcaagctggaagaggaacggagaagcgaggacgcccagagcaaggccgccctgaccgactggctgcgggctaaggccagcttcgtgatcgagggcctgaaggaggccgacaaggacgagttctgcagatgcgagctgaagctgcagaagtggtacggggacctgcggggaaagcccttcgccatcgaagccgagaacagcatcctggacatcagcggcttcagcaagcagtacaactgtgccttcatctggcagaaggacggcgtgaagaagctgaacctgtacctgatcatcaactacttcaagggcggcaagctgcggttcaagaagatcaaacctgaagccttcgaagccaacagattctacaccgtgatcaacaaaaagagcggcgagatcgtgcccatggaggtgaacttcaacttcgacgaccccaacctgatcatcctgcctctggcctttggcaagagacagggcagagaattcatctggaacgacctgctgtccctggaaaccggcagcctgaagctggccaacggaagagtgatcgagaagacactgtacaacagaagaacccggcaggatgagcctgccctgttcgtggccctgaccttcgagcggcgggaggtcctggactcctccaatatcaaaccaatgaacctgatcggcgtggcaagaggcgaaaacatccccgccgtgatcgccctgaccgaccccgagggctgcccactgagccggtttaaggatagcctgggaaacccaacccacatcctgagaatcggcgagagctataaggagaagcagcggaccatccaggccaagaaggaggtggagcagcggagagccggcggctacagccggaagtacgccagcaaagccaagaatctggcagacgatatggtgagaaacaccgctagagatctgctgtactacgccgtgacccaggatgccatgctgatcttcgccaacctgagccggggcttcggccggcagggcaagcggaccttcatggccgagagacagtacacacggatggaggactggctgaccgccaagctggcctacgagggcctgagcaagacctacctgtccaagacactggcccagtacacctccaagacatgcagcaactgtgggtttaccatcaccagcgccgactacgacagggtgctggagaagctgaagaagacagcaacaggctggatgaccacaattaacggcaaggagctgaaggtggagggccagattacctactacaacagatacaagagacagaacgtagtcaaggacctgtccgtcgagctggatagactgagcgaagaatctgtgaacaacgacatctcctcctggacaaagggcagaagcggagaagctctgagcctcctgaagaaaagattctcccatagacccgtgcaggagaagttcgtgtgcctgaactgcggcttcgagacacacgcagccgagcaagccgccctgaacatcgccagatcctggctgttcctgcggagccaggagtacaagaaataccagacaaacaagacaaccggcaacaccgataagagagccttcgtcgagacctggcagtccttttaccggaagaagcttaaggaggtgtggaaacctgccgtgcggtctggcggatctggcggaggctccaccagccccaagaaaaagagaaaagtctaagctgccttctgcggggcttgccttctggccatgcccttcttctctcccttgcacctgtacctcttggtctttgaataaagcctgagtaggaaggctagcaaaaaaaaaaaaaaaaaaaaaaaaaaaaaaaaaaaaaaaaaaaaaaaaaaaaaaaaaaaaaaaaaaaaaaaaaaaaaaaa

SEQ ID NO: 12908 - RNA, 5785 nt, synthetic construct
  source 1..5785: mol_type = other RNA
aggaaataagagagaaaagaagagtaagaagaaatataagagccaccatggcccctaagaagaagcgtaaagtgagccggatggaacgcctcgtctacgaggtgcggcagaagtgcagaaacatcgaggacatctgcatctcctgcggatctctgaacgtgaccctggagcacccactgttcatcggcggcatgtgccagaactgtaaaaactgttttctggagtgtgcctatcaatacgacgatgacggctaccagagctactgcaccatctgttgcggcggaagagaggtgctgatgtgtggaaataacaactgctgccggtgcttctgcgtggaatgcgtggacctgctggtgggccccggcgccgcccaggccgctattaaggaagatccttggaactgctacatgtgcggccacaagggcacatacggcctgctgagacggagagaggactggcctagcagactgcagatgttcttcgccaataaccacgaccaggagttcgacccccctaaggtgtaccctcccgtccccgccgagaagagaaagcccatccgggtcctgagcctgttcgatggcatcgccaccggtctgctggtgctgaaggacctgggcatccaggtggataggtacattgcctccgaggtgtgcgaggactccatcaccgtgggaatggtgcgtcatcagggcaagatcatgtacgtgggcgacgtgcggagcgtgacacagaagcatatccaggagtggggccctttcgacctggtgatcggcggcagcccttgcaatgacctgagcatcgtgaacccagcccggaagggcctgtacgagggaaccggcagactgttcttcgagttttacagactgctgcacgacgcccggcctaaggaaggcgacgaccggcccttcttttggctgttcgagaatgtggtggccatgggagtcagcgacaagcgggatattagccggttcctggagagcaaccccgtgatgatcgatgccaaggaagtgagcgccgcccaccgggccagatacttctggggcaatctgcctggcatgaacagacccctggccagcaccgtgaacgacaagctggagctgcaggagtgcctggagcacggccggatcgccaagttcagcaaggtgagaaccatcaccacccgaagcaacagcatcaaacaaggcaaggaccagcactttcctgtgttcatgaacgagaaggaggacatcctgtggtgtaccgagatggagagagtgttcgggttcccagtccactacacagatgtcagcaacatgtctagactggccagacagagactgctgggaagaagctggtccgtccctgtgatcagacacctgttcgcccctctgaaggagtacttcgcctgcgtgagcagcggcaacagcaacgccaacagccggggccccagcttctctagcggcctggtgccactgtccctgagagggagccacatgggccccatggagatctacaaaaccgtgagcgcctggaagcggcagcctgtgcgcgtgctgagcctgtttcggaatatcgataaagtcctgaaaagcctgggattcctggagagcggctctggctccggcggtggcaccctgaagtacgtggaggatgtgacaaacgtggtcagacgggatgtggagaagtggggccccttcgatctggtgtacggcagcacccaacccctgggcagctcttgtgaccggtgccctggctggtacatgtttcagttccaccggatcctgcagtacgccctgccgagacaggagtcccagcggccattcttttggattttcatggacaacttgctgctgaccgaggatgaccaggaaactaccactcggttcctgcagaccgaagccgtgaccctgcaggacgtgagaggccgggactaccagaacgccatgcgggtgtggtccaacatccctggactgaaaagcaagcacgcacctctgacccctaaagaagaggagtacctgcaggcccaggtgcggagcagaagcaagctggacgcccctaaggtggatctgctggtgaagaattgcctcctgcccctgagagagtacttcaagtatttcagccagaatagtctgcccctgggaggcagcggcggcggcctgctgaccttcgaggacgtggccctgagcttcaccgaggaggagtggcagctgctggaccccacccagaagatcctgtacaacgacgtgatgcaggagaactacgagaccgtgatcagcctgggcctgaagctgaagaacgacaccggcaacgaccagcccatcagcctgagcaccctggagatccagggcagcggctgcaaggtgctgaggaaggccagggtgaaggtggcccagaagaccggcggcccaagcagcggcgcccctcctcccagcggcggcagcccagccggctccccaacctctaccgaggagggcacctctgagtccgccacccccgagagcggccctggcacctccaccgagcccagcgagggcagcgcacccggcagccctgccggcagccccacctccacagaggagggaaccagcaccgagcccagcgaaggcagcgccccaggcaccagcaccgagcctagtgagcaggagattaaacggatcaacaagatcagaagaagacttgtgaaagacagcaacaccaagaaggccggcaagacaggccccatgaaaaccctgctggttagagtgatgacacccgatctgagagagcggctggaaaacctgagaaagaagcctgaaaatatcccccagcccatcagcaatacatctagagccaacctgaataagctgctgaccgattacaccgaaatgaagaaggcgatcctgcatgtgtactgggaagagttccagaaggaccctgtgggcctgatgagccgggtggcccagcctgccagcaagaagatcgatcagaacaagctgaaacctgagatggacgagaagggcaacctgaccaccgccggctttgcctgctctcagtgtggccagcccctgttcgtgtacaagctggagcaggtgtctgagaagggcaaggcttacaccaactacttcggacggtgcaatgtggccgagcacgaaaagctgatcctgctggcccagctgaagcccgagaaggatagcgacgaagccgtgacatatagcctgggaaagtttgggcagagggccctggatttctacagcattcatgtgaccaaggagtccacccaccccgtgaagcccctggcccagatcgccggaaacagatacgcctccggacctgtgggaaaggccctgagcgacgcatgtatgggcacaatcgcctccttcctgtctaagtaccaggacatcatcatcgaacaccagaaggtggtgaagggcaaccagaagagactggagagcctgcgggagctggccggcaaggaaaacctggaataccctagcgtgaccctgccacctcagcctcacaccaaggagggcgttgatgcctacaacgaagtgatcgcccgggtgcgaatgtgggtgaacctgaacctgtggcagaagctgaagctaagcagagatgatgccaagcctctgctgagactgaagggattcccttcctttcctctggtcgagagacaggccaacgaagtggactggtgggacatggtgtgtaacgtgaagaagctgatcaacgagaaaaaggaggatggcaaggtgttttggcagaatctggctggctacaagagacaggaagccctgagaccatacctgagcagcgaggaagatcggaagaagggaaagaaattcgctcggtaccagctgggcgacctgctgctgcacctggaaaagaagcacggcgaggactggggaaaggtgtacgacgaggcctgggagcggattgacaagaaagtggaaggcctgagcaagcacatcaagctggaagaggaacggagaagcgaggacgcccagagcaaggccgccctgaccgactggctgcgggctaaggccagcttcgtgatcgagggcctgaaggaggccgacaaggacgagttctgcagatgcgagctgaagctgcagaagtggtacggggacctgcggggaaagcccttcgccatcgaagccgagaacagcatcctggacatcagcggcttcagcaagcagtacaactgtgccttcatctggcagaaggacggcgtgaagaagctgaacctgtacctgatcatcaactacttcaagggcggcaagctgcggttcaagaagatcaaacctgaagccttcgaagccaacagattctacaccgtgatcaacaaaaagagcggcgagatcgtgcccatggaggtgaacttcaacttcgacgaccccaacctgatcatcctgcctctggcctttggcaagagacagggcagagaattcatctggaacgacctgctgtccctggaaaccggcagcctgaagctggccaacggaagagtgatcgagaagacactgtacaacagaagaacccggcaggatgagcctgccctgttcgtggccctgaccttcgagcggcgggaggtcctggactcctccaatatcaaaccaatgaacctgatcggcgtggcaagaggcgaaaacatccccgccgtgatcgccctgaccgaccccgagggctgcccactgagccggtttaaggatagcctgggaaacccaacccacatcctgagaatcggcgagagctataaggagaagcagcggaccatccaggccaagaaggaggtggagcagcggagagccggcggctacagccggaagtacgccagcaaagccaagaatctggcagacgatatggtgagaaacaccgctagagatctgctgtactacgccgtgacccaggatgccatgctgatcttcgccaacctgagccggggcttcggccggcagggcaagcggaccttcatggccgagagacagtacacacggatggaggactggctgaccgccaagctggcctacgagggcctgagcaagacctacctgtccaagacactggcccagtacacctccaagacatgcagcaactgtgggtttaccatcaccagcgccgactacgacagggtgctggagaagctgaagaagacagcaacaggctggatgaccacaattaacggcaaggagctgaaggtggagggccagattacctactacaacagatacaagagacagaacgtagtcaaggacctgtccgtcgagctggatagactgagcgaagaatctgtgaacaacgacatctcctcctggacaaagggcagaagcggagaagctctgagcctcctgaagaaaagattctcccatagacccgtgcaggagaagttcgtgtgcctgaactgcggcttcgagacacacgcagccgagcaagccgccctgaacatcgccagatcctggctgttcctgcggagccaggagtacaagaaataccagacaaacaagacaaccggcaacaccgataagagagccttcgtcgagacctggcagtccttttaccggaagaagcttaaggaggtgtggaaacctgccgtgcggtctggcggatctggcggaggctccaccagccccaagaaaaagagaaaagtctaagctgccttctgcggggcttgccttctggccatgcccttcttctctcccttgcacctgtacctcttggtctttgaataaagcctgagtaggaaggctagcaaaaaaaaaaaaaaaaaaaaaaaaaaaaaaaaaaaaaaaaaaaaaaaaaaaaaaaaaaaaaaaaaaaaaaaaaaaaaaaa

SEQ ID NO: 12909 - RNA, 5785 nt, synthetic construct
  source 1..5785: mol_type = other RNA
aggaaataagagagaaaagaagagtaagaagaaatataagagccaccatggcccctaagaagaagcgtaaagtgagccggatggaacgcctcgtctacgaggtgcggcagaagtgcagaaacatcgaggacatctgcatctcctgcggatctctgaacgtgaccctggagcacccactgttcatcggcggcatgtgccagaactgtaaaaactgttttctggagtgtgcctatcaatacgacgatgacggctaccagagctactgcaccatctgttgcggcggaagagaggtgctgatgtgtggaaataacaactgctgccggtgcttctgcgtggaatgcgtggacctgctggtgggccccggcgccgcccaggccgctattaaggaagatccttggaactgctacatgtgcggccacaagggcacatacggcctgctgagacggagagaggactggcctagcagactgcagatgttcttcgccaataaccacgaccaggagttcgacccccctaaggtgtaccctcccgtccccgccgagaagagaaagcccatccgggtcctgagcctgttcgatggcatcgccaccggtctgctggtgctgaaggacctgggcatccaggtggataggtacattgcctccgaggtgtgcgaggactccatcaccgtgggaatggtgcgtcatcagggcaagatcatgtacgtgggcgacgtgcggagcgtgacacagaagcatatccaggagtggggccctttcgacctggtgatcggcggcagcccttgcaatgacctgagcatcgtgaacccagcccggaagggcctgtacgagggaaccggcagactgttcttcgagttttacagactgctgcacgacgcccggcctaaggaaggcgacgaccggcccttcttttggctgttcgagaatgtggtggccatgggagtcagcgacaagcgggatattagccggttcctggagagcaaccccgtgatgatcgatgccaaggaagtgagcgccgcccaccgggccagatacttctggggcaatctgcctggcatgaacagacccctggccagcaccgtgaacgacaagctggagctgcaggagtgcctggagcacggccggatcgccaagttcagcaaggtgagaaccatcaccacccgaagcaacagcatcaaacaaggcaaggaccagcactttcctgtgttcatgaacgagaaggaggacatcctgtggtgtaccgagatggagagagtgttcgggttcccagtccactacacagatgtcagcaacatgtctagactggccagacagagactgctgggaagaagctggtccgtccctgtgatcagacacctgttcgcccctctgaaggagtacttcgcctgcgtgagcagcggcaacagcaacgccaacagccggggccccagcttctctagcggcctggtgccactgtccctgagagggagccacatgggccccatggagatctacaaaaccgtgagcgcctggaagcggcagcctgtgcgcgtgctgagcctgtttcggaatatcgataaagtcctgaaaagcctgggattcctggagagcggctctggctccggcggtggcaccctgaagtacgtggaggatgtgacaaacgtggtcagacgggatgtggagaagtggggccccttcgatctggtgtacggcagcacccaacccctgggcagctcttgtgaccggtgccctggctggtacatgtttcagttccaccggatcctgcagtacgccctgccgagacaggagtcccagcggccattcttttggattttcatggacaacttgctgctgaccgaggatgaccaggaaactaccactcggttcctgcagaccgaagccgtgaccctgcaggacgtgagaggccgggactaccagaacgccatgcgggtgtggtccaacatccctggactgaaaagcaagcacgcacctctgacccctaaagaagaggagtacctgcaggcccaggtgcggagcagaagcaagctggacgcccctaaggtggatctgctggtgaagaattgcctcctgcccctgagagagtacttcaagtatttcagccagaatagtctgcccctgggaggcagcggcggcggcagggccgaggaggccgtgaccttcaaggacgtggccgtggtgttcaccgaggaggagctgcagctgctggacctggcccagaggaagctgtacagggacgtgatgctggagaacttcaggaacctgctgagcgtgggccaccagcccttccacggcgacaccttccacttcctgagggaggagaagttctgggtgatggagaccaccagccagagggagggcaacagcggcggcaagatccagggcggcccaagcagcggcgcccctcctcccagcggcggcagcccagccggctccccaacctctaccgaggagggcacctctgagtccgccacccccgagagcggccctggcacctccaccgagcccagcgagggcagcgcacccggcagccctgccggcagccccacctccacagaggagggaaccagcaccgagcccagcgaaggcagcgccccaggcaccagcaccgagcctagtgagcaggagattaaacggatcaacaagatcagaagaagacttgtgaaagacagcaacaccaagaaggccggcaagacaggccccatgaaaaccctgctggttagagtgatgacacccgatctgagagagcggctggaaaacctgagaaagaagcctgaaaatatcccccagcccatcagcaatacatctagagccaacctgaataagctgctgaccgattacaccgaaatgaagaaggcgatcctgcatgtgtactgggaagagttccagaaggaccctgtgggcctgatgagccgggtggcccagcctgccagcaagaagatcgatcagaacaagctgaaacctgagatggacgagaagggcaacctgaccaccgccggctttgcctgctctcagtgtggccagcccctgttcgtgtacaagctggagcaggtgtctgagaagggcaaggcttacaccaactacttcggacggtgcaatgtggccgagcacgaaaagctgatcctgctggcccagctgaagcccgagaaggatagcgacgaagccgtgacatatagcctgggaaagtttgggcagagggccctggatttctacagcattcatgtgaccaaggagtccacccaccccgtgaagcccctggcccagatcgccggaaacagatacgcctccggacctgtgggaaaggccctgagcgacgcatgtatgggcacaatcgcctccttcctgtctaagtaccaggacatcatcatcgaacaccagaaggtggtgaagggcaaccagaagagactggagagcctgcgggagctggccggcaaggaaaacctggaataccctagcgtgaccctgccacctcagcctcacaccaaggagggcgttgatgcctacaacgaagtgatcgcccgggtgcgaatgtgggtgaacctgaacctgtggcagaagctgaagctaagcagagatgatgccaagcctctgctgagactgaagggattcccttcctttcctctggtcgagagacaggccaacgaagtggactggtgggacatggtgtgtaacgtgaagaagctgatcaacgagaaaaaggaggatggcaaggtgttttggcagaatctggctggctacaagagacaggaagccctgagaccatacctgagcagcgaggaagatcggaagaagggaaagaaattcgctcggtaccagctgggcgacctgctgctgcacctggaaaagaagcacggcgaggactggggaaaggtgtacgacgaggcctgggagcggattgacaagaaagtggaaggcctgagcaagcacatcaagctggaagaggaacggagaagcgaggacgcccagagcaaggccgccctgaccgactggctgcgggctaaggccagcttcgtgatcgagggcctgaaggaggccgacaaggacgagttctgcagatgcgagctgaagctgcagaagtggtacggggacctgcggggaaagcccttcgccatcgaagccgagaacagcatcctggacatcagcggcttcagcaagcagtacaactgtgccttcatctggcagaaggacggcgtgaagaagctgaacctgtacctgatcatcaactacttcaagggcggcaagctgcggttcaagaagatcaaacctgaagccttcgaagccaacagattctacaccgtgatcaacaaaaagagcggcgagatcgtgcccatggaggtgaacttcaacttcgacgaccccaacctgatcatcctgcctctggcctttggcaagagacagggcagagaattcatctggaacgacctgctgtccctggaaaccggcagcctgaagctggccaacggaagagtgatcgagaagacactgtacaacagaagaacccggcaggatgagcctgccctgttcgtggccctgaccttcgagcggcgggaggtcctggactcctccaatatcaaaccaatgaacctgatcggcgtggcaagaggcgaaaacatccccgccgtgatcgccctgaccgaccccgagggctgcccactgagccggtttaaggatagcctgggaaacccaacccacatcctgagaatcggcgagagctataaggagaagcagcggaccatccaggccaagaaggaggtggagcagcggagagccggcggctacagccggaagtacgccagcaaagccaagaatctggcagacgatatggtgagaaacaccgctagagatctgctgtactacgccgtgacccaggatgccatgctgatcttcgccaacctgagccggggcttcggccggcagggcaagcggaccttcatggccgagagacagtacacacggatggaggactggctgaccgccaagctggcctacgagggcctgagcaagacctacctgtccaagacactggcccagtacacctccaagacatgcagcaactgtgggtttaccatcaccagcgccgactacgacagggtgctggagaagctgaagaagacagcaacaggctggatgaccacaattaacggcaaggagctgaaggtggagggccagattacctactacaacagatacaagagacagaacgtagtcaaggacctgtccgtcgagctggatagactgagcgaagaatctgtgaacaacgacatctcctcctggacaaagggcagaagcggagaagctctgagcctcctgaagaaaagattctcccatagacccgtgcaggagaagttcgtgtgcctgaactgcggcttcgagacacacgcagccgagcaagccgccctgaacatcgccagatcctggctgttcctgcggagccaggagtacaagaaataccagacaaacaagacaaccggcaacaccgataagagagccttcgtcgagacctggcagtccttttaccggaagaagcttaaggaggtgtggaaacctgccgtgcggtctggcggatctggcggaggctccaccagccccaagaaaaagagaaaagtctaagctgccttctgcggggcttgccttctggccatgcccttcttctctcccttgcacctgtacctcttggtctttgaataaagcctgagtaggaaggctagcaaaaaaaaaaaaaaaaaaaaaaaaaaaaaaaaaaaaaaaaaaaaaaaaaaaaaaaaaaaaaaaaaaaaaaaaaaaaaaaa

SEQ ID NO: 12910 - RNA, 5785 nt, synthetic construct
  source 1..5785: mol_type = other RNA
aggaaataagagagaaaagaagagtaagaagaaatataagagccaccatggcccctaagaagaagcgtaaagtgagccggatggaacgcctcgtctacgaggtgcggcagaagtgcagaaacatcgaggacatctgcatctcctgcggatctctgaacgtgaccctggagcacccactgttcatcggcggcatgtgccagaactgtaaaaactgttttctggagtgtgcctatcaatacgacgatgacggctaccagagctactgcaccatctgttgcggcggaagagaggtgctgatgtgtggaaataacaactgctgccggtgcttctgcgtggaatgcgtggacctgctggtgggccccggcgccgcccaggccgctattaaggaagatccttggaactgctacatgtgcggccacaagggcacatacggcctgctgagacggagagaggactggcctagcagactgcagatgttcttcgccaataaccacgaccaggagttcgacccccctaaggtgtaccctcccgtccccgccgagaagagaaagcccatccgggtcctgagcctgttcgatggcatcgccaccggtctgctggtgctgaaggacctgggcatccaggtggataggtacattgcctccgaggtgtgcgaggactccatcaccgtgggaatggtgcgtcatcagggcaagatcatgtacgtgggcgacgtgcggagcgtgacacagaagcatatccaggagtggggccctttcgacctggtgatcggcggcagcccttgcaatgacctgagcatcgtgaacccagcccggaagggcctgtacgagggaaccggcagactgttcttcgagttttacagactgctgcacgacgcccggcctaaggaaggcgacgaccggcccttcttttggctgttcgagaatgtggtggccatgggagtcagcgacaagcgggatattagccggttcctggagagcaaccccgtgatgatcgatgccaaggaagtgagcgccgcccaccgggccagatacttctggggcaatctgcctggcatgaacagacccctggccagcaccgtgaacgacaagctggagctgcaggagtgcctggagcacggccggatcgccaagttcagcaaggtgagaaccatcaccacccgaagcaacagcatcaaacaaggcaaggaccagcactttcctgtgttcatgaacgagaaggaggacatcctgtggtgtaccgagatggagagagtgttcgggttcccagtccactacacagatgtcagcaacatgtctagactggccagacagagactgctgggaagaagctggtccgtccctgtgatcagacacctgttcgcccctctgaaggagtacttcgcctgcgtgagcagcggcaacagcaacgccaacagccggggccccagcttctctagcggcctggtgccactgtccctgagagggagccacatgggccccatggagatctacaaaaccgtgagcgcctggaagcggcagcctgtgcgcgtgctgagcctgtttcggaatatcgataaagtcctgaaaagcctgggattcctggagagcggctctggctccggcggtggcaccctgaagtacgtggaggatgtgacaaacgtggtcagacgggatgtggagaagtggggccccttcgatctggtgtacggcagcacccaacccctgggcagctcttgtgaccggtgccctggctggtacatgtttcagttccaccggatcctgcagtacgccctgccgagacaggagtcccagcggccattcttttggattttcatggacaacttgctgctgaccgaggatgaccaggaaactaccactcggttcctgcagaccgaagccgtgaccctgcaggacgtgagaggccgggactaccagaacgccatgcgggtgtggtccaacatccctggactgaaaagcaagcacgcacctctgacccctaaagaagaggagtacctgcaggcccaggtgcggagcagaagcaagctggacgcccctaaggtggatctgctggtgaagaattgcctcctgcccctgagagagtacttcaagtatttcagccagaatagtctgcccctgggaggcagcggcggcggcatgttcccccccgccaggggcaaggagctgctgagcttcgaggacgtggccatgtacttcaccagggaggagtggggccacctgagctggggccagaaggacctgtacagggacgtgatgctggagaactacaggaacatggtgctgctgggcttccagttccccaagcccgaggtgatctgccagctggagaactgggacgagcagtggatcctggacctgcccagggccggcaacaggaagggcggcccaagcagcggcgcccctcctcccagcggcggcagcccagccggctccccaacctctaccgaggagggcacctctgagtccgccacccccgagagcggccctggcacctccaccgagcccagcgagggcagcgcacccggcagccctgccggcagccccacctccacagaggagggaaccagcaccgagcccagcgaaggcagcgccccaggcaccagcaccgagcctagtgagcaggagattaaacggatcaacaagatcagaagaagacttgtgaaagacagcaacaccaagaaggccggcaagacaggccccatgaaaaccctgctggttagagtgatgacacccgatctgagagagcggctggaaaacctgagaaagaagcctgaaaatatcccccagcccatcagcaatacatctagagccaacctgaataagctgctgaccgattacaccgaaatgaagaaggcgatcctgcatgtgtactgggaagagttccagaaggaccctgtgggcctgatgagccgggtggcccagcctgccagcaagaagatcgatcagaacaagctgaaacctgagatggacgagaagggcaacctgaccaccgccggctttgcctgctctcagtgtggccagcccctgttcgtgtacaagctggagcaggtgtctgagaagggcaaggcttacaccaactacttcggacggtgcaatgtggccgagcacgaaaagctgatcctgctggcccagctgaagcccgagaaggatagcgacgaagccgtgacatatagcctgggaaagtttgggcagagggccctggatttctacagcattcatgtgaccaaggagtccacccaccccgtgaagcccctggcccagatcgccggaaacagatacgcctccggacctgtgggaaaggccctgagcgacgcatgtatgggcacaatcgcctccttcctgtctaagtaccaggacatcatcatcgaacaccagaaggtggtgaagggcaaccagaagagactggagagcctgcgggagctggccggcaaggaaaacctggaataccctagcgtgaccctgccacctcagcctcacaccaaggagggcgttgatgcctacaacgaagtgatcgcccgggtgcgaatgtgggtgaacctgaacctgtggcagaagctgaagctaagcagagatgatgccaagcctctgctgagactgaagggattcccttcctttcctctggtcgagagacaggccaacgaagtggactggtgggacatggtgtgtaacgtgaagaagctgatcaacgagaaaaaggaggatggcaaggtgttttggcagaatctggctggctacaagagacaggaagccctgagaccatacctgagcagcgaggaagatcggaagaagggaaagaaattcgctcggtaccagctgggcgacctgctgctgcacctggaaaagaagcacggcgaggactggggaaaggtgtacgacgaggcctgggagcggattgacaagaaagtggaaggcctgagcaagcacatcaagctggaagaggaacggagaagcgaggacgcccagagcaaggccgccctgaccgactggctgcgggctaaggccagcttcgtgatcgagggcctgaaggaggccgacaaggacgagttctgcagatgcgagctgaagctgcagaagtggtacggggacctgcggggaaagcccttcgccatcgaagccgagaacagcatcctggacatcagcggcttcagcaagcagtacaactgtgccttcatctggcagaaggacggcgtgaagaagctgaacctgtacctgatcatcaactacttcaagggcggcaagctgcggttcaagaagatcaaacctgaagccttcgaagccaacagattctacaccgtgatcaacaaaaagagcggcgagatcgtgcccatggaggtgaacttcaacttcgacgaccccaacctgatcatcctgcctctggcctttggcaagagacagggcagagaattcatctggaacgacctgctgtccctggaaaccggcagcctgaagctggccaacggaagagtgatcgagaagacactgtacaacagaagaacccggcaggatgagcctgccctgttcgtggccctgaccttcgagcggcgggaggtcctggactcctccaatatcaaaccaatgaacctgatcggcgtggcaagaggcgaaaacatccccgccgtgatcgccctgaccgaccccgagggctgcccactgagccggtttaaggatagcctgggaaacccaacccacatcctgagaatcggcgagagctataaggagaagcagcggaccatccaggccaagaaggaggtggagcagcggagagccggcggctacagccggaagtacgccagcaaagccaagaatctggcagacgatatggtgagaaacaccgctagagatctgctgtactacgccgtgacccaggatgccatgctgatcttcgccaacctgagccggggcttcggccggcagggcaagcggaccttcatggccgagagacagtacacacggatggaggactggctgaccgccaagctggcctacgagggcctgagcaagacctacctgtccaagacactggcccagtacacctccaagacatgcagcaactgtgggtttaccatcaccagcgccgactacgacagggtgctggagaagctgaagaagacagcaacaggctggatgaccacaattaacggcaaggagctgaaggtggagggccagattacctactacaacagatacaagagacagaacgtagtcaaggacctgtccgtcgagctggatagactgagcgaagaatctgtgaacaacgacatctcctcctggacaaagggcagaagcggagaagctctgagcctcctgaagaaaagattctcccatagacccgtgcaggagaagttcgtgtgcctgaactgcggcttcgagacacacgcagccgagcaagccgccctgaacatcgccagatcctggctgttcctgcggagccaggagtacaagaaataccagacaaacaagacaaccggcaacaccgataagagagccttcgtcgagacctggcagtccttttaccggaagaagcttaaggaggtgtggaaacctgccgtgcggtctggcggatctggcggaggctccaccagccccaagaaaaagagaaaagtctaagctgccttctgcggggcttgccttctggccatgcccttcttctctcccttgcacctgtacctcttggtctttgaataaagcctgagtaggaaggctagcaaaaaaaaaaaaaaaaaaaaaaaaaaaaaaaaaaaaaaaaaaaaaaaaaaaaaaaaaaaaaaaaaaaaaaaaaaaaaaaa

SEQ ID NO: 12911 - RNA, 5785 nt, synthetic construct
  source 1..5785: mol_type = other RNA
aggaaataagagagaaaagaagagtaagaagaaatataagagccaccatggcccctaagaagaagcgtaaagtgagccggatggaacgcctcgtctacgaggtgcggcagaagtgcagaaacatcgaggacatctgcatctcctgcggatctctgaacgtgaccctggagcacccactgttcatcggcggcatgtgccagaactgtaaaaactgttttctggagtgtgcctatcaatacgacgatgacggctaccagagctactgcaccatctgttgcggcggaagagaggtgctgatgtgtggaaataacaactgctgccggtgcttctgcgtggaatgcgtggacctgctggtgggccccggcgccgcccaggccgctattaaggaagatccttggaactgctacatgtgcggccacaagggcacatacggcctgctgagacggagagaggactggcctagcagactgcagatgttcttcgccaataaccacgaccaggagttcgacccccctaaggtgtaccctcccgtccccgccgagaagagaaagcccatccgggtcctgagcctgttcgatggcatcgccaccggtctgctggtgctgaaggacctgggcatccaggtggataggtacattgcctccgaggtgtgcgaggactccatcaccgtgggaatggtgcgtcatcagggcaagatcatgtacgtgggcgacgtgcggagcgtgacacagaagcatatccaggagtggggccctttcgacctggtgatcggcggcagcccttgcaatgacctgagcatcgtgaacccagcccggaagggcctgtacgagggaaccggcagactgttcttcgagttttacagactgctgcacgacgcccggcctaaggaaggcgacgaccggcccttcttttggctgttcgagaatgtggtggccatgggagtcagcgacaagcgggatattagccggttcctggagagcaaccccgtgatgatcgatgccaaggaagtgagcgccgcccaccgggccagatacttctggggcaatctgcctggcatgaacagacccctggccagcaccgtgaacgacaagctggagctgcaggagtgcctggagcacggccggatcgccaagttcagcaaggtgagaaccatcaccacccgaagcaacagcatcaaacaaggcaaggaccagcactttcctgtgttcatgaacgagaaggaggacatcctgtggtgtaccgagatggagagagtgttcgggttcccagtccactacacagatgtcagcaacatgtctagactggccagacagagactgctgggaagaagctggtccgtccctgtgatcagacacctgttcgcccctctgaaggagtacttcgcctgcgtgagcagcggcaacagcaacgccaacagccggggccccagcttctctagcggcctggtgccactgtccctgagagggagccacatgggccccatggagatctacaaaaccgtgagcgcctggaagcggcagcctgtgcgcgtgctgagcctgtttcggaatatcgataaagtcctgaaaagcctgggattcctggagagcggctctggctccggcggtggcaccctgaagtacgtggaggatgtgacaaacgtggtcagacgggatgtggagaagtggggccccttcgatctggtgtacggcagcacccaacccctgggcagctcttgtgaccggtgccctggctggtacatgtttcagttccaccggatcctgcagtacgccctgccgagacaggagtcccagcggccattcttttggattttcatggacaacttgctgctgaccgaggatgaccaggaaactaccactcggttcctgcagaccgaagccgtgaccctgcaggacgtgagaggccgggactaccagaacgccatgcgggtgtggtccaacatccctggactgaaaagcaagcacgcacctctgacccctaaagaagaggagtacctgcaggcccaggtgcggagcagaagcaagctggacgcccctaaggtggatctgctggtgaagaattgcctcctgcccctgagagagtacttcaagtatttcagccagaatagtctgcccctgggaggcagcggcggcggcatgaacgtggaggtggtgaaggtgatgccccaggacctggtgaccttcaaggacgtggccatcgacttcagccaggaggagtggcagtggatgaaccccgcccagaagcacctgtacaggagcatgatgctggagaactaccagagcctggtgagcctgggcctgtgcatcagcaagccctgcgtgatcagcctgctggagcagggcagggagccctgggagatgaccagcgagatgaccaggggcggcccaagcagcggcgcccctcctcccagcggcggcagcccagccggctccccaacctctaccgaggagggcacctctgagtccgccacccccgagagcggccctggcacctccaccgagcccagcgagggcagcgcacccggcagccctgccggcagccccacctccacagaggagggaaccagcaccgagcccagcgaaggcagcgccccaggcaccagcaccgagcctagtgagcaggagattaaacggatcaacaagatcagaagaagacttgtgaaagacagcaacaccaagaaggccggcaagacaggccccatgaaaaccctgctggttagagtgatgacacccgatctgagagagcggctggaaaacctgagaaagaagcctgaaaatatcccccagcccatcagcaatacatctagagccaacctgaataagctgctgaccgattacaccgaaatgaagaaggcgatcctgcatgtgtactgggaagagttccagaaggaccctgtgggcctgatgagccgggtggcccagcctgccagcaagaagatcgatcagaacaagctgaaacctgagatggacgagaagggcaacctgaccaccgccggctttgcctgctctcagtgtggccagcccctgttcgtgtacaagctggagcaggtgtctgagaagggcaaggcttacaccaactacttcggacggtgcaatgtggccgagcacgaaaagctgatcctgctggcccagctgaagcccgagaaggatagcgacgaagccgtgacatatagcctgggaaagtttgggcagagggccctggatttctacagcattcatgtgaccaaggagtccacccaccccgtgaagcccctggcccagatcgccggaaacagatacgcctccggacctgtgggaaaggccctgagcgacgcatgtatgggcacaatcgcctccttcctgtctaagtaccaggacatcatcatcgaacaccagaaggtggtgaagggcaaccagaagagactggagagcctgcgggagctggccggcaaggaaaacctggaataccctagcgtgaccctgccacctcagcctcacaccaaggagggcgttgatgcctacaacgaagtgatcgcccgggtgcgaatgtgggtgaacctgaacctgtggcagaagctgaagctaagcagagatgatgccaagcctctgctgagactgaagggattcccttcctttcctctggtcgagagacaggccaacgaagtggactggtgggacatggtgtgtaacgtgaagaagctgatcaacgagaaaaaggaggatggcaaggtgttttggcagaatctggctggctacaagagacaggaagccctgagaccatacctgagcagcgaggaagatcggaagaagggaaagaaattcgctcggtaccagctgggcgacctgctgctgcacctggaaaagaagcacggcgaggactggggaaaggtgtacgacgaggcctgggagcggattgacaagaaagtggaaggcctgagcaagcacatcaagctggaagaggaacggagaagcgaggacgcccagagcaaggccgccctgaccgactggctgcgggctaaggccagcttcgtgatcgagggcctgaaggaggccgacaaggacgagttctgcagatgcgagctgaagctgcagaagtggtacggggacctgcggggaaagcccttcgccatcgaagccgagaacagcatcctggacatcagcggcttcagcaagcagtacaactgtgccttcatctggcagaaggacggcgtgaagaagctgaacctgtacctgatcatcaactacttcaagggcggcaagctgcggttcaagaagatcaaacctgaagccttcgaagccaacagattctacaccgtgatcaacaaaaagagcggcgagatcgtgcccatggaggtgaacttcaacttcgacgaccccaacctgatcatcctgcctctggcctttggcaagagacagggcagagaattcatctggaacgacctgctgtccctggaaaccggcagcctgaagctggccaacggaagagtgatcgagaagacactgtacaacagaagaacccggcaggatgagcctgccctgttcgtggccctgaccttcgagcggcgggaggtcctggactcctccaatatcaaaccaatgaacctgatcggcgtggcaagaggcgaaaacatccccgccgtgatcgccctgaccgaccccgagggctgcccactgagccggtttaaggatagcctgggaaacccaacccacatcctgagaatcggcgagagctataaggagaagcagcggaccatccaggccaagaaggaggtggagcagcggagagccggcggctacagccggaagtacgccagcaaagccaagaatctggcagacgatatggtgagaaacaccgctagagatctgctgtactacgccgtgacccaggatgccatgctgatcttcgccaacctgagccggggcttcggccggcagggcaagcggaccttcatggccgagagacagtacacacggatggaggactggctgaccgccaagctggcctacgagggcctgagcaagacctacctgtccaagacactggcccagtacacctccaagacatgcagcaactgtgggtttaccatcaccagcgccgactacgacagggtgctggagaagctgaagaagacagcaacaggctggatgaccacaattaacggcaaggagctgaaggtggagggccagattacctactacaacagatacaagagacagaacgtagtcaaggacctgtccgtcgagctggatagactgagcgaagaatctgtgaacaacgacatctcctcctggacaaagggcagaagcggagaagctctgagcctcctgaagaaaagattctcccatagacccgtgcaggagaagttcgtgtgcctgaactgcggcttcgagacacacgcagccgagcaagccgccctgaacatcgccagatcctggctgttcctgcggagccaggagtacaagaaataccagacaaacaagacaaccggcaacaccgataagagagccttcgtcgagacctggcagtccttttaccggaagaagcttaaggaggtgtggaaacctgccgtgcggtctggcggatctggcggaggctccaccagccccaagaaaaagagaaaagtctaagctgccttctgcggggcttgccttctggccatgcccttcttctctcccttgcacctgtacctcttggtctttgaataaagcctgagtaggaaggctagcaaaaaaaaaaaaaaaaaaaaaaaaaaaaaaaaaaaaaaaaaaaaaaaaaaaaaaaaaaaaaaaaaaaaaaaaaaaaaaaa

SEQ ID NO: 12912 - RNA, 5785 nt, synthetic construct
  source 1..5785: mol_type = other RNA
aggaaataagagagaaaagaagagtaagaagaaatataagagccaccatggcccctaagaagaagcgtaaagtgagccggatggaacgcctcgtctacgaggtgcggcagaagtgcagaaacatcgaggacatctgcatctcctgcggatctctgaacgtgaccctggagcacccactgttcatcggcggcatgtgccagaactgtaaaaactgttttctggagtgtgcctatcaatacgacgatgacggctaccagagctactgcaccatctgttgcggcggaagagaggtgctgatgtgtggaaataacaactgctgccggtgcttctgcgtggaatgcgtggacctgctggtgggccccggcgccgcccaggccgctattaaggaagatccttggaactgctacatgtgcggccacaagggcacatacggcctgctgagacggagagaggactggcctagcagactgcagatgttcttcgccaataaccacgaccaggagttcgacccccctaaggtgtaccctcccgtccccgccgagaagagaaagcccatccgggtcctgagcctgttcgatggcatcgccaccggtctgctggtgctgaaggacctgggcatccaggtggataggtacattgcctccgaggtgtgcgaggactccatcaccgtgggaatggtgcgtcatcagggcaagatcatgtacgtgggcgacgtgcggagcgtgacacagaagcatatccaggagtggggccctttcgacctggtgatcggcggcagcccttgcaatgacctgagcatcgtgaacccagcccggaagggcctgtacgagggaaccggcagactgttcttcgagttttacagactgctgcacgacgcccggcctaaggaaggcgacgaccggcccttcttttggctgttcgagaatgtggtggccatgggagtcagcgacaagcgggatattagccggttcctggagagcaaccccgtgatgatcgatgccaaggaagtgagcgccgcccaccgggccagatacttctggggcaatctgcctggcatgaacagacccctggccagcaccgtgaacgacaagctggagctgcaggagtgcctggagcacggccggatcgccaagttcagcaaggtgagaaccatcaccacccgaagcaacagcatcaaacaaggcaaggaccagcactttcctgtgttcatgaacgagaaggaggacatcctgtggtgtaccgagatggagagagtgttcgggttcccagtccactacacagatgtcagcaacatgtctagactggccagacagagactgctgggaagaagctggtccgtccctgtgatcagacacctgttcgcccctctgaaggagtacttcgcctgcgtgagcagcggcaacagcaacgccaacagccggggccccagcttctctagcggcctggtgccactgtccctgagagggagccacatgggccccatggagatctacaaaaccgtgagcgcctggaagcggcagcctgtgcgcgtgctgagcctgtttcggaatatcgataaagtcctgaaaagcctgggattcctggagagcggctctggctccggcggtggcaccctgaagtacgtggaggatgtgacaaacgtggtcagacgggatgtggagaagtggggccccttcgatctggtgtacggcagcacccaacccctgggcagctcttgtgaccggtgccctggctggtacatgtttcagttccaccggatcctgcagtacgccctgccgagacaggagtcccagcggccattcttttggattttcatggacaacttgctgctgaccgaggatgaccaggaaactaccactcggttcctgcagaccgaagccgtgaccctgcaggacgtgagaggccgggactaccagaacgccatgcgggtgtggtccaacatccctggactgaaaagcaagcacgcacctctgacccctaaagaagaggagtacctgcaggcccaggtgcggagcagaagcaagctggacgcccctaaggtggatctgctggtgaagaattgcctcctgcccctgagagagtacttcaagtatttcagccagaatagtctgcccctgggaggcagcggcggcggcaagcccgccgccgtgaggttcgccgacgtggccgtgtacttcagccccgaggagtggggctgcctgaggcccgcccagaggaccctgtacagggacgtgatgagggagacctacggccacctgggcgccctgggcttccccggccccaagcccgccctgatcagctggatggagcaggagagcgaggtgtggagccccgccgcccaggaccccgaggagggcgagagcctgggcggcgccaggggcggcccaagcagcggcgcccctcctcccagcggcggcagcccagccggctccccaacctctaccgaggagggcacctctgagtccgccacccccgagagcggccctggcacctccaccgagcccagcgagggcagcgcacccggcagccctgccggcagccccacctccacagaggagggaaccagcaccgagcccagcgaaggcagcgccccaggcaccagcaccgagcctagtgagcaggagattaaacggatcaacaagatcagaagaagacttgtgaaagacagcaacaccaagaaggccggcaagacaggccccatgaaaaccctgctggttagagtgatgacacccgatctgagagagcggctggaaaacctgagaaagaagcctgaaaatatcccccagcccatcagcaatacatctagagccaacctgaataagctgctgaccgattacaccgaaatgaagaaggcgatcctgcatgtgtactgggaagagttccagaaggaccctgtgggcctgatgagccgggtggcccagcctgccagcaagaagatcgatcagaacaagctgaaacctgagatggacgagaagggcaacctgaccaccgccggctttgcctgctctcagtgtggccagcccctgttcgtgtacaagctggagcaggtgtctgagaagggcaaggcttacaccaactacttcggacggtgcaatgtggccgagcacgaaaagctgatcctgctggcccagctgaagcccgagaaggatagcgacgaagccgtgacatatagcctgggaaagtttgggcagagggccctggatttctacagcattcatgtgaccaaggagtccacccaccccgtgaagcccctggcccagatcgccggaaacagatacgcctccggacctgtgggaaaggccctgagcgacgcatgtatgggcacaatcgcctccttcctgtctaagtaccaggacatcatcatcgaacaccagaaggtggtgaagggcaaccagaagagactggagagcctgcgggagctggccggcaaggaaaacctggaataccctagcgtgaccctgccacctcagcctcacaccaaggagggcgttgatgcctacaacgaagtgatcgcccgggtgcgaatgtgggtgaacctgaacctgtggcagaagctgaagctaagcagagatgatgccaagcctctgctgagactgaagggattcccttcctttcctctggtcgagagacaggccaacgaagtggactggtgggacatggtgtgtaacgtgaagaagctgatcaacgagaaaaaggaggatggcaaggtgttttggcagaatctggctggctacaagagacaggaagccctgagaccatacctgagcagcgaggaagatcggaagaagggaaagaaattcgctcggtaccagctgggcgacctgctgctgcacctggaaaagaagcacggcgaggactggggaaaggtgtacgacgaggcctgggagcggattgacaagaaagtggaaggcctgagcaagcacatcaagctggaagaggaacggagaagcgaggacgcccagagcaaggccgccctgaccgactggctgcgggctaaggccagcttcgtgatcgagggcctgaaggaggccgacaaggacgagttctgcagatgcgagctgaagctgcagaagtggtacggggacctgcggggaaagcccttcgccatcgaagccgagaacagcatcctggacatcagcggcttcagcaagcagtacaactgtgccttcatctggcagaaggacggcgtgaagaagctgaacctgtacctgatcatcaactacttcaagggcggcaagctgcggttcaagaagatcaaacctgaagccttcgaagccaacagattctacaccgtgatcaacaaaaagagcggcgagatcgtgcccatggaggtgaacttcaacttcgacgaccccaacctgatcatcctgcctctggcctttggcaagagacagggcagagaattcatctggaacgacctgctgtccctggaaaccggcagcctgaagctggccaacggaagagtgatcgagaagacactgtacaacagaagaacccggcaggatgagcctgccctgttcgtggccctgaccttcgagcggcgggaggtcctggactcctccaatatcaaaccaatgaacctgatcggcgtggcaagaggcgaaaacatccccgccgtgatcgccctgaccgaccccgagggctgcccactgagccggtttaaggatagcctgggaaacccaacccacatcctgagaatcggcgagagctataaggagaagcagcggaccatccaggccaagaaggaggtggagcagcggagagccggcggctacagccggaagtacgccagcaaagccaagaatctggcagacgatatggtgagaaacaccgctagagatctgctgtactacgccgtgacccaggatgccatgctgatcttcgccaacctgagccggggcttcggccggcagggcaagcggaccttcatggccgagagacagtacacacggatggaggactggctgaccgccaagctggcctacgagggcctgagcaagacctacctgtccaagacactggcccagtacacctccaagacatgcagcaactgtgggtttaccatcaccagcgccgactacgacagggtgctggagaagctgaagaagacagcaacaggctggatgaccacaattaacggcaaggagctgaaggtggagggccagattacctactacaacagatacaagagacagaacgtagtcaaggacctgtccgtcgagctggatagactgagcgaagaatctgtgaacaacgacatctcctcctggacaaagggcagaagcggagaagctctgagcctcctgaagaaaagattctcccatagacccgtgcaggagaagttcgtgtgcctgaactgcggcttcgagacacacgcagccgagcaagccgccctgaacatcgccagatcctggctgttcctgcggagccaggagtacaagaaataccagacaaacaagacaaccggcaacaccgataagagagccttcgtcgagacctggcagtccttttaccggaagaagcttaaggaggtgtggaaacctgccgtgcggtctggcggatctggcggaggctccaccagccccaagaaaaagagaaaagtctaagctgccttctgcggggcttgccttctggccatgcccttcttctctcccttgcacctgtacctcttggtctttgaataaagcctgagtaggaaggctagcaaaaaaaaaaaaaaaaaaaaaaaaaaaaaaaaaaaaaaaaaaaaaaaaaaaaaaaaaaaaaaaaaaaaaaaaaaaaaaaa

SEQ ID NO: 12913 - RNA, 5785 nt, synthetic construct
  source 1..5785: mol_type = other RNA
aggaaataagagagaaaagaagagtaagaagaaatataagagccaccatggcccctaagaagaagcgtaaagtgagccggatggaacgcctcgtctacgaggtgcggcagaagtgcagaaacatcgaggacatctgcatctcctgcggatctctgaacgtgaccctggagcacccactgttcatcggcggcatgtgccagaactgtaaaaactgttttctggagtgtgcctatcaatacgacgatgacggctaccagagctactgcaccatctgttgcggcggaagagaggtgctgatgtgtggaaataacaactgctgccggtgcttctgcgtggaatgcgtggacctgctggtgggccccggcgccgcccaggccgctattaaggaagatccttggaactgctacatgtgcggccacaagggcacatacggcctgctgagacggagagaggactggcctagcagactgcagatgttcttcgccaataaccacgaccaggagttcgacccccctaaggtgtaccctcccgtccccgccgagaagagaaagcccatccgggtcctgagcctgttcgatggcatcgccaccggtctgctggtgctgaaggacctgggcatccaggtggataggtacattgcctccgaggtgtgcgaggactccatcaccgtgggaatggtgcgtcatcagggcaagatcatgtacgtgggcgacgtgcggagcgtgacacagaagcatatccaggagtggggccctttcgacctggtgatcggcggcagcccttgcaatgacctgagcatcgtgaacccagcccggaagggcctgtacgagggaaccggcagactgttcttcgagttttacagactgctgcacgacgcccggcctaaggaaggcgacgaccggcccttcttttggctgttcgagaatgtggtggccatgggagtcagcgacaagcgggatattagccggttcctggagagcaaccccgtgatgatcgatgccaaggaagtgagcgccgcccaccgggccagatacttctggggcaatctgcctggcatgaacagacccctggccagcaccgtgaacgacaagctggagctgcaggagtgcctggagcacggccggatcgccaagttcagcaaggtgagaaccatcaccacccgaagcaacagcatcaaacaaggcaaggaccagcactttcctgtgttcatgaacgagaaggaggacatcctgtggtgtaccgagatggagagagtgttcgggttcccagtccactacacagatgtcagcaacatgtctagactggccagacagagactgctgggaagaagctggtccgtccctgtgatcagacacctgttcgcccctctgaaggagtacttcgcctgcgtgagcagcggcaacagcaacgccaacagccggggccccagcttctctagcggcctggtgccactgtccctgagagggagccacatgggccccatggagatctacaaaaccgtgagcgcctggaagcggcagcctgtgcgcgtgctgagcctgtttcggaatatcgataaagtcctgaaaagcctgggattcctggagagcggctctggctccggcggtggcaccctgaagtacgtggaggatgtgacaaacgtggtcagacgggatgtggagaagtggggccccttcgatctggtgtacggcagcacccaacccctgggcagctcttgtgaccggtgccctggctggtacatgtttcagttccaccggatcctgcagtacgccctgccgagacaggagtcccagcggccattcttttggattttcatggacaacttgctgctgaccgaggatgaccaggaaactaccactcggttcctgcagaccgaagccgtgaccctgcaggacgtgagaggccgggactaccagaacgccatgcgggtgtggtccaacatccctggactgaaaagcaagcacgcacctctgacccctaaagaagaggagtacctgcaggcccaggtgcggagcagaagcaagctggacgcccctaaggtggatctgctggtgaagaattgcctcctgcccctgagagagtacttcaagtatttcagccagaatagtctgcccctgggaggcagcggcggcggcatgggcctggtgagcttcaaggacgtggccgtggacttcacccaggaggagtggcagcagctggaccccagccagaggaccctgtacagggacgtgatgctggagaactacagccacctggtgagcatgggctaccccgtgagcaagcccgacgtgatcagcaagctggagcagggcgaggagccctggatcatcaagggcgacatcagcaactggatctaccccgacgagtaccaggccgacggcggcccaagcagcggcgcccctcctcccagcggcggcagcccagccggctccccaacctctaccgaggagggcacctctgagtccgccacccccgagagcggccctggcacctccaccgagcccagcgagggcagcgcacccggcagccctgccggcagccccacctccacagaggagggaaccagcaccgagcccagcgaaggcagcgccccaggcaccagcaccgagcctagtgagcaggagattaaacggatcaacaagatcagaagaagacttgtgaaagacagcaacaccaagaaggccggcaagacaggccccatgaaaaccctgctggttagagtgatgacacccgatctgagagagcggctggaaaacctgagaaagaagcctgaaaatatcccccagcccatcagcaatacatctagagccaacctgaataagctgctgaccgattacaccgaaatgaagaaggcgatcctgcatgtgtactgggaagagttccagaaggaccctgtgggcctgatgagccgggtggcccagcctgccagcaagaagatcgatcagaacaagctgaaacctgagatggacgagaagggcaacctgaccaccgccggctttgcctgctctcagtgtggccagcccctgttcgtgtacaagctggagcaggtgtctgagaagggcaaggcttacaccaactacttcggacggtgcaatgtggccgagcacgaaaagctgatcctgctggcccagctgaagcccgagaaggatagcgacgaagccgtgacatatagcctgggaaagtttgggcagagggccctggatttctacagcattcatgtgaccaaggagtccacccaccccgtgaagcccctggcccagatcgccggaaacagatacgcctccggacctgtgggaaaggccctgagcgacgcatgtatgggcacaatcgcctccttcctgtctaagtaccaggacatcatcatcgaacaccagaaggtggtgaagggcaaccagaagagactggagagcctgcgggagctggccggcaaggaaaacctggaataccctagcgtgaccctgccacctcagcctcacaccaaggagggcgttgatgcctacaacgaagtgatcgcccgggtgcgaatgtgggtgaacctgaacctgtggcagaagctgaagctaagcagagatgatgccaagcctctgctgagactgaagggattcccttcctttcctctggtcgagagacaggccaacgaagtggactggtgggacatggtgtgtaacgtgaagaagctgatcaacgagaaaaaggaggatggcaaggtgttttggcagaatctggctggctacaagagacaggaagccctgagaccatacctgagcagcgaggaagatcggaagaagggaaagaaattcgctcggtaccagctgggcgacctgctgctgcacctggaaaagaagcacggcgaggactggggaaaggtgtacgacgaggcctgggagcggattgacaagaaagtggaaggcctgagcaagcacatcaagctggaagaggaacggagaagcgaggacgcccagagcaaggccgccctgaccgactggctgcgggctaaggccagcttcgtgatcgagggcctgaaggaggccgacaaggacgagttctgcagatgcgagctgaagctgcagaagtggtacggggacctgcggggaaagcccttcgccatcgaagccgagaacagcatcctggacatcagcggcttcagcaagcagtacaactgtgccttcatctggcagaaggacggcgtgaagaagctgaacctgtacctgatcatcaactacttcaagggcggcaagctgcggttcaagaagatcaaacctgaagccttcgaagccaacagattctacaccgtgatcaacaaaaagagcggcgagatcgtgcccatggaggtgaacttcaacttcgacgaccccaacctgatcatcctgcctctggcctttggcaagagacagggcagagaattcatctggaacgacctgctgtccctggaaaccggcagcctgaagctggccaacggaagagtgatcgagaagacactgtacaacagaagaacccggcaggatgagcctgccctgttcgtggccctgaccttcgagcggcgggaggtcctggactcctccaatatcaaaccaatgaacctgatcggcgtggcaagaggcgaaaacatccccgccgtgatcgccctgaccgaccccgagggctgcccactgagccggtttaaggatagcctgggaaacccaacccacatcctgagaatcggcgagagctataaggagaagcagcggaccatccaggccaagaaggaggtggagcagcggagagccggcggctacagccggaagtacgccagcaaagccaagaatctggcagacgatatggtgagaaacaccgctagagatctgctgtactacgccgtgacccaggatgccatgctgatcttcgccaacctgagccggggcttcggccggcagggcaagcggaccttcatggccgagagacagtacacacggatggaggactggctgaccgccaagctggcctacgagggcctgagcaagacctacctgtccaagacactggcccagtacacctccaagacatgcagcaactgtgggtttaccatcaccagcgccgactacgacagggtgctggagaagctgaagaagacagcaacaggctggatgaccacaattaacggcaaggagctgaaggtggagggccagattacctactacaacagatacaagagacagaacgtagtcaaggacctgtccgtcgagctggatagactgagcgaagaatctgtgaacaacgacatctcctcctggacaaagggcagaagcggagaagctctgagcctcctgaagaaaagattctcccatagacccgtgcaggagaagttcgtgtgcctgaactgcggcttcgagacacacgcagccgagcaagccgccctgaacatcgccagatcctggctgttcctgcggagccaggagtacaagaaataccagacaaacaagacaaccggcaacaccgataagagagccttcgtcgagacctggcagtccttttaccggaagaagcttaaggaggtgtggaaacctgccgtgcggtctggcggatctggcggaggctccaccagccccaagaaaaagagaaaagtctaagctgccttctgcggggcttgccttctggccatgcccttcttctctcccttgcacctgtacctcttggtctttgaataaagcctgagtaggaaggctagcaaaaaaaaaaaaaaaaaaaaaaaaaaaaaaaaaaaaaaaaaaaaaaaaaaaaaaaaaaaaaaaaaaaaaaaaaaaaaaaa

SEQ ID NO: 12914 - RNA, 5785 nt, synthetic construct
  source 1..5785: mol_type = other RNA
aggaaataagagagaaaagaagagtaagaagaaatataagagccaccatggcccctaagaagaagcgtaaagtgagccggatggaacgcctcgtctacgaggtgcggcagaagtgcagaaacatcgaggacatctgcatctcctgcggatctctgaacgtgaccctggagcacccactgttcatcggcggcatgtgccagaactgtaaaaactgttttctggagtgtgcctatcaatacgacgatgacggctaccagagctactgcaccatctgttgcggcggaagagaggtgctgatgtgtggaaataacaactgctgccggtgcttctgcgtggaatgcgtggacctgctggtgggccccggcgccgcccaggccgctattaaggaagatccttggaactgctacatgtgcggccacaagggcacatacggcctgctgagacggagagaggactggcctagcagactgcagatgttcttcgccaataaccacgaccaggagttcgacccccctaaggtgtaccctcccgtccccgccgagaagagaaagcccatccgggtcctgagcctgttcgatggcatcgccaccggtctgctggtgctgaaggacctgggcatccaggtggataggtacattgcctccgaggtgtgcgaggactccatcaccgtgggaatggtgcgtcatcagggcaagatcatgtacgtgggcgacgtgcggagcgtgacacagaagcatatccaggagtggggccctttcgacctggtgatcggcggcagcccttgcaatgacctgagcatcgtgaacccagcccggaagggcctgtacgagggaaccggcagactgttcttcgagttttacagactgctgcacgacgcccggcctaaggaaggcgacgaccggcccttcttttggctgttcgagaatgtggtggccatgggagtcagcgacaagcgggatattagccggttcctggagagcaaccccgtgatgatcgatgccaaggaagtgagcgccgcccaccgggccagatacttctggggcaatctgcctggcatgaacagacccctggccagcaccgtgaacgacaagctggagctgcaggagtgcctggagcacggccggatcgccaagttcagcaaggtgagaaccatcaccacccgaagcaacagcatcaaacaaggcaaggaccagcactttcctgtgttcatgaacgagaaggaggacatcctgtggtgtaccgagatggagagagtgttcgggttcccagtccactacacagatgtcagcaacatgtctagactggccagacagagactgctgggaagaagctggtccgtccctgtgatcagacacctgttcgcccctctgaaggagtacttcgcctgcgtgagcagcggcaacagcaacgccaacagccggggccccagcttctctagcggcctggtgccactgtccctgagagggagccacatgggccccatggagatctacaaaaccgtgagcgcctggaagcggcagcctgtgcgcgtgctgagcctgtttcggaatatcgataaagtcctgaaaagcctgggattcctggagagcggctctggctccggcggtggcaccctgaagtacgtggaggatgtgacaaacgtggtcagacgggatgtggagaagtggggccccttcgatctggtgtacggcagcacccaacccctgggcagctcttgtgaccggtgccctggctggtacatgtttcagttccaccggatcctgcagtacgccctgccgagacaggagtcccagcggccattcttttggattttcatggacaacttgctgctgaccgaggatgaccaggaaactaccactcggttcctgcagaccgaagccgtgaccctgcaggacgtgagaggccgggactaccagaacgccatgcgggtgtggtccaacatccctggactgaaaagcaagcacgcacctctgacccctaaagaagaggagtacctgcaggcccaggtgcggagcagaagcaagctggacgcccctaaggtggatctgctggtgaagaattgcctcctgcccctgagagagtacttcaagtatttcagccagaatagtctgcccctgggaggcagcggcggcggcctgcaggagcccgtgagcttcgccgaggtggccgtgtgcttcagcagggaggagtgggccctgctggaccccgcccagagggtgctgtacagggacgtgatgctggagacctaccagtgcgtggccagcctggccagcctgctgacccccaagcccgtgctgatcagcctgctggagggcggcgaggagccctggatccccgacgtgaggagccccgaggccacccccggcgacctgagccccggcggcccaagcagcggcgcccctcctcccagcggcggcagcccagccggctccccaacctctaccgaggagggcacctctgagtccgccacccccgagagcggccctggcacctccaccgagcccagcgagggcagcgcacccggcagccctgccggcagccccacctccacagaggagggaaccagcaccgagcccagcgaaggcagcgccccaggcaccagcaccgagcctagtgagcaggagattaaacggatcaacaagatcagaagaagacttgtgaaagacagcaacaccaagaaggccggcaagacaggccccatgaaaaccctgctggttagagtgatgacacccgatctgagagagcggctggaaaacctgagaaagaagcctgaaaatatcccccagcccatcagcaatacatctagagccaacctgaataagctgctgaccgattacaccgaaatgaagaaggcgatcctgcatgtgtactgggaagagttccagaaggaccctgtgggcctgatgagccgggtggcccagcctgccagcaagaagatcgatcagaacaagctgaaacctgagatggacgagaagggcaacctgaccaccgccggctttgcctgctctcagtgtggccagcccctgttcgtgtacaagctggagcaggtgtctgagaagggcaaggcttacaccaactacttcggacggtgcaatgtggccgagcacgaaaagctgatcctgctggcccagctgaagcccgagaaggatagcgacgaagccgtgacatatagcctgggaaagtttgggcagagggccctggatttctacagcattcatgtgaccaaggagtccacccaccccgtgaagcccctggcccagatcgccggaaacagatacgcctccggacctgtgggaaaggccctgagcgacgcatgtatgggcacaatcgcctccttcctgtctaagtaccaggacatcatcatcgaacaccagaaggtggtgaagggcaaccagaagagactggagagcctgcgggagctggccggcaaggaaaacctggaataccctagcgtgaccctgccacctcagcctcacaccaaggagggcgttgatgcctacaacgaagtgatcgcccgggtgcgaatgtgggtgaacctgaacctgtggcagaagctgaagctaagcagagatgatgccaagcctctgctgagactgaagggattcccttcctttcctctggtcgagagacaggccaacgaagtggactggtgggacatggtgtgtaacgtgaagaagctgatcaacgagaaaaaggaggatggcaaggtgttttggcagaatctggctggctacaagagacaggaagccctgagaccatacctgagcagcgaggaagatcggaagaagggaaagaaattcgctcggtaccagctgggcgacctgctgctgcacctggaaaagaagcacggcgaggactggggaaaggtgtacgacgaggcctgggagcggattgacaagaaagtggaaggcctgagcaagcacatcaagctggaagaggaacggagaagcgaggacgcccagagcaaggccgccctgaccgactggctgcgggctaaggccagcttcgtgatcgagggcctgaaggaggccgacaaggacgagttctgcagatgcgagctgaagctgcagaagtggtacggggacctgcggggaaagcccttcgccatcgaagccgagaacagcatcctggacatcagcggcttcagcaagcagtacaactgtgccttcatctggcagaaggacggcgtgaagaagctgaacctgtacctgatcatcaactacttcaagggcggcaagctgcggttcaagaagatcaaacctgaagccttcgaagccaacagattctacaccgtgatcaacaaaaagagcggcgagatcgtgcccatggaggtgaacttcaacttcgacgaccccaacctgatcatcctgcctctggcctttggcaagagacagggcagagaattcatctggaacgacctgctgtccctggaaaccggcagcctgaagctggccaacggaagagtgatcgagaagacactgtacaacagaagaacccggcaggatgagcctgccctgttcgtggccctgaccttcgagcggcgggaggtcctggactcctccaatatcaaaccaatgaacctgatcggcgtggcaagaggcgaaaacatccccgccgtgatcgccctgaccgaccccgagggctgcccactgagccggtttaaggatagcctgggaaacccaacccacatcctgagaatcggcgagagctataaggagaagcagcggaccatccaggccaagaaggaggtggagcagcggagagccggcggctacagccggaagtacgccagcaaagccaagaatctggcagacgatatggtgagaaacaccgctagagatctgctgtactacgccgtgacccaggatgccatgctgatcttcgccaacctgagccggggcttcggccggcagggcaagcggaccttcatggccgagagacagtacacacggatggaggactggctgaccgccaagctggcctacgagggcctgagcaagacctacctgtccaagacactggcccagtacacctccaagacatgcagcaactgtgggtttaccatcaccagcgccgactacgacagggtgctggagaagctgaagaagacagcaacaggctggatgaccacaattaacggcaaggagctgaaggtggagggccagattacctactacaacagatacaagagacagaacgtagtcaaggacctgtccgtcgagctggatagactgagcgaagaatctgtgaacaacgacatctcctcctggacaaagggcagaagcggagaagctctgagcctcctgaagaaaagattctcccatagacccgtgcaggagaagttcgtgtgcctgaactgcggcttcgagacacacgcagccgagcaagccgccctgaacatcgccagatcctggctgttcctgcggagccaggagtacaagaaataccagacaaacaagacaaccggcaacaccgataagagagccttcgtcgagacctggcagtccttttaccggaagaagcttaaggaggtgtggaaacctgccgtgcggtctggcggatctggcggaggctccaccagccccaagaaaaagagaaaagtctaagctgccttctgcggggcttgccttctggccatgcccttcttctctcccttgcacctgtacctcttggtctttgaataaagcctgagtaggaaggctagcaaaaaaaaaaaaaaaaaaaaaaaaaaaaaaaaaaaaaaaaaaaaaaaaaaaaaaaaaaaaaaaaaaaaaaaaaaaaaaaa

SEQ ID NO: 12915 - RNA, 5782 nt, synthetic construct
  source 1..5782: mol_type = other RNA
aggaaataagagagaaaagaagagtaagaagaaatataagagccaccatggcccctaagaagaagcgtaaagtgagccggatggaacgcctcgtctacgaggtgcggcagaagtgcagaaacatcgaggacatctgcatctcctgcggatctctgaacgtgaccctggagcacccactgttcatcggcggcatgtgccagaactgtaaaaactgttttctggagtgtgcctatcaatacgacgatgacggctaccagagctactgcaccatctgttgcggcggaagagaggtgctgatgtgtggaaataacaactgctgccggtgcttctgcgtggaatgcgtggacctgctggtgggccccggcgccgcccaggccgctattaaggaagatccttggaactgctacatgtgcggccacaagggcacatacggcctgctgagacggagagaggactggcctagcagactgcagatgttcttcgccaataaccacgaccaggagttcgacccccctaaggtgtaccctcccgtccccgccgagaagagaaagcccatccgggtcctgagcctgttcgatggcatcgccaccggtctgctggtgctgaaggacctgggcatccaggtggataggtacattgcctccgaggtgtgcgaggactccatcaccgtgggaatggtgcgtcatcagggcaagatcatgtacgtgggcgacgtgcggagcgtgacacagaagcatatccaggagtggggccctttcgacctggtgatcggcggcagcccttgcaatgacctgagcatcgtgaacccagcccggaagggcctgtacgagggaaccggcagactgttcttcgagttttacagactgctgcacgacgcccggcctaaggaaggcgacgaccggcccttcttttggctgttcgagaatgtggtggccatgggagtcagcgacaagcgggatattagccggttcctggagagcaaccccgtgatgatcgatgccaaggaagtgagcgccgcccaccgggccagatacttctggggcaatctgcctggcatgaacagacccctggccagcaccgtgaacgacaagctggagctgcaggagtgcctggagcacggccggatcgccaagttcagcaaggtgagaaccatcaccacccgaagcaacagcatcaaacaaggcaaggaccagcactttcctgtgttcatgaacgagaaggaggacatcctgtggtgtaccgagatggagagagtgttcgggttcccagtccactacacagatgtcagcaacatgtctagactggccagacagagactgctgggaagaagctggtccgtccctgtgatcagacacctgttcgcccctctgaaggagtacttcgcctgcgtgagcagcggcaacagcaacgccaacagccggggccccagcttctctagcggcctggtgccactgtccctgagagggagccacatgggccccatggagatctacaaaaccgtgagcgcctggaagcggcagcctgtgcgcgtgctgagcctgtttcggaatatcgataaagtcctgaaaagcctgggattcctggagagcggctctggctccggcggtggcaccctgaagtacgtggaggatgtgacaaacgtggtcagacgggatgtggagaagtggggccccttcgatctggtgtacggcagcacccaacccctgggcagctcttgtgaccggtgccctggctggtacatgtttcagttccaccggatcctgcagtacgccctgccgagacaggagtcccagcggccattcttttggattttcatggacaacttgctgctgaccgaggatgaccaggaaactaccactcggttcctgcagaccgaagccgtgaccctgcaggacgtgagaggccgggactaccagaacgccatgcgggtgtggtccaacatccctggactgaaaagcaagcacgcacctctgacccctaaagaagaggagtacctgcaggcccaggtgcggagcagaagcaagctggacgcccctaaggtggatctgctggtgaagaattgcctcctgcccctgagagagtacttcaagtatttcagccagaatagtctgcccctgggaggcagcggcggcggcgccctgagaagcgtgatgttcagcgacgtgagcatcgacttcagccccgaggagtgggagtacctggacctggagcagaaggacctgtacagagacgtgatgctggagaactacagcaacctggtgagcctgggctgcttcatcagcaagcccgacgtgatcagcagcctggagcagggcaaggagccctggaaggtggtgagaaagggcagaagacagtaccccgacctggagaccaagggcggcccaagcagcggcgcccctcctcccagcggcggcagcccagccggctccccaacctctaccgaggagggcacctctgagtccgccacccccgagagcggccctggcacctccaccgagcccagcgagggcagcgcacccggcagccctgccggcagccccacctccacagaggagggaaccagcaccgagcccagcgaaggcagcgccccaggcaccagcaccgagcctagtgagcaggagattaaacggatcaacaagatcagaagaagacttgtgaaagacagcaacaccaagaaggccggcaagacaggccccatgaaaaccctgctggttagagtgatgacacccgatctgagagagcggctggaaaacctgagaaagaagcctgaaaatatcccccagcccatcagcaatacatctagagccaacctgaataagctgctgaccgattacaccgaaatgaagaaggcgatcctgcatgtgtactgggaagagttccagaaggaccctgtgggcctgatgagccgggtggcccagcctgccagcaagaagatcgatcagaacaagctgaaacctgagatggacgagaagggcaacctgaccaccgccggctttgcctgctctcagtgtggccagcccctgttcgtgtacaagctggagcaggtgtctgagaagggcaaggcttacaccaactacttcggacggtgcaatgtggccgagcacgaaaagctgatcctgctggcccagctgaagcccgagaaggatagcgacgaagccgtgacatatagcctgggaaagtttgggcagagggccctggatttctacagcattcatgtgaccaaggagtccacccaccccgtgaagcccctggcccagatcgccggaaacagatacgcctccggacctgtgggaaaggccctgagcgacgcatgtatgggcacaatcgcctccttcctgtctaagtaccaggacatcatcatcgaacaccagaaggtggtgaagggcaaccagaagagactggagagcctgcgggagctggccggcaaggaaaacctggaataccctagcgtgaccctgccacctcagcctcacaccaaggagggcgttgatgcctacaacgaagtgatcgcccgggtgcgaatgtgggtgaacctgaacctgtggcagaagctgaagctaagcagagatgatgccaagcctctgctgagactgaagggattcccttcctttcctctggtcgagagacaggccaacgaagtggactggtgggacatggtgtgtaacgtgaagaagctgatcaacgagaaaaaggaggatggcaaggtgttttggcagaatctggctggctacaagagacaggaagccctgagaccatacctgagcagcgaggaagatcggaagaagggaaagaaattcgctcggtaccagctgggcgacctgctgctgcacctggaaaagaagcacggcgaggactggggaaaggtgtacgacgaggcctgggagcggattgacaagaaagtggaaggcctgagcaagcacatcaagctggaagaggaacggagaagcgaggacgcccagagcaaggccgccctgaccgactggctgcgggctaaggccagcttcgtgatcgagggcctgaaggaggccgacaaggacgagttctgcagatgcgagctgaagctgcagaagtggtacggggacctgcggggaaagcccttcgccatcgaagccgagaacagcatcctggacatcagcggcttcagcaagcagtacaactgtgccttcatctggcagaaggacggcgtgaagaagctgaacctgtacctgatcatcaactacttcaagggcggcaagctgcggttcaagaagatcaaacctgaagccttcgaagccaacagattctacaccgtgatcaacaaaaagagcggcgagatcgtgcccatggaggtgaacttcaacttcgacgaccccaacctgatcatcctgcctctggcctttggcaagagacagggcagagaattcatctggaacgacctgctgtccctggaaaccggcagcctgaagctggccaacggaagagtgatcgagaagacactgtacaacagaagaacccggcaggatgagcctgccctgttcgtggccctgaccttcgagcggcgggaggtcctggactcctccaatatcaaaccaatgaacctgatcggcgtggcaagaggcgaaaacatccccgccgtgatcgccctgaccgaccccgagggctgcccactgagccggtttaaggatagcctgggaaacccaacccacatcctgagaatcggcgagagctataaggagaagcagcggaccatccaggccaagaaggaggtggagcagcggagagccggcggctacagccggaagtacgccagcaaagccaagaatctggcagacgatatggtgagaaacaccgctagagatctgctgtactacgccgtgacccaggatgccatgctgatcttcgccaacctgagccggggcttcggccggcagggcaagcggaccttcatggccgagagacagtacacacggatggaggactggctgaccgccaagctggcctacgagggcctgagcaagacctacctgtccaagacactggcccagtacacctccaagacatgcagcaactgtgggtttaccatcaccagcgccgactacgacagggtgctggagaagctgaagaagacagcaacaggctggatgaccacaattaacggcaaggagctgaaggtggagggccagattacctactacaacagatacaagagacagaacgtagtcaaggacctgtccgtcgagctggatagactgagcgaagaatctgtgaacaacgacatctcctcctggacaaagggcagaagcggagaagctctgagcctcctgaagaaaagattctcccatagacccgtgcaggagaagttcgtgtgcctgaactgcggcttcgagacacacgcagccgagcaagccgccctgaacatcgccagatcctggctgttcctgcggagccaggagtacaagaaataccagacaaacaagacaaccggcaacaccgataagagagccttcgtcgagacctggcagtccttttaccggaagaagcttaaggaggtgtggaaacctgccgtgcggtctggcggatctggcggaggctccaccagccccaagaaaaagagaaaagtctaagctgccttctgcggggcttgccttctggccatgcccttcttctctcccttgcacctgtacctcttggtctttgaataaagcctgagtaggaaggctagcaaaaaaaaaaaaaaaaaaaaaaaaaaaaaaaaaaaaaaaaaaaaaaaaaaaaaaaaaaaaaaaaaaaaaaaaaaaaaaaa

SEQ ID NO: 12916 - RNA, 5785 nt, synthetic construct
  source 1..5785: mol_type = other RNA
aggaaataagagagaaaagaagagtaagaagaaatataagagccaccatggcccctaagaagaagcgtaaagtgagccggatggaacgcctcgtctacgaggtgcggcagaagtgcagaaacatcgaggacatctgcatctcctgcggatctctgaacgtgaccctggagcacccactgttcatcggcggcatgtgccagaactgtaaaaactgttttctggagtgtgcctatcaatacgacgatgacggctaccagagctactgcaccatctgttgcggcggaagagaggtgctgatgtgtggaaataacaactgctgccggtgcttctgcgtggaatgcgtggacctgctggtgggccccggcgccgcccaggccgctattaaggaagatccttggaactgctacatgtgcggccacaagggcacatacggcctgctgagacggagagaggactggcctagcagactgcagatgttcttcgccaataaccacgaccaggagttcgacccccctaaggtgtaccctcccgtccccgccgagaagagaaagcccatccgggtcctgagcctgttcgatggcatcgccaccggtctgctggtgctgaaggacctgggcatccaggtggataggtacattgcctccgaggtgtgcgaggactccatcaccgtgggaatggtgcgtcatcagggcaagatcatgtacgtgggcgacgtgcggagcgtgacacagaagcatatccaggagtggggccctttcgacctggtgatcggcggcagcccttgcaatgacctgagcatcgtgaacccagcccggaagggcctgtacgagggaaccggcagactgttcttcgagttttacagactgctgcacgacgcccggcctaaggaaggcgacgaccggcccttcttttggctgttcgagaatgtggtggccatgggagtcagcgacaagcgggatattagccggttcctggagagcaaccccgtgatgatcgatgccaaggaagtgagcgccgcccaccgggccagatacttctggggcaatctgcctggcatgaacagacccctggccagcaccgtgaacgacaagctggagctgcaggagtgcctggagcacggccggatcgccaagttcagcaaggtgagaaccatcaccacccgaagcaacagcatcaaacaaggcaaggaccagcactttcctgtgttcatgaacgagaaggaggacatcctgtggtgtaccgagatggagagagtgttcgggttcccagtccactacacagatgtcagcaacatgtctagactggccagacagagactgctgggaagaagctggtccgtccctgtgatcagacacctgttcgcccctctgaaggagtacttcgcctgcgtgagcagcggcaacagcaacgccaacagccggggccccagcttctctagcggcctggtgccactgtccctgagagggagccacatgggccccatggagatctacaaaaccgtgagcgcctggaagcggcagcctgtgcgcgtgctgagcctgtttcggaatatcgataaagtcctgaaaagcctgggattcctggagagcggctctggctccggcggtggcaccctgaagtacgtggaggatgtgacaaacgtggtcagacgggatgtggagaagtggggccccttcgatctggtgtacggcagcacccaacccctgggcagctcttgtgaccggtgccctggctggtacatgtttcagttccaccggatcctgcagtacgccctgccgagacaggagtcccagcggccattcttttggattttcatggacaacttgctgctgaccgaggatgaccaggaaactaccactcggttcctgcagaccgaagccgtgaccctgcaggacgtgagaggccgggactaccagaacgccatgcgggtgtggtccaacatccctggactgaaaagcaagcacgcacctctgacccctaaagaagaggagtacctgcaggcccaggtgcggagcagaagcaagctggacgcccctaaggtggatctgctggtgaagaattgcctcctgcccctgagagagtacttcaagtatttcagccagaatagtctgcccctgggaggcagcggcggcggccagctgaccttcgaggacgtggccctgagcttcagcaaggaggagtggcagatcatggaccccaaccagaagaccctgtacatcgacgtgatgcaggagatctacgagaccgtgaccagcctgggcctgaagctgaagaacgacaccggcaacgaccagcccgtgagcctgagcaccagcgagatccagcccagcggctgcaaggtgctgaggaaggccaggatgaaggtggcccagaccaccggcggcccaagcagcggcgcccctcctcccagcggcggcagcccagccggctccccaacctctaccgaggagggcacctctgagtccgccacccccgagagcggccctggcacctccaccgagcccagcgagggcagcgcacccggcagccctgccggcagccccacctccacagaggagggaaccagcaccgagcccagcgaaggcagcgccccaggcaccagcaccgagcctagtgagcaggagattaaacggatcaacaagatcagaagaagacttgtgaaagacagcaacaccaagaaggccggcaagacaggccccatgaaaaccctgctggttagagtgatgacacccgatctgagagagcggctggaaaacctgagaaagaagcctgaaaatatcccccagcccatcagcaatacatctagagccaacctgaataagctgctgaccgattacaccgaaatgaagaaggcgatcctgcatgtgtactgggaagagttccagaaggaccctgtgggcctgatgagccgggtggcccagcctgccagcaagaagatcgatcagaacaagctgaaacctgagatggacgagaagggcaacctgaccaccgccggctttgcctgctctcagtgtggccagcccctgttcgtgtacaagctggagcaggtgtctgagaagggcaaggcttacaccaactacttcggacggtgcaatgtggccgagcacgaaaagctgatcctgctggcccagctgaagcccgagaaggatagcgacgaagccgtgacatatagcctgggaaagtttgggcagagggccctggatttctacagcattcatgtgaccaaggagtccacccaccccgtgaagcccctggcccagatcgccggaaacagatacgcctccggacctgtgggaaaggccctgagcgacgcatgtatgggcacaatcgcctccttcctgtctaagtaccaggacatcatcatcgaacaccagaaggtggtgaagggcaaccagaagagactggagagcctgcgggagctggccggcaaggaaaacctggaataccctagcgtgaccctgccacctcagcctcacaccaaggagggcgttgatgcctacaacgaagtgatcgcccgggtgcgaatgtgggtgaacctgaacctgtggcagaagctgaagctaagcagagatgatgccaagcctctgctgagactgaagggattcccttcctttcctctggtcgagagacaggccaacgaagtggactggtgggacatggtgtgtaacgtgaagaagctgatcaacgagaaaaaggaggatggcaaggtgttttggcagaatctggctggctacaagagacaggaagccctgagaccatacctgagcagcgaggaagatcggaagaagggaaagaaattcgctcggtaccagctgggcgacctgctgctgcacctggaaaagaagcacggcgaggactggggaaaggtgtacgacgaggcctgggagcggattgacaagaaagtggaaggcctgagcaagcacatcaagctggaagaggaacggagaagcgaggacgcccagagcaaggccgccctgaccgactggctgcgggctaaggccagcttcgtgatcgagggcctgaaggaggccgacaaggacgagttctgcagatgcgagctgaagctgcagaagtggtacggggacctgcggggaaagcccttcgccatcgaagccgagaacagcatcctggacatcagcggcttcagcaagcagtacaactgtgccttcatctggcagaaggacggcgtgaagaagctgaacctgtacctgatcatcaactacttcaagggcggcaagctgcggttcaagaagatcaaacctgaagccttcgaagccaacagattctacaccgtgatcaacaaaaagagcggcgagatcgtgcccatggaggtgaacttcaacttcgacgaccccaacctgatcatcctgcctctggcctttggcaagagacagggcagagaattcatctggaacgacctgctgtccctggaaaccggcagcctgaagctggccaacggaagagtgatcgagaagacactgtacaacagaagaacccggcaggatgagcctgccctgttcgtggccctgaccttcgagcggcgggaggtcctggactcctccaatatcaaaccaatgaacctgatcggcgtggcaagaggcgaaaacatccccgccgtgatcgccctgaccgaccccgagggctgcccactgagccggtttaaggatagcctgggaaacccaacccacatcctgagaatcggcgagagctataaggagaagcagcggaccatccaggccaagaaggaggtggagcagcggagagccggcggctacagccggaagtacgccagcaaagccaagaatctggcagacgatatggtgagaaacaccgctagagatctgctgtactacgccgtgacccaggatgccatgctgatcttcgccaacctgagccggggcttcggccggcagggcaagcggaccttcatggccgagagacagtacacacggatggaggactggctgaccgccaagctggcctacgagggcctgagcaagacctacctgtccaagacactggcccagtacacctccaagacatgcagcaactgtgggtttaccatcaccagcgccgactacgacagggtgctggagaagctgaagaagacagcaacaggctggatgaccacaattaacggcaaggagctgaaggtggagggccagattacctactacaacagatacaagagacagaacgtagtcaaggacctgtccgtcgagctggatagactgagcgaagaatctgtgaacaacgacatctcctcctggacaaagggcagaagcggagaagctctgagcctcctgaagaaaagattctcccatagacccgtgcaggagaagttcgtgtgcctgaactgcggcttcgagacacacgcagccgagcaagccgccctgaacatcgccagatcctggctgttcctgcggagccaggagtacaagaaataccagacaaacaagacaaccggcaacaccgataagagagccttcgtcgagacctggcagtccttttaccggaagaagcttaaggaggtgtggaaacctgccgtgcggtctggcggatctggcggaggctccaccagccccaagaaaaagagaaaagtctaagctgccttctgcggggcttgccttctggccatgcccttcttctctcccttgcacctgtacctcttggtctttgaataaagcctgagtaggaaggctagcaaaaaaaaaaaaaaaaaaaaaaaaaaaaaaaaaaaaaaaaaaaaaaaaaaaaaaaaaaaaaaaaaaaaaaaaaaaaaaaa

SEQ ID NO: 12917 - RNA, 5785 nt, synthetic construct
  source 1..5785: mol_type = other RNA
aggaaataagagagaaaagaagagtaagaagaaatataagagccaccatggcccctaagaagaagcgtaaagtgagccggatggaacgcctcgtctacgaggtgcggcagaagtgcagaaacatcgaggacatctgcatctcctgcggatctctgaacgtgaccctggagcacccactgttcatcggcggcatgtgccagaactgtaaaaactgttttctggagtgtgcctatcaatacgacgatgacggctaccagagctactgcaccatctgttgcggcggaagagaggtgctgatgtgtggaaataacaactgctgccggtgcttctgcgtggaatgcgtggacctgctggtgggccccggcgccgcccaggccgctattaaggaagatccttggaactgctacatgtgcggccacaagggcacatacggcctgctgagacggagagaggactggcctagcagactgcagatgttcttcgccaataaccacgaccaggagttcgacccccctaaggtgtaccctcccgtccccgccgagaagagaaagcccatccgggtcctgagcctgttcgatggcatcgccaccggtctgctggtgctgaaggacctgggcatccaggtggataggtacattgcctccgaggtgtgcgaggactccatcaccgtgggaatggtgcgtcatcagggcaagatcatgtacgtgggcgacgtgcggagcgtgacacagaagcatatccaggagtggggccctttcgacctggtgatcggcggcagcccttgcaatgacctgagcatcgtgaacccagcccggaagggcctgtacgagggaaccggcagactgttcttcgagttttacagactgctgcacgacgcccggcctaaggaaggcgacgaccggcccttcttttggctgttcgagaatgtggtggccatgggagtcagcgacaagcgggatattagccggttcctggagagcaaccccgtgatgatcgatgccaaggaagtgagcgccgcccaccgggccagatacttctggggcaatctgcctggcatgaacagacccctggccagcaccgtgaacgacaagctggagctgcaggagtgcctggagcacggccggatcgccaagttcagcaaggtgagaaccatcaccacccgaagcaacagcatcaaacaaggcaaggaccagcactttcctgtgttcatgaacgagaaggaggacatcctgtggtgtaccgagatggagagagtgttcgggttcccagtccactacacagatgtcagcaacatgtctagactggccagacagagactgctgggaagaagctggtccgtccctgtgatcagacacctgttcgcccctctgaaggagtacttcgcctgcgtgagcagcggcaacagcaacgccaacagccggggccccagcttctctagcggcctggtgccactgtccctgagagggagccacatgggccccatggagatctacaaaaccgtgagcgcctggaagcggcagcctgtgcgcgtgctgagcctgtttcggaatatcgataaagtcctgaaaagcctgggattcctggagagcggctctggctccggcggtggcaccctgaagtacgtggaggatgtgacaaacgtggtcagacgggatgtggagaagtggggccccttcgatctggtgtacggcagcacccaacccctgggcagctcttgtgaccggtgccctggctggtacatgtttcagttccaccggatcctgcagtacgccctgccgagacaggagtcccagcggccattcttttggattttcatggacaacttgctgctgaccgaggatgaccaggaaactaccactcggttcctgcagaccgaagccgtgaccctgcaggacgtgagaggccgggactaccagaacgccatgcgggtgtggtccaacatccctggactgaaaagcaagcacgcacctctgacccctaaagaagaggagtacctgcaggcccaggtgcggagcagaagcaagctggacgcccctaaggtggatctgctggtgaagaattgcctcctgcccctgagagagtacttcaagtatttcagccagaatagtctgcccctgggaggcagcggcggcggccagctgcaggagaccatgaccttcaaggacgtggaggtgaccttcagccaggacgagtggggctggctggacagcgcccagaggaacctgtacagggacgtgatgctggagaactacaggaacatggccagcctggtgggccccttcaccaagcccgccctgatcagctggctggaggccagggagccctggggcctgaacatgcaggccgcccagcccaagggcaaccccgtggccgcccccggcggcccaagcagcggcgcccctcctcccagcggcggcagcccagccggctccccaacctctaccgaggagggcacctctgagtccgccacccccgagagcggccctggcacctccaccgagcccagcgagggcagcgcacccggcagccctgccggcagccccacctccacagaggagggaaccagcaccgagcccagcgaaggcagcgccccaggcaccagcaccgagcctagtgagcaggagattaaacggatcaacaagatcagaagaagacttgtgaaagacagcaacaccaagaaggccggcaagacaggccccatgaaaaccctgctggttagagtgatgacacccgatctgagagagcggctggaaaacctgagaaagaagcctgaaaatatcccccagcccatcagcaatacatctagagccaacctgaataagctgctgaccgattacaccgaaatgaagaaggcgatcctgcatgtgtactgggaagagttccagaaggaccctgtgggcctgatgagccgggtggcccagcctgccagcaagaagatcgatcagaacaagctgaaacctgagatggacgagaagggcaacctgaccaccgccggctttgcctgctctcagtgtggccagcccctgttcgtgtacaagctggagcaggtgtctgagaagggcaaggcttacaccaactacttcggacggtgcaatgtggccgagcacgaaaagctgatcctgctggcccagctgaagcccgagaaggatagcgacgaagccgtgacatatagcctgggaaagtttgggcagagggccctggatttctacagcattcatgtgaccaaggagtccacccaccccgtgaagcccctggcccagatcgccggaaacagatacgcctccggacctgtgggaaaggccctgagcgacgcatgtatgggcacaatcgcctccttcctgtctaagtaccaggacatcatcatcgaacaccagaaggtggtgaagggcaaccagaagagactggagagcctgcgggagctggccggcaaggaaaacctggaataccctagcgtgaccctgccacctcagcctcacaccaaggagggcgttgatgcctacaacgaagtgatcgcccgggtgcgaatgtgggtgaacctgaacctgtggcagaagctgaagctaagcagagatgatgccaagcctctgctgagactgaagggattcccttcctttcctctggtcgagagacaggccaacgaagtggactggtgggacatggtgtgtaacgtgaagaagctgatcaacgagaaaaaggaggatggcaaggtgttttggcagaatctggctggctacaagagacaggaagccctgagaccatacctgagcagcgaggaagatcggaagaagggaaagaaattcgctcggtaccagctgggcgacctgctgctgcacctggaaaagaagcacggcgaggactggggaaaggtgtacgacgaggcctgggagcggattgacaagaaagtggaaggcctgagcaagcacatcaagctggaagaggaacggagaagcgaggacgcccagagcaaggccgccctgaccgactggctgcgggctaaggccagcttcgtgatcgagggcctgaaggaggccgacaaggacgagttctgcagatgcgagctgaagctgcagaagtggtacggggacctgcggggaaagcccttcgccatcgaagccgagaacagcatcctggacatcagcggcttcagcaagcagtacaactgtgccttcatctggcagaaggacggcgtgaagaagctgaacctgtacctgatcatcaactacttcaagggcggcaagctgcggttcaagaagatcaaacctgaagccttcgaagccaacagattctacaccgtgatcaacaaaaagagcggcgagatcgtgcccatggaggtgaacttcaacttcgacgaccccaacctgatcatcctgcctctggcctttggcaagagacagggcagagaattcatctggaacgacctgctgtccctggaaaccggcagcctgaagctggccaacggaagagtgatcgagaagacactgtacaacagaagaacccggcaggatgagcctgccctgttcgtggccctgaccttcgagcggcgggaggtcctggactcctccaatatcaaaccaatgaacctgatcggcgtggcaagaggcgaaaacatccccgccgtgatcgccctgaccgaccccgagggctgcccactgagccggtttaaggatagcctgggaaacccaacccacatcctgagaatcggcgagagctataaggagaagcagcggaccatccaggccaagaaggaggtggagcagcggagagccggcggctacagccggaagtacgccagcaaagccaagaatctggcagacgatatggtgagaaacaccgctagagatctgctgtactacgccgtgacccaggatgccatgctgatcttcgccaacctgagccggggcttcggccggcagggcaagcggaccttcatggccgagagacagtacacacggatggaggactggctgaccgccaagctggcctacgagggcctgagcaagacctacctgtccaagacactggcccagtacacctccaagacatgcagcaactgtgggtttaccatcaccagcgccgactacgacagggtgctggagaagctgaagaagacagcaacaggctggatgaccacaattaacggcaaggagctgaaggtggagggccagattacctactacaacagatacaagagacagaacgtagtcaaggacctgtccgtcgagctggatagactgagcgaagaatctgtgaacaacgacatctcctcctggacaaagggcagaagcggagaagctctgagcctcctgaagaaaagattctcccatagacccgtgcaggagaagttcgtgtgcctgaactgcggcttcgagacacacgcagccgagcaagccgccctgaacatcgccagatcctggctgttcctgcggagccaggagtacaagaaataccagacaaacaagacaaccggcaacaccgataagagagccttcgtcgagacctggcagtccttttaccggaagaagcttaaggaggtgtggaaacctgccgtgcggtctggcggatctggcggaggctccaccagccccaagaaaaagagaaaagtctaagctgccttctgcggggcttgccttctggccatgcccttcttctctcccttgcacctgtacctcttggtctttgaataaagcctgagtaggaaggctagcaaaaaaaaaaaaaaaaaaaaaaaaaaaaaaaaaaaaaaaaaaaaaaaaaaaaaaaaaaaaaaaaaaaaaaaaaaaaaaaa

SEQ ID NO: 12918 - RNA, 5785 nt, synthetic construct
  source 1..5785: mol_type = other RNA
aggaaataagagagaaaagaagagtaagaagaaatataagagccaccatggcccctaagaagaagcgtaaagtgagccggatggaacgcctcgtctacgaggtgcggcagaagtgcagaaacatcgaggacatctgcatctcctgcggatctctgaacgtgaccctggagcacccactgttcatcggcggcatgtgccagaactgtaaaaactgttttctggagtgtgcctatcaatacgacgatgacggctaccagagctactgcaccatctgttgcggcggaagagaggtgctgatgtgtggaaataacaactgctgccggtgcttctgcgtggaatgcgtggacctgctggtgggccccggcgccgcccaggccgctattaaggaagatccttggaactgctacatgtgcggccacaagggcacatacggcctgctgagacggagagaggactggcctagcagactgcagatgttcttcgccaataaccacgaccaggagttcgacccccctaaggtgtaccctcccgtccccgccgagaagagaaagcccatccgggtcctgagcctgttcgatggcatcgccaccggtctgctggtgctgaaggacctgggcatccaggtggataggtacattgcctccgaggtgtgcgaggactccatcaccgtgggaatggtgcgtcatcagggcaagatcatgtacgtgggcgacgtgcggagcgtgacacagaagcatatccaggagtggggccctttcgacctggtgatcggcggcagcccttgcaatgacctgagcatcgtgaacccagcccggaagggcctgtacgagggaaccggcagactgttcttcgagttttacagactgctgcacgacgcccggcctaaggaaggcgacgaccggcccttcttttggctgttcgagaatgtggtggccatgggagtcagcgacaagcgggatattagccggttcctggagagcaaccccgtgatgatcgatgccaaggaagtgagcgccgcccaccgggccagatacttctggggcaatctgcctggcatgaacagacccctggccagcaccgtgaacgacaagctggagctgcaggagtgcctggagcacggccggatcgccaagttcagcaaggtgagaaccatcaccacccgaagcaacagcatcaaacaaggcaaggaccagcactttcctgtgttcatgaacgagaaggaggacatcctgtggtgtaccgagatggagagagtgttcgggttcccagtccactacacagatgtcagcaacatgtctagactggccagacagagactgctgggaagaagctggtccgtccctgtgatcagacacctgttcgcccctctgaaggagtacttcgcctgcgtgagcagcggcaacagcaacgccaacagccggggccccagcttctctagcggcctggtgccactgtccctgagagggagccacatgggccccatggagatctacaaaaccgtgagcgcctggaagcggcagcctgtgcgcgtgctgagcctgtttcggaatatcgataaagtcctgaaaagcctgggattcctggagagcggctctggctccggcggtggcaccctgaagtacgtggaggatgtgacaaacgtggtcagacgggatgtggagaagtggggccccttcgatctggtgtacggcagcacccaacccctgggcagctcttgtgaccggtgccctggctggtacatgtttcagttccaccggatcctgcagtacgccctgccgagacaggagtcccagcggccattcttttggattttcatggacaacttgctgctgaccgaggatgaccaggaaactaccactcggttcctgcagaccgaagccgtgaccctgcaggacgtgagaggccgggactaccagaacgccatgcgggtgtggtccaacatccctggactgaaaagcaagcacgcacctctgacccctaaagaagaggagtacctgcaggcccaggtgcggagcagaagcaagctggacgcccctaaggtggatctgctggtgaagaattgcctcctgcccctgagagagtacttcaagtatttcagccagaatagtctgcccctgggaggcagcggcggcggcttccagggcagcgtgagcttcaaggacgtgaccgtgggcttcaccctggaggagtggcagcacctggacagcacccagaggagcctgtacagggacgtgatgctggagaactacagcaacctggtgagcctgggctactgcgtgaccaagcccgaggtgatcttcaggctggagcagggcgaggagccctggatcctggaggaggagttccccagccagagcttccccgagagctgggagaccggcggcccaagcagcggcgcccctcctcccagcggcggcagcccagccggctccccaacctctaccgaggagggcacctctgagtccgccacccccgagagcggccctggcacctccaccgagcccagcgagggcagcgcacccggcagccctgccggcagccccacctccacagaggagggaaccagcaccgagcccagcgaaggcagcgccccaggcaccagcaccgagcctagtgagcaggagattaaacggatcaacaagatcagaagaagacttgtgaaagacagcaacaccaagaaggccggcaagacaggccccatgaaaaccctgctggttagagtgatgacacccgatctgagagagcggctggaaaacctgagaaagaagcctgaaaatatcccccagcccatcagcaatacatctagagccaacctgaataagctgctgaccgattacaccgaaatgaagaaggcgatcctgcatgtgtactgggaagagttccagaaggaccctgtgggcctgatgagccgggtggcccagcctgccagcaagaagatcgatcagaacaagctgaaacctgagatggacgagaagggcaacctgaccaccgccggctttgcctgctctcagtgtggccagcccctgttcgtgtacaagctggagcaggtgtctgagaagggcaaggcttacaccaactacttcggacggtgcaatgtggccgagcacgaaaagctgatcctgctggcccagctgaagcccgagaaggatagcgacgaagccgtgacatatagcctgggaaagtttgggcagagggccctggatttctacagcattcatgtgaccaaggagtccacccaccccgtgaagcccctggcccagatcgccggaaacagatacgcctccggacctgtgggaaaggccctgagcgacgcatgtatgggcacaatcgcctccttcctgtctaagtaccaggacatcatcatcgaacaccagaaggtggtgaagggcaaccagaagagactggagagcctgcgggagctggccggcaaggaaaacctggaataccctagcgtgaccctgccacctcagcctcacaccaaggagggcgttgatgcctacaacgaagtgatcgcccgggtgcgaatgtgggtgaacctgaacctgtggcagaagctgaagctaagcagagatgatgccaagcctctgctgagactgaagggattcccttcctttcctctggtcgagagacaggccaacgaagtggactggtgggacatggtgtgtaacgtgaagaagctgatcaacgagaaaaaggaggatggcaaggtgttttggcagaatctggctggctacaagagacaggaagccctgagaccatacctgagcagcgaggaagatcggaagaagggaaagaaattcgctcggtaccagctgggcgacctgctgctgcacctggaaaagaagcacggcgaggactggggaaaggtgtacgacgaggcctgggagcggattgacaagaaagtggaaggcctgagcaagcacatcaagctggaagaggaacggagaagcgaggacgcccagagcaaggccgccctgaccgactggctgcgggctaaggccagcttcgtgatcgagggcctgaaggaggccgacaaggacgagttctgcagatgcgagctgaagctgcagaagtggtacggggacctgcggggaaagcccttcgccatcgaagccgagaacagcatcctggacatcagcggcttcagcaagcagtacaactgtgccttcatctggcagaaggacggcgtgaagaagctgaacctgtacctgatcatcaactacttcaagggcggcaagctgcggttcaagaagatcaaacctgaagccttcgaagccaacagattctacaccgtgatcaacaaaaagagcggcgagatcgtgcccatggaggtgaacttcaacttcgacgaccccaacctgatcatcctgcctctggcctttggcaagagacagggcagagaattcatctggaacgacctgctgtccctggaaaccggcagcctgaagctggccaacggaagagtgatcgagaagacactgtacaacagaagaacccggcaggatgagcctgccctgttcgtggccctgaccttcgagcggcgggaggtcctggactcctccaatatcaaaccaatgaacctgatcggcgtggcaagaggcgaaaacatccccgccgtgatcgccctgaccgaccccgagggctgcccactgagccggtttaaggatagcctgggaaacccaacccacatcctgagaatcggcgagagctataaggagaagcagcggaccatccaggccaagaaggaggtggagcagcggagagccggcggctacagccggaagtacgccagcaaagccaagaatctggcagacgatatggtgagaaacaccgctagagatctgctgtactacgccgtgacccaggatgccatgctgatcttcgccaacctgagccggggcttcggccggcagggcaagcggaccttcatggccgagagacagtacacacggatggaggactggctgaccgccaagctggcctacgagggcctgagcaagacctacctgtccaagacactggcccagtacacctccaagacatgcagcaactgtgggtttaccatcaccagcgccgactacgacagggtgctggagaagctgaagaagacagcaacaggctggatgaccacaattaacggcaaggagctgaaggtggagggccagattacctactacaacagatacaagagacagaacgtagtcaaggacctgtccgtcgagctggatagactgagcgaagaatctgtgaacaacgacatctcctcctggacaaagggcagaagcggagaagctctgagcctcctgaagaaaagattctcccatagacccgtgcaggagaagttcgtgtgcctgaactgcggcttcgagacacacgcagccgagcaagccgccctgaacatcgccagatcctggctgttcctgcggagccaggagtacaagaaataccagacaaacaagacaaccggcaacaccgataagagagccttcgtcgagacctggcagtccttttaccggaagaagcttaaggaggtgtggaaacctgccgtgcggtctggcggatctggcggaggctccaccagccccaagaaaaagagaaaagtctaagctgccttctgcggggcttgccttctggccatgcccttcttctctcccttgcacctgtacctcttggtctttgaataaagcctgagtaggaaggctagcaaaaaaaaaaaaaaaaaaaaaaaaaaaaaaaaaaaaaaaaaaaaaaaaaaaaaaaaaaaaaaaaaaaaaaaaaaaaaaaa

SEQ ID NO: 12919 - RNA, 5785 nt, synthetic construct
  source 1..5785: mol_type = other RNA
aggaaataagagagaaaagaagagtaagaagaaatataagagccaccatggcccctaagaagaagcgtaaagtgagccggatggaacgcctcgtctacgaggtgcggcagaagtgcagaaacatcgaggacatctgcatctcctgcggatctctgaacgtgaccctggagcacccactgttcatcggcggcatgtgccagaactgtaaaaactgttttctggagtgtgcctatcaatacgacgatgacggctaccagagctactgcaccatctgttgcggcggaagagaggtgctgatgtgtggaaataacaactgctgccggtgcttctgcgtggaatgcgtggacctgctggtgggccccggcgccgcccaggccgctattaaggaagatccttggaactgctacatgtgcggccacaagggcacatacggcctgctgagacggagagaggactggcctagcagactgcagatgttcttcgccaataaccacgaccaggagttcgacccccctaaggtgtaccctcccgtccccgccgagaagagaaagcccatccgggtcctgagcctgttcgatggcatcgccaccggtctgctggtgctgaaggacctgggcatccaggtggataggtacattgcctccgaggtgtgcgaggactccatcaccgtgggaatggtgcgtcatcagggcaagatcatgtacgtgggcgacgtgcggagcgtgacacagaagcatatccaggagtggggccctttcgacctggtgatcggcggcagcccttgcaatgacctgagcatcgtgaacccagcccggaagggcctgtacgagggaaccggcagactgttcttcgagttttacagactgctgcacgacgcccggcctaaggaaggcgacgaccggcccttcttttggctgttcgagaatgtggtggccatgggagtcagcgacaagcgggatattagccggttcctggagagcaaccccgtgatgatcgatgccaaggaagtgagcgccgcccaccgggccagatacttctggggcaatctgcctggcatgaacagacccctggccagcaccgtgaacgacaagctggagctgcaggagtgcctggagcacggccggatcgccaagttcagcaaggtgagaaccatcaccacccgaagcaacagcatcaaacaaggcaaggaccagcactttcctgtgttcatgaacgagaaggaggacatcctgtggtgtaccgagatggagagagtgttcgggttcccagtccactacacagatgtcagcaacatgtctagactggccagacagagactgctgggaagaagctggtccgtccctgtgatcagacacctgttcgcccctctgaaggagtacttcgcctgcgtgagcagcggcaacagcaacgccaacagccggggccccagcttctctagcggcctggtgccactgtccctgagagggagccacatgggccccatggagatctacaaaaccgtgagcgcctggaagcggcagcctgtgcgcgtgctgagcctgtttcggaatatcgataaagtcctgaaaagcctgggattcctggagagcggctctggctccggcggtggcaccctgaagtacgtggaggatgtgacaaacgtggtcagacgggatgtggagaagtggggccccttcgatctggtgtacggcagcacccaacccctgggcagctcttgtgaccggtgccctggctggtacatgtttcagttccaccggatcctgcagtacgccctgccgagacaggagtcccagcggccattcttttggattttcatggacaacttgctgctgaccgaggatgaccaggaaactaccactcggttcctgcagaccgaagccgtgaccctgcaggacgtgagaggccgggactaccagaacgccatgcgggtgtggtccaacatccctggactgaaaagcaagcacgcacctctgacccctaaagaagaggagtacctgcaggcccaggtgcggagcagaagcaagctggacgcccctaaggtggatctgctggtgaagaattgcctcctgcccctgagagagtacttcaagtatttcagccagaatagtctgcccctgggaggcagcggcggcggcatggcccacgacctggtgatgttcagggacgtggccgtggacttcagccaggaggagtgggagtgcctgaacagctaccagaggaacctgtacaaggacgtgatcctggagaactacagcaacctggtgagcctgggctgcagcatcagcaagcccgacgtgatcaccctgctggagcagggcaaggagccctggctggtggtgagggacgagaagaggaggtggagcctggcccccaccttcggcggcccaagcagcggcgcccctcctcccagcggcggcagcccagccggctccccaacctctaccgaggagggcacctctgagtccgccacccccgagagcggccctggcacctccaccgagcccagcgagggcagcgcacccggcagccctgccggcagccccacctccacagaggagggaaccagcaccgagcccagcgaaggcagcgccccaggcaccagcaccgagcctagtgagcaggagattaaacggatcaacaagatcagaagaagacttgtgaaagacagcaacaccaagaaggccggcaagacaggccccatgaaaaccctgctggttagagtgatgacacccgatctgagagagcggctggaaaacctgagaaagaagcctgaaaatatcccccagcccatcagcaatacatctagagccaacctgaataagctgctgaccgattacaccgaaatgaagaaggcgatcctgcatgtgtactgggaagagttccagaaggaccctgtgggcctgatgagccgggtggcccagcctgccagcaagaagatcgatcagaacaagctgaaacctgagatggacgagaagggcaacctgaccaccgccggctttgcctgctctcagtgtggccagcccctgttcgtgtacaagctggagcaggtgtctgagaagggcaaggcttacaccaactacttcggacggtgcaatgtggccgagcacgaaaagctgatcctgctggcccagctgaagcccgagaaggatagcgacgaagccgtgacatatagcctgggaaagtttgggcagagggccctggatttctacagcattcatgtgaccaaggagtccacccaccccgtgaagcccctggcccagatcgccggaaacagatacgcctccggacctgtgggaaaggccctgagcgacgcatgtatgggcacaatcgcctccttcctgtctaagtaccaggacatcatcatcgaacaccagaaggtggtgaagggcaaccagaagagactggagagcctgcgggagctggccggcaaggaaaacctggaataccctagcgtgaccctgccacctcagcctcacaccaaggagggcgttgatgcctacaacgaagtgatcgcccgggtgcgaatgtgggtgaacctgaacctgtggcagaagctgaagctaagcagagatgatgccaagcctctgctgagactgaagggattcccttcctttcctctggtcgagagacaggccaacgaagtggactggtgggacatggtgtgtaacgtgaagaagctgatcaacgagaaaaaggaggatggcaaggtgttttggcagaatctggctggctacaagagacaggaagccctgagaccatacctgagcagcgaggaagatcggaagaagggaaagaaattcgctcggtaccagctgggcgacctgctgctgcacctggaaaagaagcacggcgaggactggggaaaggtgtacgacgaggcctgggagcggattgacaagaaagtggaaggcctgagcaagcacatcaagctggaagaggaacggagaagcgaggacgcccagagcaaggccgccctgaccgactggctgcgggctaaggccagcttcgtgatcgagggcctgaaggaggccgacaaggacgagttctgcagatgcgagctgaagctgcagaagtggtacggggacctgcggggaaagcccttcgccatcgaagccgagaacagcatcctggacatcagcggcttcagcaagcagtacaactgtgccttcatctggcagaaggacggcgtgaagaagctgaacctgtacctgatcatcaactacttcaagggcggcaagctgcggttcaagaagatcaaacctgaagccttcgaagccaacagattctacaccgtgatcaacaaaaagagcggcgagatcgtgcccatggaggtgaacttcaacttcgacgaccccaacctgatcatcctgcctctggcctttggcaagagacagggcagagaattcatctggaacgacctgctgtccctggaaaccggcagcctgaagctggccaacggaagagtgatcgagaagacactgtacaacagaagaacccggcaggatgagcctgccctgttcgtggccctgaccttcgagcggcgggaggtcctggactcctccaatatcaaaccaatgaacctgatcggcgtggcaagaggcgaaaacatccccgccgtgatcgccctgaccgaccccgagggctgcccactgagccggtttaaggatagcctgggaaacccaacccacatcctgagaatcggcgagagctataaggagaagcagcggaccatccaggccaagaaggaggtggagcagcggagagccggcggctacagccggaagtacgccagcaaagccaagaatctggcagacgatatggtgagaaacaccgctagagatctgctgtactacgccgtgacccaggatgccatgctgatcttcgccaacctgagccggggcttcggccggcagggcaagcggaccttcatggccgagagacagtacacacggatggaggactggctgaccgccaagctggcctacgagggcctgagcaagacctacctgtccaagacactggcccagtacacctccaagacatgcagcaactgtgggtttaccatcaccagcgccgactacgacagggtgctggagaagctgaagaagacagcaacaggctggatgaccacaattaacggcaaggagctgaaggtggagggccagattacctactacaacagatacaagagacagaacgtagtcaaggacctgtccgtcgagctggatagactgagcgaagaatctgtgaacaacgacatctcctcctggacaaagggcagaagcggagaagctctgagcctcctgaagaaaagattctcccatagacccgtgcaggagaagttcgtgtgcctgaactgcggcttcgagacacacgcagccgagcaagccgccctgaacatcgccagatcctggctgttcctgcggagccaggagtacaagaaataccagacaaacaagacaaccggcaacaccgataagagagccttcgtcgagacctggcagtccttttaccggaagaagcttaaggaggtgtggaaacctgccgtgcggtctggcggatctggcggaggctccaccagccccaagaaaaagagaaaagtctaagctgccttctgcggggcttgccttctggccatgcccttcttctctcccttgcacctgtacctcttggtctttgaataaagcctgagtaggaaggctagcaaaaaaaaaaaaaaaaaaaaaaaaaaaaaaaaaaaaaaaaaaaaaaaaaaaaaaaaaaaaaaaaaaaaaaaaaaaaaaaa

SEQ ID NO: 12920 - RNA, 5785 nt, synthetic construct
  source 1..5785: mol_type = other RNA
aggaaataagagagaaaagaagagtaagaagaaatataagagccaccatggcccctaagaagaagcgtaaagtgagccggatggaacgcctcgtctacgaggtgcggcagaagtgcagaaacatcgaggacatctgcatctcctgcggatctctgaacgtgaccctggagcacccactgttcatcggcggcatgtgccagaactgtaaaaactgttttctggagtgtgcctatcaatacgacgatgacggctaccagagctactgcaccatctgttgcggcggaagagaggtgctgatgtgtggaaataacaactgctgccggtgcttctgcgtggaatgcgtggacctgctggtgggccccggcgccgcccaggccgctattaaggaagatccttggaactgctacatgtgcggccacaagggcacatacggcctgctgagacggagagaggactggcctagcagactgcagatgttcttcgccaataaccacgaccaggagttcgacccccctaaggtgtaccctcccgtccccgccgagaagagaaagcccatccgggtcctgagcctgttcgatggcatcgccaccggtctgctggtgctgaaggacctgggcatccaggtggataggtacattgcctccgaggtgtgcgaggactccatcaccgtgggaatggtgcgtcatcagggcaagatcatgtacgtgggcgacgtgcggagcgtgacacagaagcatatccaggagtggggccctttcgacctggtgatcggcggcagcccttgcaatgacctgagcatcgtgaacccagcccggaagggcctgtacgagggaaccggcagactgttcttcgagttttacagactgctgcacgacgcccggcctaaggaaggcgacgaccggcccttcttttggctgttcgagaatgtggtggccatgggagtcagcgacaagcgggatattagccggttcctggagagcaaccccgtgatgatcgatgccaaggaagtgagcgccgcccaccgggccagatacttctggggcaatctgcctggcatgaacagacccctggccagcaccgtgaacgacaagctggagctgcaggagtgcctggagcacggccggatcgccaagttcagcaaggtgagaaccatcaccacccgaagcaacagcatcaaacaaggcaaggaccagcactttcctgtgttcatgaacgagaaggaggacatcctgtggtgtaccgagatggagagagtgttcgggttcccagtccactacacagatgtcagcaacatgtctagactggccagacagagactgctgggaagaagctggtccgtccctgtgatcagacacctgttcgcccctctgaaggagtacttcgcctgcgtgagcagcggcaacagcaacgccaacagccggggccccagcttctctagcggcctggtgccactgtccctgagagggagccacatgggccccatggagatctacaaaaccgtgagcgcctggaagcggcagcctgtgcgcgtgctgagcctgtttcggaatatcgataaagtcctgaaaagcctgggattcctggagagcggctctggctccggcggtggcaccctgaagtacgtggaggatgtgacaaacgtggtcagacgggatgtggagaagtggggccccttcgatctggtgtacggcagcacccaacccctgggcagctcttgtgaccggtgccctggctggtacatgtttcagttccaccggatcctgcagtacgccctgccgagacaggagtcccagcggccattcttttggattttcatggacaacttgctgctgaccgaggatgaccaggaaactaccactcggttcctgcagaccgaagccgtgaccctgcaggacgtgagaggccgggactaccagaacgccatgcgggtgtggtccaacatccctggactgaaaagcaagcacgcacctctgacccctaaagaagaggagtacctgcaggcccaggtgcggagcagaagcaagctggacgcccctaaggtggatctgctggtgaagaattgcctcctgcccctgagagagtacttcaagtatttcagccagaatagtctgcccctgggaggcagcggcggcggcgcccaggagctggtgaccttcaaggacatcgccatcgacttcacccaggaggagtgggccctgctggacaccagccagaggcagctgtacagggacgtgatgctggagaacatcagccacctggtgagcgtgggctaccacctgtgcaagagcgacgtgatcagccagctggagcagggcgtggagctgtggagggacggcagggagttcctgcagggcctgaaccccgacaggaagagcggcggcggcccaagcagcggcgcccctcctcccagcggcggcagcccagccggctccccaacctctaccgaggagggcacctctgagtccgccacccccgagagcggccctggcacctccaccgagcccagcgagggcagcgcacccggcagccctgccggcagccccacctccacagaggagggaaccagcaccgagcccagcgaaggcagcgccccaggcaccagcaccgagcctagtgagcaggagattaaacggatcaacaagatcagaagaagacttgtgaaagacagcaacaccaagaaggccggcaagacaggccccatgaaaaccctgctggttagagtgatgacacccgatctgagagagcggctggaaaacctgagaaagaagcctgaaaatatcccccagcccatcagcaatacatctagagccaacctgaataagctgctgaccgattacaccgaaatgaagaaggcgatcctgcatgtgtactgggaagagttccagaaggaccctgtgggcctgatgagccgggtggcccagcctgccagcaagaagatcgatcagaacaagctgaaacctgagatggacgagaagggcaacctgaccaccgccggctttgcctgctctcagtgtggccagcccctgttcgtgtacaagctggagcaggtgtctgagaagggcaaggcttacaccaactacttcggacggtgcaatgtggccgagcacgaaaagctgatcctgctggcccagctgaagcccgagaaggatagcgacgaagccgtgacatatagcctgggaaagtttgggcagagggccctggatttctacagcattcatgtgaccaaggagtccacccaccccgtgaagcccctggcccagatcgccggaaacagatacgcctccggacctgtgggaaaggccctgagcgacgcatgtatgggcacaatcgcctccttcctgtctaagtaccaggacatcatcatcgaacaccagaaggtggtgaagggcaaccagaagagactggagagcctgcgggagctggccggcaaggaaaacctggaataccctagcgtgaccctgccacctcagcctcacaccaaggagggcgttgatgcctacaacgaagtgatcgcccgggtgcgaatgtgggtgaacctgaacctgtggcagaagctgaagctaagcagagatgatgccaagcctctgctgagactgaagggattcccttcctttcctctggtcgagagacaggccaacgaagtggactggtgggacatggtgtgtaacgtgaagaagctgatcaacgagaaaaaggaggatggcaaggtgttttggcagaatctggctggctacaagagacaggaagccctgagaccatacctgagcagcgaggaagatcggaagaagggaaagaaattcgctcggtaccagctgggcgacctgctgctgcacctggaaaagaagcacggcgaggactggggaaaggtgtacgacgaggcctgggagcggattgacaagaaagtggaaggcctgagcaagcacatcaagctggaagaggaacggagaagcgaggacgcccagagcaaggccgccctgaccgactggctgcgggctaaggccagcttcgtgatcgagggcctgaaggaggccgacaaggacgagttctgcagatgcgagctgaagctgcagaagtggtacggggacctgcggggaaagcccttcgccatcgaagccgagaacagcatcctggacatcagcggcttcagcaagcagtacaactgtgccttcatctggcagaaggacggcgtgaagaagctgaacctgtacctgatcatcaactacttcaagggcggcaagctgcggttcaagaagatcaaacctgaagccttcgaagccaacagattctacaccgtgatcaacaaaaagagcggcgagatcgtgcccatggaggtgaacttcaacttcgacgaccccaacctgatcatcctgcctctggcctttggcaagagacagggcagagaattcatctggaacgacctgctgtccctggaaaccggcagcctgaagctggccaacggaagagtgatcgagaagacactgtacaacagaagaacccggcaggatgagcctgccctgttcgtggccctgaccttcgagcggcgggaggtcctggactcctccaatatcaaaccaatgaacctgatcggcgtggcaagaggcgaaaacatccccgccgtgatcgccctgaccgaccccgagggctgcccactgagccggtttaaggatagcctgggaaacccaacccacatcctgagaatcggcgagagctataaggagaagcagcggaccatccaggccaagaaggaggtggagcagcggagagccggcggctacagccggaagtacgccagcaaagccaagaatctggcagacgatatggtgagaaacaccgctagagatctgctgtactacgccgtgacccaggatgccatgctgatcttcgccaacctgagccggggcttcggccggcagggcaagcggaccttcatggccgagagacagtacacacggatggaggactggctgaccgccaagctggcctacgagggcctgagcaagacctacctgtccaagacactggcccagtacacctccaagacatgcagcaactgtgggtttaccatcaccagcgccgactacgacagggtgctggagaagctgaagaagacagcaacaggctggatgaccacaattaacggcaaggagctgaaggtggagggccagattacctactacaacagatacaagagacagaacgtagtcaaggacctgtccgtcgagctggatagactgagcgaagaatctgtgaacaacgacatctcctcctggacaaagggcagaagcggagaagctctgagcctcctgaagaaaagattctcccatagacccgtgcaggagaagttcgtgtgcctgaactgcggcttcgagacacacgcagccgagcaagccgccctgaacatcgccagatcctggctgttcctgcggagccaggagtacaagaaataccagacaaacaagacaaccggcaacaccgataagagagccttcgtcgagacctggcagtccttttaccggaagaagcttaaggaggtgtggaaacctgccgtgcggtctggcggatctggcggaggctccaccagccccaagaaaaagagaaaagtctaagctgccttctgcggggcttgccttctggccatgcccttcttctctcccttgcacctgtacctcttggtctttgaataaagcctgagtaggaaggctagcaaaaaaaaaaaaaaaaaaaaaaaaaaaaaaaaaaaaaaaaaaaaaaaaaaaaaaaaaaaaaaaaaaaaaaaaaaaaaaaa

SEQ ID NO: 12921 - RNA, 5785 nt, synthetic construct
  source 1..5785: mol_type = other RNA
aggaaataagagagaaaagaagagtaagaagaaatataagagccaccatggcccctaagaagaagcgtaaagtgagccggatggaacgcctcgtctacgaggtgcggcagaagtgcagaaacatcgaggacatctgcatctcctgcggatctctgaacgtgaccctggagcacccactgttcatcggcggcatgtgccagaactgtaaaaactgttttctggagtgtgcctatcaatacgacgatgacggctaccagagctactgcaccatctgttgcggcggaagagaggtgctgatgtgtggaaataacaactgctgccggtgcttctgcgtggaatgcgtggacctgctggtgggccccggcgccgcccaggccgctattaaggaagatccttggaactgctacatgtgcggccacaagggcacatacggcctgctgagacggagagaggactggcctagcagactgcagatgttcttcgccaataaccacgaccaggagttcgacccccctaaggtgtaccctcccgtccccgccgagaagagaaagcccatccgggtcctgagcctgttcgatggcatcgccaccggtctgctggtgctgaaggacctgggcatccaggtggataggtacattgcctccgaggtgtgcgaggactccatcaccgtgggaatggtgcgtcatcagggcaagatcatgtacgtgggcgacgtgcggagcgtgacacagaagcatatccaggagtggggccctttcgacctggtgatcggcggcagcccttgcaatgacctgagcatcgtgaacccagcccggaagggcctgtacgagggaaccggcagactgttcttcgagttttacagactgctgcacgacgcccggcctaaggaaggcgacgaccggcccttcttttggctgttcgagaatgtggtggccatgggagtcagcgacaagcgggatattagccggttcctggagagcaaccccgtgatgatcgatgccaaggaagtgagcgccgcccaccgggccagatacttctggggcaatctgcctggcatgaacagacccctggccagcaccgtgaacgacaagctggagctgcaggagtgcctggagcacggccggatcgccaagttcagcaaggtgagaaccatcaccacccgaagcaacagcatcaaacaaggcaaggaccagcactttcctgtgttcatgaacgagaaggaggacatcctgtggtgtaccgagatggagagagtgttcgggttcccagtccactacacagatgtcagcaacatgtctagactggccagacagagactgctgggaagaagctggtccgtccctgtgatcagacacctgttcgcccctctgaaggagtacttcgcctgcgtgagcagcggcaacagcaacgccaacagccggggccccagcttctctagcggcctggtgccactgtccctgagagggagccacatgggccccatggagatctacaaaaccgtgagcgcctggaagcggcagcctgtgcgcgtgctgagcctgtttcggaatatcgataaagtcctgaaaagcctgggattcctggagagcggctctggctccggcggtggcaccctgaagtacgtggaggatgtgacaaacgtggtcagacgggatgtggagaagtggggccccttcgatctggtgtacggcagcacccaacccctgggcagctcttgtgaccggtgccctggctggtacatgtttcagttccaccggatcctgcagtacgccctgccgagacaggagtcccagcggccattcttttggattttcatggacaacttgctgctgaccgaggatgaccaggaaactaccactcggttcctgcagaccgaagccgtgaccctgcaggacgtgagaggccgggactaccagaacgccatgcgggtgtggtccaacatccctggactgaaaagcaagcacgcacctctgacccctaaagaagaggagtacctgcaggcccaggtgcggagcagaagcaagctggacgcccctaaggtggatctgctggtgaagaattgcctcctgcccctgagagagtacttcaagtatttcagccagaatagtctgcccctgggaggcagcggcggcggcaggcccgagagcgtgaccttcgaggacgtggccgtgtacttcagcgagaacgagtggatcggcctgggccccgcccagagggccctgtacagggacgtgatgctggagaactacggcgccgtggccagcctggccttccccttccccaagcccgccctgatcagccagctggagaggggcgaggccccctggtgcagcgtgccctggggcgccctggacggcgaggaccccaggagcatcagcggcggcccaagcagcggcgcccctcctcccagcggcggcagcccagccggctccccaacctctaccgaggagggcacctctgagtccgccacccccgagagcggccctggcacctccaccgagcccagcgagggcagcgcacccggcagccctgccggcagccccacctccacagaggagggaaccagcaccgagcccagcgaaggcagcgccccaggcaccagcaccgagcctagtgagcaggagattaaacggatcaacaagatcagaagaagacttgtgaaagacagcaacaccaagaaggccggcaagacaggccccatgaaaaccctgctggttagagtgatgacacccgatctgagagagcggctggaaaacctgagaaagaagcctgaaaatatcccccagcccatcagcaatacatctagagccaacctgaataagctgctgaccgattacaccgaaatgaagaaggcgatcctgcatgtgtactgggaagagttccagaaggaccctgtgggcctgatgagccgggtggcccagcctgccagcaagaagatcgatcagaacaagctgaaacctgagatggacgagaagggcaacctgaccaccgccggctttgcctgctctcagtgtggccagcccctgttcgtgtacaagctggagcaggtgtctgagaagggcaaggcttacaccaactacttcggacggtgcaatgtggccgagcacgaaaagctgatcctgctggcccagctgaagcccgagaaggatagcgacgaagccgtgacatatagcctgggaaagtttgggcagagggccctggatttctacagcattcatgtgaccaaggagtccacccaccccgtgaagcccctggcccagatcgccggaaacagatacgcctccggacctgtgggaaaggccctgagcgacgcatgtatgggcacaatcgcctccttcctgtctaagtaccaggacatcatcatcgaacaccagaaggtggtgaagggcaaccagaagagactggagagcctgcgggagctggccggcaaggaaaacctggaataccctagcgtgaccctgccacctcagcctcacaccaaggagggcgttgatgcctacaacgaagtgatcgcccgggtgcgaatgtgggtgaacctgaacctgtggcagaagctgaagctaagcagagatgatgccaagcctctgctgagactgaagggattcccttcctttcctctggtcgagagacaggccaacgaagtggactggtgggacatggtgtgtaacgtgaagaagctgatcaacgagaaaaaggaggatggcaaggtgttttggcagaatctggctggctacaagagacaggaagccctgagaccatacctgagcagcgaggaagatcggaagaagggaaagaaattcgctcggtaccagctgggcgacctgctgctgcacctggaaaagaagcacggcgaggactggggaaaggtgtacgacgaggcctgggagcggattgacaagaaagtggaaggcctgagcaagcacatcaagctggaagaggaacggagaagcgaggacgcccagagcaaggccgccctgaccgactggctgcgggctaaggccagcttcgtgatcgagggcctgaaggaggccgacaaggacgagttctgcagatgcgagctgaagctgcagaagtggtacggggacctgcggggaaagcccttcgccatcgaagccgagaacagcatcctggacatcagcggcttcagcaagcagtacaactgtgccttcatctggcagaaggacggcgtgaagaagctgaacctgtacctgatcatcaactacttcaagggcggcaagctgcggttcaagaagatcaaacctgaagccttcgaagccaacagattctacaccgtgatcaacaaaaagagcggcgagatcgtgcccatggaggtgaacttcaacttcgacgaccccaacctgatcatcctgcctctggcctttggcaagagacagggcagagaattcatctggaacgacctgctgtccctggaaaccggcagcctgaagctggccaacggaagagtgatcgagaagacactgtacaacagaagaacccggcaggatgagcctgccctgttcgtggccctgaccttcgagcggcgggaggtcctggactcctccaatatcaaaccaatgaacctgatcggcgtggcaagaggcgaaaacatccccgccgtgatcgccctgaccgaccccgagggctgcccactgagccggtttaaggatagcctgggaaacccaacccacatcctgagaatcggcgagagctataaggagaagcagcggaccatccaggccaagaaggaggtggagcagcggagagccggcggctacagccggaagtacgccagcaaagccaagaatctggcagacgatatggtgagaaacaccgctagagatctgctgtactacgccgtgacccaggatgccatgctgatcttcgccaacctgagccggggcttcggccggcagggcaagcggaccttcatggccgagagacagtacacacggatggaggactggctgaccgccaagctggcctacgagggcctgagcaagacctacctgtccaagacactggcccagtacacctccaagacatgcagcaactgtgggtttaccatcaccagcgccgactacgacagggtgctggagaagctgaagaagacagcaacaggctggatgaccacaattaacggcaaggagctgaaggtggagggccagattacctactacaacagatacaagagacagaacgtagtcaaggacctgtccgtcgagctggatagactgagcgaagaatctgtgaacaacgacatctcctcctggacaaagggcagaagcggagaagctctgagcctcctgaagaaaagattctcccatagacccgtgcaggagaagttcgtgtgcctgaactgcggcttcgagacacacgcagccgagcaagccgccctgaacatcgccagatcctggctgttcctgcggagccaggagtacaagaaataccagacaaacaagacaaccggcaacaccgataagagagccttcgtcgagacctggcagtccttttaccggaagaagcttaaggaggtgtggaaacctgccgtgcggtctggcggatctggcggaggctccaccagccccaagaaaaagagaaaagtctaagctgccttctgcggggcttgccttctggccatgcccttcttctctcccttgcacctgtacctcttggtctttgaataaagcctgagtaggaaggctagcaaaaaaaaaaaaaaaaaaaaaaaaaaaaaaaaaaaaaaaaaaaaaaaaaaaaaaaaaaaaaaaaaaaaaaaaaaaaaaaa

SEQ ID NO: 12922 - RNA, 5785 nt, synthetic construct
  source 1..5785: mol_type = other RNA
aggaaataagagagaaaagaagagtaagaagaaatataagagccaccatggcccctaagaagaagcgtaaagtgagccggatggaacgcctcgtctacgaggtgcggcagaagtgcagaaacatcgaggacatctgcatctcctgcggatctctgaacgtgaccctggagcacccactgttcatcggcggcatgtgccagaactgtaaaaactgttttctggagtgtgcctatcaatacgacgatgacggctaccagagctactgcaccatctgttgcggcggaagagaggtgctgatgtgtggaaataacaactgctgccggtgcttctgcgtggaatgcgtggacctgctggtgggccccggcgccgcccaggccgctattaaggaagatccttggaactgctacatgtgcggccacaagggcacatacggcctgctgagacggagagaggactggcctagcagactgcagatgttcttcgccaataaccacgaccaggagttcgacccccctaaggtgtaccctcccgtccccgccgagaagagaaagcccatccgggtcctgagcctgttcgatggcatcgccaccggtctgctggtgctgaaggacctgggcatccaggtggataggtacattgcctccgaggtgtgcgaggactccatcaccgtgggaatggtgcgtcatcagggcaagatcatgtacgtgggcgacgtgcggagcgtgacacagaagcatatccaggagtggggccctttcgacctggtgatcggcggcagcccttgcaatgacctgagcatcgtgaacccagcccggaagggcctgtacgagggaaccggcagactgttcttcgagttttacagactgctgcacgacgcccggcctaaggaaggcgacgaccggcccttcttttggctgttcgagaatgtggtggccatgggagtcagcgacaagcgggatattagccggttcctggagagcaaccccgtgatgatcgatgccaaggaagtgagcgccgcccaccgggccagatacttctggggcaatctgcctggcatgaacagacccctggccagcaccgtgaacgacaagctggagctgcaggagtgcctggagcacggccggatcgccaagttcagcaaggtgagaaccatcaccacccgaagcaacagcatcaaacaaggcaaggaccagcactttcctgtgttcatgaacgagaaggaggacatcctgtggtgtaccgagatggagagagtgttcgggttcccagtccactacacagatgtcagcaacatgtctagactggccagacagagactgctgggaagaagctggtccgtccctgtgatcagacacctgttcgcccctctgaaggagtacttcgcctgcgtgagcagcggcaacagcaacgccaacagccggggccccagcttctctagcggcctggtgccactgtccctgagagggagccacatgggccccatggagatctacaaaaccgtgagcgcctggaagcggcagcctgtgcgcgtgctgagcctgtttcggaatatcgataaagtcctgaaaagcctgggattcctggagagcggctctggctccggcggtggcaccctgaagtacgtggaggatgtgacaaacgtggtcagacgggatgtggagaagtggggccccttcgatctggtgtacggcagcacccaacccctgggcagctcttgtgaccggtgccctggctggtacatgtttcagttccaccggatcctgcagtacgccctgccgagacaggagtcccagcggccattcttttggattttcatggacaacttgctgctgaccgaggatgaccaggaaactaccactcggttcctgcagaccgaagccgtgaccctgcaggacgtgagaggccgggactaccagaacgccatgcgggtgtggtccaacatccctggactgaaaagcaagcacgcacctctgacccctaaagaagaggagtacctgcaggcccaggtgcggagcagaagcaagctggacgcccctaaggtggatctgctggtgaagaattgcctcctgcccctgagagagtacttcaagtatttcagccagaatagtctgcccctgggaggcagcggcggcggcgcccagggcagcgtgatgttcagcgacgtgagcatcgacttcagccaggaggagtgggagtgcctgaacgacgaccagagggacctgtacagggacgtgatgctggagaactacagcaacctggtgagcatgggccactgcatcagcaagcccgacgtgatcagcttcctggagcagggcaaggagccctggctggtggacagggagcccaccaggtaccagtggcccgtgctggagagcaggggcggcccaagcagcggcgcccctcctcccagcggcggcagcccagccggctccccaacctctaccgaggagggcacctctgagtccgccacccccgagagcggccctggcacctccaccgagcccagcgagggcagcgcacccggcagccctgccggcagccccacctccacagaggagggaaccagcaccgagcccagcgaaggcagcgccccaggcaccagcaccgagcctagtgagcaggagattaaacggatcaacaagatcagaagaagacttgtgaaagacagcaacaccaagaaggccggcaagacaggccccatgaaaaccctgctggttagagtgatgacacccgatctgagagagcggctggaaaacctgagaaagaagcctgaaaatatcccccagcccatcagcaatacatctagagccaacctgaataagctgctgaccgattacaccgaaatgaagaaggcgatcctgcatgtgtactgggaagagttccagaaggaccctgtgggcctgatgagccgggtggcccagcctgccagcaagaagatcgatcagaacaagctgaaacctgagatggacgagaagggcaacctgaccaccgccggctttgcctgctctcagtgtggccagcccctgttcgtgtacaagctggagcaggtgtctgagaagggcaaggcttacaccaactacttcggacggtgcaatgtggccgagcacgaaaagctgatcctgctggcccagctgaagcccgagaaggatagcgacgaagccgtgacatatagcctgggaaagtttgggcagagggccctggatttctacagcattcatgtgaccaaggagtccacccaccccgtgaagcccctggcccagatcgccggaaacagatacgcctccggacctgtgggaaaggccctgagcgacgcatgtatgggcacaatcgcctccttcctgtctaagtaccaggacatcatcatcgaacaccagaaggtggtgaagggcaaccagaagagactggagagcctgcgggagctggccggcaaggaaaacctggaataccctagcgtgaccctgccacctcagcctcacaccaaggagggcgttgatgcctacaacgaagtgatcgcccgggtgcgaatgtgggtgaacctgaacctgtggcagaagctgaagctaagcagagatgatgccaagcctctgctgagactgaagggattcccttcctttcctctggtcgagagacaggccaacgaagtggactggtgggacatggtgtgtaacgtgaagaagctgatcaacgagaaaaaggaggatggcaaggtgttttggcagaatctggctggctacaagagacaggaagccctgagaccatacctgagcagcgaggaagatcggaagaagggaaagaaattcgctcggtaccagctgggcgacctgctgctgcacctggaaaagaagcacggcgaggactggggaaaggtgtacgacgaggcctgggagcggattgacaagaaagtggaaggcctgagcaagcacatcaagctggaagaggaacggagaagcgaggacgcccagagcaaggccgccctgaccgactggctgcgggctaaggccagcttcgtgatcgagggcctgaaggaggccgacaaggacgagttctgcagatgcgagctgaagctgcagaagtggtacggggacctgcggggaaagcccttcgccatcgaagccgagaacagcatcctggacatcagcggcttcagcaagcagtacaactgtgccttcatctggcagaaggacggcgtgaagaagctgaacctgtacctgatcatcaactacttcaagggcggcaagctgcggttcaagaagatcaaacctgaagccttcgaagccaacagattctacaccgtgatcaacaaaaagagcggcgagatcgtgcccatggaggtgaacttcaacttcgacgaccccaacctgatcatcctgcctctggcctttggcaagagacagggcagagaattcatctggaacgacctgctgtccctggaaaccggcagcctgaagctggccaacggaagagtgatcgagaagacactgtacaacagaagaacccggcaggatgagcctgccctgttcgtggccctgaccttcgagcggcgggaggtcctggactcctccaatatcaaaccaatgaacctgatcggcgtggcaagaggcgaaaacatccccgccgtgatcgccctgaccgaccccgagggctgcccactgagccggtttaaggatagcctgggaaacccaacccacatcctgagaatcggcgagagctataaggagaagcagcggaccatccaggccaagaaggaggtggagcagcggagagccggcggctacagccggaagtacgccagcaaagccaagaatctggcagacgatatggtgagaaacaccgctagagatctgctgtactacgccgtgacccaggatgccatgctgatcttcgccaacctgagccggggcttcggccggcagggcaagcggaccttcatggccgagagacagtacacacggatggaggactggctgaccgccaagctggcctacgagggcctgagcaagacctacctgtccaagacactggcccagtacacctccaagacatgcagcaactgtgggtttaccatcaccagcgccgactacgacagggtgctggagaagctgaagaagacagcaacaggctggatgaccacaattaacggcaaggagctgaaggtggagggccagattacctactacaacagatacaagagacagaacgtagtcaaggacctgtccgtcgagctggatagactgagcgaagaatctgtgaacaacgacatctcctcctggacaaagggcagaagcggagaagctctgagcctcctgaagaaaagattctcccatagacccgtgcaggagaagttcgtgtgcctgaactgcggcttcgagacacacgcagccgagcaagccgccctgaacatcgccagatcctggctgttcctgcggagccaggagtacaagaaataccagacaaacaagacaaccggcaacaccgataagagagccttcgtcgagacctggcagtccttttaccggaagaagcttaaggaggtgtggaaacctgccgtgcggtctggcggatctggcggaggctccaccagccccaagaaaaagagaaaagtctaagctgccttctgcggggcttgccttctggccatgcccttcttctctcccttgcacctgtacctcttggtctttgaataaagcctgagtaggaaggctagcaaaaaaaaaaaaaaaaaaaaaaaaaaaaaaaaaaaaaaaaaaaaaaaaaaaaaaaaaaaaaaaaaaaaaaaaaaaaaaaa

SEQ ID NO: 12923 - RNA, 5785 nt, synthetic construct
  source 1..5785: mol_type = other RNA
aggaaataagagagaaaagaagagtaagaagaaatataagagccaccatggcccctaagaagaagcgtaaagtgagccggatggaacgcctcgtctacgaggtgcggcagaagtgcagaaacatcgaggacatctgcatctcctgcggatctctgaacgtgaccctggagcacccactgttcatcggcggcatgtgccagaactgtaaaaactgttttctggagtgtgcctatcaatacgacgatgacggctaccagagctactgcaccatctgttgcggcggaagagaggtgctgatgtgtggaaataacaactgctgccggtgcttctgcgtggaatgcgtggacctgctggtgggccccggcgccgcccaggccgctattaaggaagatccttggaactgctacatgtgcggccacaagggcacatacggcctgctgagacggagagaggactggcctagcagactgcagatgttcttcgccaataaccacgaccaggagttcgacccccctaaggtgtaccctcccgtccccgccgagaagagaaagcccatccgggtcctgagcctgttcgatggcatcgccaccggtctgctggtgctgaaggacctgggcatccaggtggataggtacattgcctccgaggtgtgcgaggactccatcaccgtgggaatggtgcgtcatcagggcaagatcatgtacgtgggcgacgtgcggagcgtgacacagaagcatatccaggagtggggccctttcgacctggtgatcggcggcagcccttgcaatgacctgagcatcgtgaacccagcccggaagggcctgtacgagggaaccggcagactgttcttcgagttttacagactgctgcacgacgcccggcctaaggaaggcgacgaccggcccttcttttggctgttcgagaatgtggtggccatgggagtcagcgacaagcgggatattagccggttcctggagagcaaccccgtgatgatcgatgccaaggaagtgagcgccgcccaccgggccagatacttctggggcaatctgcctggcatgaacagacccctggccagcaccgtgaacgacaagctggagctgcaggagtgcctggagcacggccggatcgccaagttcagcaaggtgagaaccatcaccacccgaagcaacagcatcaaacaaggcaaggaccagcactttcctgtgttcatgaacgagaaggaggacatcctgtggtgtaccgagatggagagagtgttcgggttcccagtccactacacagatgtcagcaacatgtctagactggccagacagagactgctgggaagaagctggtccgtccctgtgatcagacacctgttcgcccctctgaaggagtacttcgcctgcgtgagcagcggcaacagcaacgccaacagccggggccccagcttctctagcggcctggtgccactgtccctgagagggagccacatgggccccatggagatctacaaaaccgtgagcgcctggaagcggcagcctgtgcgcgtgctgagcctgtttcggaatatcgataaagtcctgaaaagcctgggattcctggagagcggctctggctccggcggtggcaccctgaagtacgtggaggatgtgacaaacgtggtcagacgggatgtggagaagtggggccccttcgatctggtgtacggcagcacccaacccctgggcagctcttgtgaccggtgccctggctggtacatgtttcagttccaccggatcctgcagtacgccctgccgagacaggagtcccagcggccattcttttggattttcatggacaacttgctgctgaccgaggatgaccaggaaactaccactcggttcctgcagaccgaagccgtgaccctgcaggacgtgagaggccgggactaccagaacgccatgcgggtgtggtccaacatccctggactgaaaagcaagcacgcacctctgacccctaaagaagaggagtacctgcaggcccaggtgcggagcagaagcaagctggacgcccctaaggtggatctgctggtgaagaattgcctcctgcccctgagagagtacttcaagtatttcagccagaatagtctgcccctgggaggcagcggcggcggcccccaggagcccgtgaccttcgaggacgtggccgtgtacttcacccagaaccagtgggccagcctggaccccacccagagggccctgtacagggaggtgatgctggagaactacgccagcgtggccagcctggtggccttccccttccccaagcccgacctggtgagccagctggagaggggcgaggccccctggagccccgacccctgggaggccgaggtgctgaagggcacctgccccggcggcggcccaagcagcggcgcccctcctcccagcggcggcagcccagccggctccccaacctctaccgaggagggcacctctgagtccgccacccccgagagcggccctggcacctccaccgagcccagcgagggcagcgcacccggcagccctgccggcagccccacctccacagaggagggaaccagcaccgagcccagcgaaggcagcgccccaggcaccagcaccgagcctagtgagcaggagattaaacggatcaacaagatcagaagaagacttgtgaaagacagcaacaccaagaaggccggcaagacaggccccatgaaaaccctgctggttagagtgatgacacccgatctgagagagcggctggaaaacctgagaaagaagcctgaaaatatcccccagcccatcagcaatacatctagagccaacctgaataagctgctgaccgattacaccgaaatgaagaaggcgatcctgcatgtgtactgggaagagttccagaaggaccctgtgggcctgatgagccgggtggcccagcctgccagcaagaagatcgatcagaacaagctgaaacctgagatggacgagaagggcaacctgaccaccgccggctttgcctgctctcagtgtggccagcccctgttcgtgtacaagctggagcaggtgtctgagaagggcaaggcttacaccaactacttcggacggtgcaatgtggccgagcacgaaaagctgatcctgctggcccagctgaagcccgagaaggatagcgacgaagccgtgacatatagcctgggaaagtttgggcagagggccctggatttctacagcattcatgtgaccaaggagtccacccaccccgtgaagcccctggcccagatcgccggaaacagatacgcctccggacctgtgggaaaggccctgagcgacgcatgtatgggcacaatcgcctccttcctgtctaagtaccaggacatcatcatcgaacaccagaaggtggtgaagggcaaccagaagagactggagagcctgcgggagctggccggcaaggaaaacctggaataccctagcgtgaccctgccacctcagcctcacaccaaggagggcgttgatgcctacaacgaagtgatcgcccgggtgcgaatgtgggtgaacctgaacctgtggcagaagctgaagctaagcagagatgatgccaagcctctgctgagactgaagggattcccttcctttcctctggtcgagagacaggccaacgaagtggactggtgggacatggtgtgtaacgtgaagaagctgatcaacgagaaaaaggaggatggcaaggtgttttggcagaatctggctggctacaagagacaggaagccctgagaccatacctgagcagcgaggaagatcggaagaagggaaagaaattcgctcggtaccagctgggcgacctgctgctgcacctggaaaagaagcacggcgaggactggggaaaggtgtacgacgaggcctgggagcggattgacaagaaagtggaaggcctgagcaagcacatcaagctggaagaggaacggagaagcgaggacgcccagagcaaggccgccctgaccgactggctgcgggctaaggccagcttcgtgatcgagggcctgaaggaggccgacaaggacgagttctgcagatgcgagctgaagctgcagaagtggtacggggacctgcggggaaagcccttcgccatcgaagccgagaacagcatcctggacatcagcggcttcagcaagcagtacaactgtgccttcatctggcagaaggacggcgtgaagaagctgaacctgtacctgatcatcaactacttcaagggcggcaagctgcggttcaagaagatcaaacctgaagccttcgaagccaacagattctacaccgtgatcaacaaaaagagcggcgagatcgtgcccatggaggtgaacttcaacttcgacgaccccaacctgatcatcctgcctctggcctttggcaagagacagggcagagaattcatctggaacgacctgctgtccctggaaaccggcagcctgaagctggccaacggaagagtgatcgagaagacactgtacaacagaagaacccggcaggatgagcctgccctgttcgtggccctgaccttcgagcggcgggaggtcctggactcctccaatatcaaaccaatgaacctgatcggcgtggcaagaggcgaaaacatccccgccgtgatcgccctgaccgaccccgagggctgcccactgagccggtttaaggatagcctgggaaacccaacccacatcctgagaatcggcgagagctataaggagaagcagcggaccatccaggccaagaaggaggtggagcagcggagagccggcggctacagccggaagtacgccagcaaagccaagaatctggcagacgatatggtgagaaacaccgctagagatctgctgtactacgccgtgacccaggatgccatgctgatcttcgccaacctgagccggggcttcggccggcagggcaagcggaccttcatggccgagagacagtacacacggatggaggactggctgaccgccaagctggcctacgagggcctgagcaagacctacctgtccaagacactggcccagtacacctccaagacatgcagcaactgtgggtttaccatcaccagcgccgactacgacagggtgctggagaagctgaagaagacagcaacaggctggatgaccacaattaacggcaaggagctgaaggtggagggccagattacctactacaacagatacaagagacagaacgtagtcaaggacctgtccgtcgagctggatagactgagcgaagaatctgtgaacaacgacatctcctcctggacaaagggcagaagcggagaagctctgagcctcctgaagaaaagattctcccatagacccgtgcaggagaagttcgtgtgcctgaactgcggcttcgagacacacgcagccgagcaagccgccctgaacatcgccagatcctggctgttcctgcggagccaggagtacaagaaataccagacaaacaagacaaccggcaacaccgataagagagccttcgtcgagacctggcagtccttttaccggaagaagcttaaggaggtgtggaaacctgccgtgcggtctggcggatctggcggaggctccaccagccccaagaaaaagagaaaagtctaagctgccttctgcggggcttgccttctggccatgcccttcttctctcccttgcacctgtacctcttggtctttgaataaagcctgagtaggaaggctagcaaaaaaaaaaaaaaaaaaaaaaaaaaaaaaaaaaaaaaaaaaaaaaaaaaaaaaaaaaaaaaaaaaaaaaaaaaaaaaaa

SEQ ID NO: 12924 - RNA, 5785 nt, synthetic construct
  source 1..5785: mol_type = other RNA
aggaaataagagagaaaagaagagtaagaagaaatataagagccaccatggcccctaagaagaagcgtaaagtgagccggatggaacgcctcgtctacgaggtgcggcagaagtgcagaaacatcgaggacatctgcatctcctgcggatctctgaacgtgaccctggagcacccactgttcatcggcggcatgtgccagaactgtaaaaactgttttctggagtgtgcctatcaatacgacgatgacggctaccagagctactgcaccatctgttgcggcggaagagaggtgctgatgtgtggaaataacaactgctgccggtgcttctgcgtggaatgcgtggacctgctggtgggccccggcgccgcccaggccgctattaaggaagatccttggaactgctacatgtgcggccacaagggcacatacggcctgctgagacggagagaggactggcctagcagactgcagatgttcttcgccaataaccacgaccaggagttcgacccccctaaggtgtaccctcccgtccccgccgagaagagaaagcccatccgggtcctgagcctgttcgatggcatcgccaccggtctgctggtgctgaaggacctgggcatccaggtggataggtacattgcctccgaggtgtgcgaggactccatcaccgtgggaatggtgcgtcatcagggcaagatcatgtacgtgggcgacgtgcggagcgtgacacagaagcatatccaggagtggggccctttcgacctggtgatcggcggcagcccttgcaatgacctgagcatcgtgaacccagcccggaagggcctgtacgagggaaccggcagactgttcttcgagttttacagactgctgcacgacgcccggcctaaggaaggcgacgaccggcccttcttttggctgttcgagaatgtggtggccatgggagtcagcgacaagcgggatattagccggttcctggagagcaaccccgtgatgatcgatgccaaggaagtgagcgccgcccaccgggccagatacttctggggcaatctgcctggcatgaacagacccctggccagcaccgtgaacgacaagctggagctgcaggagtgcctggagcacggccggatcgccaagttcagcaaggtgagaaccatcaccacccgaagcaacagcatcaaacaaggcaaggaccagcactttcctgtgttcatgaacgagaaggaggacatcctgtggtgtaccgagatggagagagtgttcgggttcccagtccactacacagatgtcagcaacatgtctagactggccagacagagactgctgggaagaagctggtccgtccctgtgatcagacacctgttcgcccctctgaaggagtacttcgcctgcgtgagcagcggcaacagcaacgccaacagccggggccccagcttctctagcggcctggtgccactgtccctgagagggagccacatgggccccatggagatctacaaaaccgtgagcgcctggaagcggcagcctgtgcgcgtgctgagcctgtttcggaatatcgataaagtcctgaaaagcctgggattcctggagagcggctctggctccggcggtggcaccctgaagtacgtggaggatgtgacaaacgtggtcagacgggatgtggagaagtggggccccttcgatctggtgtacggcagcacccaacccctgggcagctcttgtgaccggtgccctggctggtacatgtttcagttccaccggatcctgcagtacgccctgccgagacaggagtcccagcggccattcttttggattttcatggacaacttgctgctgaccgaggatgaccaggaaactaccactcggttcctgcagaccgaagccgtgaccctgcaggacgtgagaggccgggactaccagaacgccatgcgggtgtggtccaacatccctggactgaaaagcaagcacgcacctctgacccctaaagaagaggagtacctgcaggcccaggtgcggagcagaagcaagctggacgcccctaaggtggatctgctggtgaagaattgcctcctgcccctgagagagtacttcaagtatttcagccagaatagtctgcccctgggaggcagcggcggcggcatgggcctggtgagcttcgaggacatcgccgtgtacttcaacctggaggagtggcaggacctggacaccgcccagaggaccctgtacagggacgtgatgctggagacctacagcagcctggtgttcctggacccctgcatcgccaagcccaagctgatcttcaacctggagaggggcttcggcccctggagcctggccgaggccagcagcaggagcctgcccggcgtgcacaacgtgagcaccggcggcccaagcagcggcgcccctcctcccagcggcggcagcccagccggctccccaacctctaccgaggagggcacctctgagtccgccacccccgagagcggccctggcacctccaccgagcccagcgagggcagcgcacccggcagccctgccggcagccccacctccacagaggagggaaccagcaccgagcccagcgaaggcagcgccccaggcaccagcaccgagcctagtgagcaggagattaaacggatcaacaagatcagaagaagacttgtgaaagacagcaacaccaagaaggccggcaagacaggccccatgaaaaccctgctggttagagtgatgacacccgatctgagagagcggctggaaaacctgagaaagaagcctgaaaatatcccccagcccatcagcaatacatctagagccaacctgaataagctgctgaccgattacaccgaaatgaagaaggcgatcctgcatgtgtactgggaagagttccagaaggaccctgtgggcctgatgagccgggtggcccagcctgccagcaagaagatcgatcagaacaagctgaaacctgagatggacgagaagggcaacctgaccaccgccggctttgcctgctctcagtgtggccagcccctgttcgtgtacaagctggagcaggtgtctgagaagggcaaggcttacaccaactacttcggacggtgcaatgtggccgagcacgaaaagctgatcctgctggcccagctgaagcccgagaaggatagcgacgaagccgtgacatatagcctgggaaagtttgggcagagggccctggatttctacagcattcatgtgaccaaggagtccacccaccccgtgaagcccctggcccagatcgccggaaacagatacgcctccggacctgtgggaaaggccctgagcgacgcatgtatgggcacaatcgcctccttcctgtctaagtaccaggacatcatcatcgaacaccagaaggtggtgaagggcaaccagaagagactggagagcctgcgggagctggccggcaaggaaaacctggaataccctagcgtgaccctgccacctcagcctcacaccaaggagggcgttgatgcctacaacgaagtgatcgcccgggtgcgaatgtgggtgaacctgaacctgtggcagaagctgaagctaagcagagatgatgccaagcctctgctgagactgaagggattcccttcctttcctctggtcgagagacaggccaacgaagtggactggtgggacatggtgtgtaacgtgaagaagctgatcaacgagaaaaaggaggatggcaaggtgttttggcagaatctggctggctacaagagacaggaagccctgagaccatacctgagcagcgaggaagatcggaagaagggaaagaaattcgctcggtaccagctgggcgacctgctgctgcacctggaaaagaagcacggcgaggactggggaaaggtgtacgacgaggcctgggagcggattgacaagaaagtggaaggcctgagcaagcacatcaagctggaagaggaacggagaagcgaggacgcccagagcaaggccgccctgaccgactggctgcgggctaaggccagcttcgtgatcgagggcctgaaggaggccgacaaggacgagttctgcagatgcgagctgaagctgcagaagtggtacggggacctgcggggaaagcccttcgccatcgaagccgagaacagcatcctggacatcagcggcttcagcaagcagtacaactgtgccttcatctggcagaaggacggcgtgaagaagctgaacctgtacctgatcatcaactacttcaagggcggcaagctgcggttcaagaagatcaaacctgaagccttcgaagccaacagattctacaccgtgatcaacaaaaagagcggcgagatcgtgcccatggaggtgaacttcaacttcgacgaccccaacctgatcatcctgcctctggcctttggcaagagacagggcagagaattcatctggaacgacctgctgtccctggaaaccggcagcctgaagctggccaacggaagagtgatcgagaagacactgtacaacagaagaacccggcaggatgagcctgccctgttcgtggccctgaccttcgagcggcgggaggtcctggactcctccaatatcaaaccaatgaacctgatcggcgtggcaagaggcgaaaacatccccgccgtgatcgccctgaccgaccccgagggctgcccactgagccggtttaaggatagcctgggaaacccaacccacatcctgagaatcggcgagagctataaggagaagcagcggaccatccaggccaagaaggaggtggagcagcggagagccggcggctacagccggaagtacgccagcaaagccaagaatctggcagacgatatggtgagaaacaccgctagagatctgctgtactacgccgtgacccaggatgccatgctgatcttcgccaacctgagccggggcttcggccggcagggcaagcggaccttcatggccgagagacagtacacacggatggaggactggctgaccgccaagctggcctacgagggcctgagcaagacctacctgtccaagacactggcccagtacacctccaagacatgcagcaactgtgggtttaccatcaccagcgccgactacgacagggtgctggagaagctgaagaagacagcaacaggctggatgaccacaattaacggcaaggagctgaaggtggagggccagattacctactacaacagatacaagagacagaacgtagtcaaggacctgtccgtcgagctggatagactgagcgaagaatctgtgaacaacgacatctcctcctggacaaagggcagaagcggagaagctctgagcctcctgaagaaaagattctcccatagacccgtgcaggagaagttcgtgtgcctgaactgcggcttcgagacacacgcagccgagcaagccgccctgaacatcgccagatcctggctgttcctgcggagccaggagtacaagaaataccagacaaacaagacaaccggcaacaccgataagagagccttcgtcgagacctggcagtccttttaccggaagaagcttaaggaggtgtggaaacctgccgtgcggtctggcggatctggcggaggctccaccagccccaagaaaaagagaaaagtctaagctgccttctgcggggcttgccttctggccatgcccttcttctctcccttgcacctgtacctcttggtctttgaataaagcctgagtaggaaggctagcaaaaaaaaaaaaaaaaaaaaaaaaaaaaaaaaaaaaaaaaaaaaaaaaaaaaaaaaaaaaaaaaaaaaaaaaaaaaaaaa

SEQ ID NO: 12925 - RNA, 5785 nt, synthetic construct
  source 1..5785: mol_type = other RNA
aggaaataagagagaaaagaagagtaagaagaaatataagagccaccatggcccctaagaagaagcgtaaagtgagccggatggaacgcctcgtctacgaggtgcggcagaagtgcagaaacatcgaggacatctgcatctcctgcggatctctgaacgtgaccctggagcacccactgttcatcggcggcatgtgccagaactgtaaaaactgttttctggagtgtgcctatcaatacgacgatgacggctaccagagctactgcaccatctgttgcggcggaagagaggtgctgatgtgtggaaataacaactgctgccggtgcttctgcgtggaatgcgtggacctgctggtgggccccggcgccgcccaggccgctattaaggaagatccttggaactgctacatgtgcggccacaagggcacatacggcctgctgagacggagagaggactggcctagcagactgcagatgttcttcgccaataaccacgaccaggagttcgacccccctaaggtgtaccctcccgtccccgccgagaagagaaagcccatccgggtcctgagcctgttcgatggcatcgccaccggtctgctggtgctgaaggacctgggcatccaggtggataggtacattgcctccgaggtgtgcgaggactccatcaccgtgggaatggtgcgtcatcagggcaagatcatgtacgtgggcgacgtgcggagcgtgacacagaagcatatccaggagtggggccctttcgacctggtgatcggcggcagcccttgcaatgacctgagcatcgtgaacccagcccggaagggcctgtacgagggaaccggcagactgttcttcgagttttacagactgctgcacgacgcccggcctaaggaaggcgacgaccggcccttcttttggctgttcgagaatgtggtggccatgggagtcagcgacaagcgggatattagccggttcctggagagcaaccccgtgatgatcgatgccaaggaagtgagcgccgcccaccgggccagatacttctggggcaatctgcctggcatgaacagacccctggccagcaccgtgaacgacaagctggagctgcaggagtgcctggagcacggccggatcgccaagttcagcaaggtgagaaccatcaccacccgaagcaacagcatcaaacaaggcaaggaccagcactttcctgtgttcatgaacgagaaggaggacatcctgtggtgtaccgagatggagagagtgttcgggttcccagtccactacacagatgtcagcaacatgtctagactggccagacagagactgctgggaagaagctggtccgtccctgtgatcagacacctgttcgcccctctgaaggagtacttcgcctgcgtgagcagcggcaacagcaacgccaacagccggggccccagcttctctagcggcctggtgccactgtccctgagagggagccacatgggccccatggagatctacaaaaccgtgagcgcctggaagcggcagcctgtgcgcgtgctgagcctgtttcggaatatcgataaagtcctgaaaagcctgggattcctggagagcggctctggctccggcggtggcaccctgaagtacgtggaggatgtgacaaacgtggtcagacgggatgtggagaagtggggccccttcgatctggtgtacggcagcacccaacccctgggcagctcttgtgaccggtgccctggctggtacatgtttcagttccaccggatcctgcagtacgccctgccgagacaggagtcccagcggccattcttttggattttcatggacaacttgctgctgaccgaggatgaccaggaaactaccactcggttcctgcagaccgaagccgtgaccctgcaggacgtgagaggccgggactaccagaacgccatgcgggtgtggtccaacatccctggactgaaaagcaagcacgcacctctgacccctaaagaagaggagtacctgcaggcccaggtgcggagcagaagcaagctggacgcccctaaggtggatctgctggtgaagaattgcctcctgcccctgagagagtacttcaagtatttcagccagaatagtctgcccctgggaggcagcggcggcggcatggagagcctgaccctggaggacgtggccgtggacttcacctgggaggagtggcagttcctgagccccgcccagaaggacctgtacagggacgtgatgctggagaactacagcaacctggtggccgtgggctaccaggccaggaagcccgacgccctgagcaagctggagaggggcgaggagccctgcaccaccgaggacgagatctacgccaggatctgcagcgacagcggcggcgccagcggcggcccaagcagcggcgcccctcctcccagcggcggcagcccagccggctccccaacctctaccgaggagggcacctctgagtccgccacccccgagagcggccctggcacctccaccgagcccagcgagggcagcgcacccggcagccctgccggcagccccacctccacagaggagggaaccagcaccgagcccagcgaaggcagcgccccaggcaccagcaccgagcctagtgagcaggagattaaacggatcaacaagatcagaagaagacttgtgaaagacagcaacaccaagaaggccggcaagacaggccccatgaaaaccctgctggttagagtgatgacacccgatctgagagagcggctggaaaacctgagaaagaagcctgaaaatatcccccagcccatcagcaatacatctagagccaacctgaataagctgctgaccgattacaccgaaatgaagaaggcgatcctgcatgtgtactgggaagagttccagaaggaccctgtgggcctgatgagccgggtggcccagcctgccagcaagaagatcgatcagaacaagctgaaacctgagatggacgagaagggcaacctgaccaccgccggctttgcctgctctcagtgtggccagcccctgttcgtgtacaagctggagcaggtgtctgagaagggcaaggcttacaccaactacttcggacggtgcaatgtggccgagcacgaaaagctgatcctgctggcccagctgaagcccgagaaggatagcgacgaagccgtgacatatagcctgggaaagtttgggcagagggccctggatttctacagcattcatgtgaccaaggagtccacccaccccgtgaagcccctggcccagatcgccggaaacagatacgcctccggacctgtgggaaaggccctgagcgacgcatgtatgggcacaatcgcctccttcctgtctaagtaccaggacatcatcatcgaacaccagaaggtggtgaagggcaaccagaagagactggagagcctgcgggagctggccggcaaggaaaacctggaataccctagcgtgaccctgccacctcagcctcacaccaaggagggcgttgatgcctacaacgaagtgatcgcccgggtgcgaatgtgggtgaacctgaacctgtggcagaagctgaagctaagcagagatgatgccaagcctctgctgagactgaagggattcccttcctttcctctggtcgagagacaggccaacgaagtggactggtgggacatggtgtgtaacgtgaagaagctgatcaacgagaaaaaggaggatggcaaggtgttttggcagaatctggctggctacaagagacaggaagccctgagaccatacctgagcagcgaggaagatcggaagaagggaaagaaattcgctcggtaccagctgggcgacctgctgctgcacctggaaaagaagcacggcgaggactggggaaaggtgtacgacgaggcctgggagcggattgacaagaaagtggaaggcctgagcaagcacatcaagctggaagaggaacggagaagcgaggacgcccagagcaaggccgccctgaccgactggctgcgggctaaggccagcttcgtgatcgagggcctgaaggaggccgacaaggacgagttctgcagatgcgagctgaagctgcagaagtggtacggggacctgcggggaaagcccttcgccatcgaagccgagaacagcatcctggacatcagcggcttcagcaagcagtacaactgtgccttcatctggcagaaggacggcgtgaagaagctgaacctgtacctgatcatcaactacttcaagggcggcaagctgcggttcaagaagatcaaacctgaagccttcgaagccaacagattctacaccgtgatcaacaaaaagagcggcgagatcgtgcccatggaggtgaacttcaacttcgacgaccccaacctgatcatcctgcctctggcctttggcaagagacagggcagagaattcatctggaacgacctgctgtccctggaaaccggcagcctgaagctggccaacggaagagtgatcgagaagacactgtacaacagaagaacccggcaggatgagcctgccctgttcgtggccctgaccttcgagcggcgggaggtcctggactcctccaatatcaaaccaatgaacctgatcggcgtggcaagaggcgaaaacatccccgccgtgatcgccctgaccgaccccgagggctgcccactgagccggtttaaggatagcctgggaaacccaacccacatcctgagaatcggcgagagctataaggagaagcagcggaccatccaggccaagaaggaggtggagcagcggagagccggcggctacagccggaagtacgccagcaaagccaagaatctggcagacgatatggtgagaaacaccgctagagatctgctgtactacgccgtgacccaggatgccatgctgatcttcgccaacctgagccggggcttcggccggcagggcaagcggaccttcatggccgagagacagtacacacggatggaggactggctgaccgccaagctggcctacgagggcctgagcaagacctacctgtccaagacactggcccagtacacctccaagacatgcagcaactgtgggtttaccatcaccagcgccgactacgacagggtgctggagaagctgaagaagacagcaacaggctggatgaccacaattaacggcaaggagctgaaggtggagggccagattacctactacaacagatacaagagacagaacgtagtcaaggacctgtccgtcgagctggatagactgagcgaagaatctgtgaacaacgacatctcctcctggacaaagggcagaagcggagaagctctgagcctcctgaagaaaagattctcccatagacccgtgcaggagaagttcgtgtgcctgaactgcggcttcgagacacacgcagccgagcaagccgccctgaacatcgccagatcctggctgttcctgcggagccaggagtacaagaaataccagacaaacaagacaaccggcaacaccgataagagagccttcgtcgagacctggcagtccttttaccggaagaagcttaaggaggtgtggaaacctgccgtgcggtctggcggatctggcggaggctccaccagccccaagaaaaagagaaaagtctaagctgccttctgcggggcttgccttctggccatgcccttcttctctcccttgcacctgtacctcttggtctttgaataaagcctgagtaggaaggctagcaaaaaaaaaaaaaaaaaaaaaaaaaaaaaaaaaaaaaaaaaaaaaaaaaaaaaaaaaaaaaaaaaaaaaaaaaaaaaaaa

SEQ ID NO: 12926 - RNA, 5785 nt, synthetic construct
  source 1..5785: mol_type = other RNA
aggaaataagagagaaaagaagagtaagaagaaatataagagccaccatggcccctaagaagaagcgtaaagtgagccggatggaacgcctcgtctacgaggtgcggcagaagtgcagaaacatcgaggacatctgcatctcctgcggatctctgaacgtgaccctggagcacccactgttcatcggcggcatgtgccagaactgtaaaaactgttttctggagtgtgcctatcaatacgacgatgacggctaccagagctactgcaccatctgttgcggcggaagagaggtgctgatgtgtggaaataacaactgctgccggtgcttctgcgtggaatgcgtggacctgctggtgggccccggcgccgcccaggccgctattaaggaagatccttggaactgctacatgtgcggccacaagggcacatacggcctgctgagacggagagaggactggcctagcagactgcagatgttcttcgccaataaccacgaccaggagttcgacccccctaaggtgtaccctcccgtccccgccgagaagagaaagcccatccgggtcctgagcctgttcgatggcatcgccaccggtctgctggtgctgaaggacctgggcatccaggtggataggtacattgcctccgaggtgtgcgaggactccatcaccgtgggaatggtgcgtcatcagggcaagatcatgtacgtgggcgacgtgcggagcgtgacacagaagcatatccaggagtggggccctttcgacctggtgatcggcggcagcccttgcaatgacctgagcatcgtgaacccagcccggaagggcctgtacgagggaaccggcagactgttcttcgagttttacagactgctgcacgacgcccggcctaaggaaggcgacgaccggcccttcttttggctgttcgagaatgtggtggccatgggagtcagcgacaagcgggatattagccggttcctggagagcaaccccgtgatgatcgatgccaaggaagtgagcgccgcccaccgggccagatacttctggggcaatctgcctggcatgaacagacccctggccagcaccgtgaacgacaagctggagctgcaggagtgcctggagcacggccggatcgccaagttcagcaaggtgagaaccatcaccacccgaagcaacagcatcaaacaaggcaaggaccagcactttcctgtgttcatgaacgagaaggaggacatcctgtggtgtaccgagatggagagagtgttcgggttcccagtccactacacagatgtcagcaacatgtctagactggccagacagagactgctgggaagaagctggtccgtccctgtgatcagacacctgttcgcccctctgaaggagtacttcgcctgcgtgagcagcggcaacagcaacgccaacagccggggccccagcttctctagcggcctggtgccactgtccctgagagggagccacatgggccccatggagatctacaaaaccgtgagcgcctggaagcggcagcctgtgcgcgtgctgagcctgtttcggaatatcgataaagtcctgaaaagcctgggattcctggagagcggctctggctccggcggtggcaccctgaagtacgtggaggatgtgacaaacgtggtcagacgggatgtggagaagtggggccccttcgatctggtgtacggcagcacccaacccctgggcagctcttgtgaccggtgccctggctggtacatgtttcagttccaccggatcctgcagtacgccctgccgagacaggagtcccagcggccattcttttggattttcatggacaacttgctgctgaccgaggatgaccaggaaactaccactcggttcctgcagaccgaagccgtgaccctgcaggacgtgagaggccgggactaccagaacgccatgcgggtgtggtccaacatccctggactgaaaagcaagcacgcacctctgacccctaaagaagaggagtacctgcaggcccaggtgcggagcagaagcaagctggacgcccctaaggtggatctgctggtgaagaattgcctcctgcccctgagagagtacttcaagtatttcagccagaatagtctgcccctgggaggcagcggcggcggccaggccggcagcgacctgttcagggacgtggccatcgtgttcagccaggaggagtgggagcagctggcccccacccagagggacctgtacagggacgtgatgctggagacctacagcaacctggtgagcctgggcctggccgtgagcaagcccgacgtgatcgccttcctggagcagggcagggagccctggaccgtggagggcgtggccaccggcggcctgtgccccgtgctgaagagcaggggcggcccaagcagcggcgcccctcctcccagcggcggcagcccagccggctccccaacctctaccgaggagggcacctctgagtccgccacccccgagagcggccctggcacctccaccgagcccagcgagggcagcgcacccggcagccctgccggcagccccacctccacagaggagggaaccagcaccgagcccagcgaaggcagcgccccaggcaccagcaccgagcctagtgagcaggagattaaacggatcaacaagatcagaagaagacttgtgaaagacagcaacaccaagaaggccggcaagacaggccccatgaaaaccctgctggttagagtgatgacacccgatctgagagagcggctggaaaacctgagaaagaagcctgaaaatatcccccagcccatcagcaatacatctagagccaacctgaataagctgctgaccgattacaccgaaatgaagaaggcgatcctgcatgtgtactgggaagagttccagaaggaccctgtgggcctgatgagccgggtggcccagcctgccagcaagaagatcgatcagaacaagctgaaacctgagatggacgagaagggcaacctgaccaccgccggctttgcctgctctcagtgtggccagcccctgttcgtgtacaagctggagcaggtgtctgagaagggcaaggcttacaccaactacttcggacggtgcaatgtggccgagcacgaaaagctgatcctgctggcccagctgaagcccgagaaggatagcgacgaagccgtgacatatagcctgggaaagtttgggcagagggccctggatttctacagcattcatgtgaccaaggagtccacccaccccgtgaagcccctggcccagatcgccggaaacagatacgcctccggacctgtgggaaaggccctgagcgacgcatgtatgggcacaatcgcctccttcctgtctaagtaccaggacatcatcatcgaacaccagaaggtggtgaagggcaaccagaagagactggagagcctgcgggagctggccggcaaggaaaacctggaataccctagcgtgaccctgccacctcagcctcacaccaaggagggcgttgatgcctacaacgaagtgatcgcccgggtgcgaatgtgggtgaacctgaacctgtggcagaagctgaagctaagcagagatgatgccaagcctctgctgagactgaagggattcccttcctttcctctggtcgagagacaggccaacgaagtggactggtgggacatggtgtgtaacgtgaagaagctgatcaacgagaaaaaggaggatggcaaggtgttttggcagaatctggctggctacaagagacaggaagccctgagaccatacctgagcagcgaggaagatcggaagaagggaaagaaattcgctcggtaccagctgggcgacctgctgctgcacctggaaaagaagcacggcgaggactggggaaaggtgtacgacgaggcctgggagcggattgacaagaaagtggaaggcctgagcaagcacatcaagctggaagaggaacggagaagcgaggacgcccagagcaaggccgccctgaccgactggctgcgggctaaggccagcttcgtgatcgagggcctgaaggaggccgacaaggacgagttctgcagatgcgagctgaagctgcagaagtggtacggggacctgcggggaaagcccttcgccatcgaagccgagaacagcatcctggacatcagcggcttcagcaagcagtacaactgtgccttcatctggcagaaggacggcgtgaagaagctgaacctgtacctgatcatcaactacttcaagggcggcaagctgcggttcaagaagatcaaacctgaagccttcgaagccaacagattctacaccgtgatcaacaaaaagagcggcgagatcgtgcccatggaggtgaacttcaacttcgacgaccccaacctgatcatcctgcctctggcctttggcaagagacagggcagagaattcatctggaacgacctgctgtccctggaaaccggcagcctgaagctggccaacggaagagtgatcgagaagacactgtacaacagaagaacccggcaggatgagcctgccctgttcgtggccctgaccttcgagcggcgggaggtcctggactcctccaatatcaaaccaatgaacctgatcggcgtggcaagaggcgaaaacatccccgccgtgatcgccctgaccgaccccgagggctgcccactgagccggtttaaggatagcctgggaaacccaacccacatcctgagaatcggcgagagctataaggagaagcagcggaccatccaggccaagaaggaggtggagcagcggagagccggcggctacagccggaagtacgccagcaaagccaagaatctggcagacgatatggtgagaaacaccgctagagatctgctgtactacgccgtgacccaggatgccatgctgatcttcgccaacctgagccggggcttcggccggcagggcaagcggaccttcatggccgagagacagtacacacggatggaggactggctgaccgccaagctggcctacgagggcctgagcaagacctacctgtccaagacactggcccagtacacctccaagacatgcagcaactgtgggtttaccatcaccagcgccgactacgacagggtgctggagaagctgaagaagacagcaacaggctggatgaccacaattaacggcaaggagctgaaggtggagggccagattacctactacaacagatacaagagacagaacgtagtcaaggacctgtccgtcgagctggatagactgagcgaagaatctgtgaacaacgacatctcctcctggacaaagggcagaagcggagaagctctgagcctcctgaagaaaagattctcccatagacccgtgcaggagaagttcgtgtgcctgaactgcggcttcgagacacacgcagccgagcaagccgccctgaacatcgccagatcctggctgttcctgcggagccaggagtacaagaaataccagacaaacaagacaaccggcaacaccgataagagagccttcgtcgagacctggcagtccttttaccggaagaagcttaaggaggtgtggaaacctgccgtgcggtctggcggatctggcggaggctccaccagccccaagaaaaagagaaaagtctaagctgccttctgcggggcttgccttctggccatgcccttcttctctcccttgcacctgtacctcttggtctttgaataaagcctgagtaggaaggctagcaaaaaaaaaaaaaaaaaaaaaaaaaaaaaaaaaaaaaaaaaaaaaaaaaaaaaaaaaaaaaaaaaaaaaaaaaaaaaaaa

SEQ ID NO: 12927 - RNA, 5785 nt, synthetic construct
  source 1..5785: mol_type = other RNA
aggaaataagagagaaaagaagagtaagaagaaatataagagccaccatggcccctaagaagaagcgtaaagtgagccggatggaacgcctcgtctacgaggtgcggcagaagtgcagaaacatcgaggacatctgcatctcctgcggatctctgaacgtgaccctggagcacccactgttcatcggcggcatgtgccagaactgtaaaaactgttttctggagtgtgcctatcaatacgacgatgacggctaccagagctactgcaccatctgttgcggcggaagagaggtgctgatgtgtggaaataacaactgctgccggtgcttctgcgtggaatgcgtggacctgctggtgggccccggcgccgcccaggccgctattaaggaagatccttggaactgctacatgtgcggccacaagggcacatacggcctgctgagacggagagaggactggcctagcagactgcagatgttcttcgccaataaccacgaccaggagttcgacccccctaaggtgtaccctcccgtccccgccgagaagagaaagcccatccgggtcctgagcctgttcgatggcatcgccaccggtctgctggtgctgaaggacctgggcatccaggtggataggtacattgcctccgaggtgtgcgaggactccatcaccgtgggaatggtgcgtcatcagggcaagatcatgtacgtgggcgacgtgcggagcgtgacacagaagcatatccaggagtggggccctttcgacctggtgatcggcggcagcccttgcaatgacctgagcatcgtgaacccagcccggaagggcctgtacgagggaaccggcagactgttcttcgagttttacagactgctgcacgacgcccggcctaaggaaggcgacgaccggcccttcttttggctgttcgagaatgtggtggccatgggagtcagcgacaagcgggatattagccggttcctggagagcaaccccgtgatgatcgatgccaaggaagtgagcgccgcccaccgggccagatacttctggggcaatctgcctggcatgaacagacccctggccagcaccgtgaacgacaagctggagctgcaggagtgcctggagcacggccggatcgccaagttcagcaaggtgagaaccatcaccacccgaagcaacagcatcaaacaaggcaaggaccagcactttcctgtgttcatgaacgagaaggaggacatcctgtggtgtaccgagatggagagagtgttcgggttcccagtccactacacagatgtcagcaacatgtctagactggccagacagagactgctgggaagaagctggtccgtccctgtgatcagacacctgttcgcccctctgaaggagtacttcgcctgcgtgagcagcggcaacagcaacgccaacagccggggccccagcttctctagcggcctggtgccactgtccctgagagggagccacatgggccccatggagatctacaaaaccgtgagcgcctggaagcggcagcctgtgcgcgtgctgagcctgtttcggaatatcgataaagtcctgaaaagcctgggattcctggagagcggctctggctccggcggtggcaccctgaagtacgtggaggatgtgacaaacgtggtcagacgggatgtggagaagtggggccccttcgatctggtgtacggcagcacccaacccctgggcagctcttgtgaccggtgccctggctggtacatgtttcagttccaccggatcctgcagtacgccctgccgagacaggagtcccagcggccattcttttggattttcatggacaacttgctgctgaccgaggatgaccaggaaactaccactcggttcctgcagaccgaagccgtgaccctgcaggacgtgagaggccgggactaccagaacgccatgcgggtgtggtccaacatccctggactgaaaagcaagcacgcacctctgacccctaaagaagaggagtacctgcaggcccaggtgcggagcagaagcaagctggacgcccctaaggtggatctgctggtgaagaattgcctcctgcccctgagagagtacttcaagtatttcagccagaatagtctgcccctgggaggcagcggcggcggcatggacagcgtggccttcgaggacgtggccgtgaacttcacccacgaggagtgggccctgctgagccccagccagaagaacctgtacagggacgtgatgagggagaccatcaggaacctgaactgcatcggcatgaagtgggagaaccagaacatcgacgaccagtaccagaacctgaggaggaaccccaggtgcgacgtggtggagaggttcggcaagagcaaggacggcagccagtgcggcggcggcccaagcagcggcgcccctcctcccagcggcggcagcccagccggctccccaacctctaccgaggagggcacctctgagtccgccacccccgagagcggccctggcacctccaccgagcccagcgagggcagcgcacccggcagccctgccggcagccccacctccacagaggagggaaccagcaccgagcccagcgaaggcagcgccccaggcaccagcaccgagcctagtgagcaggagattaaacggatcaacaagatcagaagaagacttgtgaaagacagcaacaccaagaaggccggcaagacaggccccatgaaaaccctgctggttagagtgatgacacccgatctgagagagcggctggaaaacctgagaaagaagcctgaaaatatcccccagcccatcagcaatacatctagagccaacctgaataagctgctgaccgattacaccgaaatgaagaaggcgatcctgcatgtgtactgggaagagttccagaaggaccctgtgggcctgatgagccgggtggcccagcctgccagcaagaagatcgatcagaacaagctgaaacctgagatggacgagaagggcaacctgaccaccgccggctttgcctgctctcagtgtggccagcccctgttcgtgtacaagctggagcaggtgtctgagaagggcaaggcttacaccaactacttcggacggtgcaatgtggccgagcacgaaaagctgatcctgctggcccagctgaagcccgagaaggatagcgacgaagccgtgacatatagcctgggaaagtttgggcagagggccctggatttctacagcattcatgtgaccaaggagtccacccaccccgtgaagcccctggcccagatcgccggaaacagatacgcctccggacctgtgggaaaggccctgagcgacgcatgtatgggcacaatcgcctccttcctgtctaagtaccaggacatcatcatcgaacaccagaaggtggtgaagggcaaccagaagagactggagagcctgcgggagctggccggcaaggaaaacctggaataccctagcgtgaccctgccacctcagcctcacaccaaggagggcgttgatgcctacaacgaagtgatcgcccgggtgcgaatgtgggtgaacctgaacctgtggcagaagctgaagctaagcagagatgatgccaagcctctgctgagactgaagggattcccttcctttcctctggtcgagagacaggccaacgaagtggactggtgggacatggtgtgtaacgtgaagaagctgatcaacgagaaaaaggaggatggcaaggtgttttggcagaatctggctggctacaagagacaggaagccctgagaccatacctgagcagcgaggaagatcggaagaagggaaagaaattcgctcggtaccagctgggcgacctgctgctgcacctggaaaagaagcacggcgaggactggggaaaggtgtacgacgaggcctgggagcggattgacaagaaagtggaaggcctgagcaagcacatcaagctggaagaggaacggagaagcgaggacgcccagagcaaggccgccctgaccgactggctgcgggctaaggccagcttcgtgatcgagggcctgaaggaggccgacaaggacgagttctgcagatgcgagctgaagctgcagaagtggtacggggacctgcggggaaagcccttcgccatcgaagccgagaacagcatcctggacatcagcggcttcagcaagcagtacaactgtgccttcatctggcagaaggacggcgtgaagaagctgaacctgtacctgatcatcaactacttcaagggcggcaagctgcggttcaagaagatcaaacctgaagccttcgaagccaacagattctacaccgtgatcaacaaaaagagcggcgagatcgtgcccatggaggtgaacttcaacttcgacgaccccaacctgatcatcctgcctctggcctttggcaagagacagggcagagaattcatctggaacgacctgctgtccctggaaaccggcagcctgaagctggccaacggaagagtgatcgagaagacactgtacaacagaagaacccggcaggatgagcctgccctgttcgtggccctgaccttcgagcggcgggaggtcctggactcctccaatatcaaaccaatgaacctgatcggcgtggcaagaggcgaaaacatccccgccgtgatcgccctgaccgaccccgagggctgcccactgagccggtttaaggatagcctgggaaacccaacccacatcctgagaatcggcgagagctataaggagaagcagcggaccatccaggccaagaaggaggtggagcagcggagagccggcggctacagccggaagtacgccagcaaagccaagaatctggcagacgatatggtgagaaacaccgctagagatctgctgtactacgccgtgacccaggatgccatgctgatcttcgccaacctgagccggggcttcggccggcagggcaagcggaccttcatggccgagagacagtacacacggatggaggactggctgaccgccaagctggcctacgagggcctgagcaagacctacctgtccaagacactggcccagtacacctccaagacatgcagcaactgtgggtttaccatcaccagcgccgactacgacagggtgctggagaagctgaagaagacagcaacaggctggatgaccacaattaacggcaaggagctgaaggtggagggccagattacctactacaacagatacaagagacagaacgtagtcaaggacctgtccgtcgagctggatagactgagcgaagaatctgtgaacaacgacatctcctcctggacaaagggcagaagcggagaagctctgagcctcctgaagaaaagattctcccatagacccgtgcaggagaagttcgtgtgcctgaactgcggcttcgagacacacgcagccgagcaagccgccctgaacatcgccagatcctggctgttcctgcggagccaggagtacaagaaataccagacaaacaagacaaccggcaacaccgataagagagccttcgtcgagacctggcagtccttttaccggaagaagcttaaggaggtgtggaaacctgccgtgcggtctggcggatctggcggaggctccaccagccccaagaaaaagagaaaagtctaagctgccttctgcggggcttgccttctggccatgcccttcttctctcccttgcacctgtacctcttggtctttgaataaagcctgagtaggaaggctagcaaaaaaaaaaaaaaaaaaaaaaaaaaaaaaaaaaaaaaaaaaaaaaaaaaaaaaaaaaaaaaaaaaaaaaaaaaaaaaaa

SEQ ID NO: 12928 - RNA, 5785 nt, synthetic construct
  source 1..5785: mol_type = other RNA
aggaaataagagagaaaagaagagtaagaagaaatataagagccaccatggcccctaagaagaagcgtaaagtgagccggatggaacgcctcgtctacgaggtgcggcagaagtgcagaaacatcgaggacatctgcatctcctgcggatctctgaacgtgaccctggagcacccactgttcatcggcggcatgtgccagaactgtaaaaactgttttctggagtgtgcctatcaatacgacgatgacggctaccagagctactgcaccatctgttgcggcggaagagaggtgctgatgtgtggaaataacaactgctgccggtgcttctgcgtggaatgcgtggacctgctggtgggccccggcgccgcccaggccgctattaaggaagatccttggaactgctacatgtgcggccacaagggcacatacggcctgctgagacggagagaggactggcctagcagactgcagatgttcttcgccaataaccacgaccaggagttcgacccccctaaggtgtaccctcccgtccccgccgagaagagaaagcccatccgggtcctgagcctgttcgatggcatcgccaccggtctgctggtgctgaaggacctgggcatccaggtggataggtacattgcctccgaggtgtgcgaggactccatcaccgtgggaatggtgcgtcatcagggcaagatcatgtacgtgggcgacgtgcggagcgtgacacagaagcatatccaggagtggggccctttcgacctggtgatcggcggcagcccttgcaatgacctgagcatcgtgaacccagcccggaagggcctgtacgagggaaccggcagactgttcttcgagttttacagactgctgcacgacgcccggcctaaggaaggcgacgaccggcccttcttttggctgttcgagaatgtggtggccatgggagtcagcgacaagcgggatattagccggttcctggagagcaaccccgtgatgatcgatgccaaggaagtgagcgccgcccaccgggccagatacttctggggcaatctgcctggcatgaacagacccctggccagcaccgtgaacgacaagctggagctgcaggagtgcctggagcacggccggatcgccaagttcagcaaggtgagaaccatcaccacccgaagcaacagcatcaaacaaggcaaggaccagcactttcctgtgttcatgaacgagaaggaggacatcctgtggtgtaccgagatggagagagtgttcgggttcccagtccactacacagatgtcagcaacatgtctagactggccagacagagactgctgggaagaagctggtccgtccctgtgatcagacacctgttcgcccctctgaaggagtacttcgcctgcgtgagcagcggcaacagcaacgccaacagccggggccccagcttctctagcggcctggtgccactgtccctgagagggagccacatgggccccatggagatctacaaaaccgtgagcgcctggaagcggcagcctgtgcgcgtgctgagcctgtttcggaatatcgataaagtcctgaaaagcctgggattcctggagagcggctctggctccggcggtggcaccctgaagtacgtggaggatgtgacaaacgtggtcagacgggatgtggagaagtggggccccttcgatctggtgtacggcagcacccaacccctgggcagctcttgtgaccggtgccctggctggtacatgtttcagttccaccggatcctgcagtacgccctgccgagacaggagtcccagcggccattcttttggattttcatggacaacttgctgctgaccgaggatgaccaggaaactaccactcggttcctgcagaccgaagccgtgaccctgcaggacgtgagaggccgggactaccagaacgccatgcgggtgtggtccaacatccctggactgaaaagcaagcacgcacctctgacccctaaagaagaggagtacctgcaggcccaggtgcggagcagaagcaagctggacgcccctaaggtggatctgctggtgaagaattgcctcctgcccctgagagagtacttcaagtatttcagccagaatagtctgcccctgggaggcagcggcggcggcttccagggcagcgtgaccttcgaggacgtggccatcgccttcagccagcaggagtgggagagcctggacagcagccagaggggcctgtacagggacgtgatgctggagaactacaggaacctggtgagcatgggccacagcctgagcaagccccacgtgatcgccctgctggagaggtggaaggagcccaaggtgaccgacaggaaggacggcaggaggtggtgcaccgacctgcagctggagggcggcccaagcagcggcgcccctcctcccagcggcggcagcccagccggctccccaacctctaccgaggagggcacctctgagtccgccacccccgagagcggccctggcacctccaccgagcccagcgagggcagcgcacccggcagccctgccggcagccccacctccacagaggagggaaccagcaccgagcccagcgaaggcagcgccccaggcaccagcaccgagcctagtgagcaggagattaaacggatcaacaagatcagaagaagacttgtgaaagacagcaacaccaagaaggccggcaagacaggccccatgaaaaccctgctggttagagtgatgacacccgatctgagagagcggctggaaaacctgagaaagaagcctgaaaatatcccccagcccatcagcaatacatctagagccaacctgaataagctgctgaccgattacaccgaaatgaagaaggcgatcctgcatgtgtactgggaagagttccagaaggaccctgtgggcctgatgagccgggtggcccagcctgccagcaagaagatcgatcagaacaagctgaaacctgagatggacgagaagggcaacctgaccaccgccggctttgcctgctctcagtgtggccagcccctgttcgtgtacaagctggagcaggtgtctgagaagggcaaggcttacaccaactacttcggacggtgcaatgtggccgagcacgaaaagctgatcctgctggcccagctgaagcccgagaaggatagcgacgaagccgtgacatatagcctgggaaagtttgggcagagggccctggatttctacagcattcatgtgaccaaggagtccacccaccccgtgaagcccctggcccagatcgccggaaacagatacgcctccggacctgtgggaaaggccctgagcgacgcatgtatgggcacaatcgcctccttcctgtctaagtaccaggacatcatcatcgaacaccagaaggtggtgaagggcaaccagaagagactggagagcctgcgggagctggccggcaaggaaaacctggaataccctagcgtgaccctgccacctcagcctcacaccaaggagggcgttgatgcctacaacgaagtgatcgcccgggtgcgaatgtgggtgaacctgaacctgtggcagaagctgaagctaagcagagatgatgccaagcctctgctgagactgaagggattcccttcctttcctctggtcgagagacaggccaacgaagtggactggtgggacatggtgtgtaacgtgaagaagctgatcaacgagaaaaaggaggatggcaaggtgttttggcagaatctggctggctacaagagacaggaagccctgagaccatacctgagcagcgaggaagatcggaagaagggaaagaaattcgctcggtaccagctgggcgacctgctgctgcacctggaaaagaagcacggcgaggactggggaaaggtgtacgacgaggcctgggagcggattgacaagaaagtggaaggcctgagcaagcacatcaagctggaagaggaacggagaagcgaggacgcccagagcaaggccgccctgaccgactggctgcgggctaaggccagcttcgtgatcgagggcctgaaggaggccgacaaggacgagttctgcagatgcgagctgaagctgcagaagtggtacggggacctgcggggaaagcccttcgccatcgaagccgagaacagcatcctggacatcagcggcttcagcaagcagtacaactgtgccttcatctggcagaaggacggcgtgaagaagctgaacctgtacctgatcatcaactacttcaagggcggcaagctgcggttcaagaagatcaaacctgaagccttcgaagccaacagattctacaccgtgatcaacaaaaagagcggcgagatcgtgcccatggaggtgaacttcaacttcgacgaccccaacctgatcatcctgcctctggcctttggcaagagacagggcagagaattcatctggaacgacctgctgtccctggaaaccggcagcctgaagctggccaacggaagagtgatcgagaagacactgtacaacagaagaacccggcaggatgagcctgccctgttcgtggccctgaccttcgagcggcgggaggtcctggactcctccaatatcaaaccaatgaacctgatcggcgtggcaagaggcgaaaacatccccgccgtgatcgccctgaccgaccccgagggctgcccactgagccggtttaaggatagcctgggaaacccaacccacatcctgagaatcggcgagagctataaggagaagcagcggaccatccaggccaagaaggaggtggagcagcggagagccggcggctacagccggaagtacgccagcaaagccaagaatctggcagacgatatggtgagaaacaccgctagagatctgctgtactacgccgtgacccaggatgccatgctgatcttcgccaacctgagccggggcttcggccggcagggcaagcggaccttcatggccgagagacagtacacacggatggaggactggctgaccgccaagctggcctacgagggcctgagcaagacctacctgtccaagacactggcccagtacacctccaagacatgcagcaactgtgggtttaccatcaccagcgccgactacgacagggtgctggagaagctgaagaagacagcaacaggctggatgaccacaattaacggcaaggagctgaaggtggagggccagattacctactacaacagatacaagagacagaacgtagtcaaggacctgtccgtcgagctggatagactgagcgaagaatctgtgaacaacgacatctcctcctggacaaagggcagaagcggagaagctctgagcctcctgaagaaaagattctcccatagacccgtgcaggagaagttcgtgtgcctgaactgcggcttcgagacacacgcagccgagcaagccgccctgaacatcgccagatcctggctgttcctgcggagccaggagtacaagaaataccagacaaacaagacaaccggcaacaccgataagagagccttcgtcgagacctggcagtccttttaccggaagaagcttaaggaggtgtggaaacctgccgtgcggtctggcggatctggcggaggctccaccagccccaagaaaaagagaaaagtctaagctgccttctgcggggcttgccttctggccatgcccttcttctctcccttgcacctgtacctcttggtctttgaataaagcctgagtaggaaggctagcaaaaaaaaaaaaaaaaaaaaaaaaaaaaaaaaaaaaaaaaaaaaaaaaaaaaaaaaaaaaaaaaaaaaaaaaaaaaaaaa

SEQ ID NO: 12929 - RNA, 5785 nt, synthetic construct
  source 1..5785: mol_type = other RNA
aggaaataagagagaaaagaagagtaagaagaaatataagagccaccatggcccctaagaagaagcgtaaagtgagccggatggaacgcctcgtctacgaggtgcggcagaagtgcagaaacatcgaggacatctgcatctcctgcggatctctgaacgtgaccctggagcacccactgttcatcggcggcatgtgccagaactgtaaaaactgttttctggagtgtgcctatcaatacgacgatgacggctaccagagctactgcaccatctgttgcggcggaagagaggtgctgatgtgtggaaataacaactgctgccggtgcttctgcgtggaatgcgtggacctgctggtgggccccggcgccgcccaggccgctattaaggaagatccttggaactgctacatgtgcggccacaagggcacatacggcctgctgagacggagagaggactggcctagcagactgcagatgttcttcgccaataaccacgaccaggagttcgacccccctaaggtgtaccctcccgtccccgccgagaagagaaagcccatccgggtcctgagcctgttcgatggcatcgccaccggtctgctggtgctgaaggacctgggcatccaggtggataggtacattgcctccgaggtgtgcgaggactccatcaccgtgggaatggtgcgtcatcagggcaagatcatgtacgtgggcgacgtgcggagcgtgacacagaagcatatccaggagtggggccctttcgacctggtgatcggcggcagcccttgcaatgacctgagcatcgtgaacccagcccggaagggcctgtacgagggaaccggcagactgttcttcgagttttacagactgctgcacgacgcccggcctaaggaaggcgacgaccggcccttcttttggctgttcgagaatgtggtggccatgggagtcagcgacaagcgggatattagccggttcctggagagcaaccccgtgatgatcgatgccaaggaagtgagcgccgcccaccgggccagatacttctggggcaatctgcctggcatgaacagacccctggccagcaccgtgaacgacaagctggagctgcaggagtgcctggagcacggccggatcgccaagttcagcaaggtgagaaccatcaccacccgaagcaacagcatcaaacaaggcaaggaccagcactttcctgtgttcatgaacgagaaggaggacatcctgtggtgtaccgagatggagagagtgttcgggttcccagtccactacacagatgtcagcaacatgtctagactggccagacagagactgctgggaagaagctggtccgtccctgtgatcagacacctgttcgcccctctgaaggagtacttcgcctgcgtgagcagcggcaacagcaacgccaacagccggggccccagcttctctagcggcctggtgccactgtccctgagagggagccacatgggccccatggagatctacaaaaccgtgagcgcctggaagcggcagcctgtgcgcgtgctgagcctgtttcggaatatcgataaagtcctgaaaagcctgggattcctggagagcggctctggctccggcggtggcaccctgaagtacgtggaggatgtgacaaacgtggtcagacgggatgtggagaagtggggccccttcgatctggtgtacggcagcacccaacccctgggcagctcttgtgaccggtgccctggctggtacatgtttcagttccaccggatcctgcagtacgccctgccgagacaggagtcccagcggccattcttttggattttcatggacaacttgctgctgaccgaggatgaccaggaaactaccactcggttcctgcagaccgaagccgtgaccctgcaggacgtgagaggccgggactaccagaacgccatgcgggtgtggtccaacatccctggactgaaaagcaagcacgcacctctgacccctaaagaagaggagtacctgcaggcccaggtgcggagcagaagcaagctggacgcccctaaggtggatctgctggtgaagaattgcctcctgcccctgagagagtacttcaagtatttcagccagaatagtctgcccctgggaggcagcggcggcggcatgaacgtggaggtgctgaaggtgatcagccaggacctggtgaccttcaaggacgtggccatcgacttcagccaggaggagtggcagtggatgaaccccgcccagaagaggctgtacaggagcatgatgctggagaactaccagagcctggtgagcctgggcctgtgcgtgagcaagccctacgtgatcagcctgctggagcagggcagggagccctgggagatgaccagcgagatgaccaggggcggcccaagcagcggcgcccctcctcccagcggcggcagcccagccggctccccaacctctaccgaggagggcacctctgagtccgccacccccgagagcggccctggcacctccaccgagcccagcgagggcagcgcacccggcagccctgccggcagccccacctccacagaggagggaaccagcaccgagcccagcgaaggcagcgccccaggcaccagcaccgagcctagtgagcaggagattaaacggatcaacaagatcagaagaagacttgtgaaagacagcaacaccaagaaggccggcaagacaggccccatgaaaaccctgctggttagagtgatgacacccgatctgagagagcggctggaaaacctgagaaagaagcctgaaaatatcccccagcccatcagcaatacatctagagccaacctgaataagctgctgaccgattacaccgaaatgaagaaggcgatcctgcatgtgtactgggaagagttccagaaggaccctgtgggcctgatgagccgggtggcccagcctgccagcaagaagatcgatcagaacaagctgaaacctgagatggacgagaagggcaacctgaccaccgccggctttgcctgctctcagtgtggccagcccctgttcgtgtacaagctggagcaggtgtctgagaagggcaaggcttacaccaactacttcggacggtgcaatgtggccgagcacgaaaagctgatcctgctggcccagctgaagcccgagaaggatagcgacgaagccgtgacatatagcctgggaaagtttgggcagagggccctggatttctacagcattcatgtgaccaaggagtccacccaccccgtgaagcccctggcccagatcgccggaaacagatacgcctccggacctgtgggaaaggccctgagcgacgcatgtatgggcacaatcgcctccttcctgtctaagtaccaggacatcatcatcgaacaccagaaggtggtgaagggcaaccagaagagactggagagcctgcgggagctggccggcaaggaaaacctggaataccctagcgtgaccctgccacctcagcctcacaccaaggagggcgttgatgcctacaacgaagtgatcgcccgggtgcgaatgtgggtgaacctgaacctgtggcagaagctgaagctaagcagagatgatgccaagcctctgctgagactgaagggattcccttcctttcctctggtcgagagacaggccaacgaagtggactggtgggacatggtgtgtaacgtgaagaagctgatcaacgagaaaaaggaggatggcaaggtgttttggcagaatctggctggctacaagagacaggaagccctgagaccatacctgagcagcgaggaagatcggaagaagggaaagaaattcgctcggtaccagctgggcgacctgctgctgcacctggaaaagaagcacggcgaggactggggaaaggtgtacgacgaggcctgggagcggattgacaagaaagtggaaggcctgagcaagcacatcaagctggaagaggaacggagaagcgaggacgcccagagcaaggccgccctgaccgactggctgcgggctaaggccagcttcgtgatcgagggcctgaaggaggccgacaaggacgagttctgcagatgcgagctgaagctgcagaagtggtacggggacctgcggggaaagcccttcgccatcgaagccgagaacagcatcctggacatcagcggcttcagcaagcagtacaactgtgccttcatctggcagaaggacggcgtgaagaagctgaacctgtacctgatcatcaactacttcaagggcggcaagctgcggttcaagaagatcaaacctgaagccttcgaagccaacagattctacaccgtgatcaacaaaaagagcggcgagatcgtgcccatggaggtgaacttcaacttcgacgaccccaacctgatcatcctgcctctggcctttggcaagagacagggcagagaattcatctggaacgacctgctgtccctggaaaccggcagcctgaagctggccaacggaagagtgatcgagaagacactgtacaacagaagaacccggcaggatgagcctgccctgttcgtggccctgaccttcgagcggcgggaggtcctggactcctccaatatcaaaccaatgaacctgatcggcgtggcaagaggcgaaaacatccccgccgtgatcgccctgaccgaccccgagggctgcccactgagccggtttaaggatagcctgggaaacccaacccacatcctgagaatcggcgagagctataaggagaagcagcggaccatccaggccaagaaggaggtggagcagcggagagccggcggctacagccggaagtacgccagcaaagccaagaatctggcagacgatatggtgagaaacaccgctagagatctgctgtactacgccgtgacccaggatgccatgctgatcttcgccaacctgagccggggcttcggccggcagggcaagcggaccttcatggccgagagacagtacacacggatggaggactggctgaccgccaagctggcctacgagggcctgagcaagacctacctgtccaagacactggcccagtacacctccaagacatgcagcaactgtgggtttaccatcaccagcgccgactacgacagggtgctggagaagctgaagaagacagcaacaggctggatgaccacaattaacggcaaggagctgaaggtggagggccagattacctactacaacagatacaagagacagaacgtagtcaaggacctgtccgtcgagctggatagactgagcgaagaatctgtgaacaacgacatctcctcctggacaaagggcagaagcggagaagctctgagcctcctgaagaaaagattctcccatagacccgtgcaggagaagttcgtgtgcctgaactgcggcttcgagacacacgcagccgagcaagccgccctgaacatcgccagatcctggctgttcctgcggagccaggagtacaagaaataccagacaaacaagacaaccggcaacaccgataagagagccttcgtcgagacctggcagtccttttaccggaagaagcttaaggaggtgtggaaacctgccgtgcggtctggcggatctggcggaggctccaccagccccaagaaaaagagaaaagtctaagctgccttctgcggggcttgccttctggccatgcccttcttctctcccttgcacctgtacctcttggtctttgaataaagcctgagtaggaaggctagcaaaaaaaaaaaaaaaaaaaaaaaaaaaaaaaaaaaaaaaaaaaaaaaaaaaaaaaaaaaaaaaaaaaaaaaaaaaaaaaa

SEQ ID NO: 12930 - RNA, 5785 nt, synthetic construct
  source 1..5785: mol_type = other RNA
aggaaataagagagaaaagaagagtaagaagaaatataagagccaccatggcccctaagaagaagcgtaaagtgagccggatggaacgcctcgtctacgaggtgcggcagaagtgcagaaacatcgaggacatctgcatctcctgcggatctctgaacgtgaccctggagcacccactgttcatcggcggcatgtgccagaactgtaaaaactgttttctggagtgtgcctatcaatacgacgatgacggctaccagagctactgcaccatctgttgcggcggaagagaggtgctgatgtgtggaaataacaactgctgccggtgcttctgcgtggaatgcgtggacctgctggtgggccccggcgccgcccaggccgctattaaggaagatccttggaactgctacatgtgcggccacaagggcacatacggcctgctgagacggagagaggactggcctagcagactgcagatgttcttcgccaataaccacgaccaggagttcgacccccctaaggtgtaccctcccgtccccgccgagaagagaaagcccatccgggtcctgagcctgttcgatggcatcgccaccggtctgctggtgctgaaggacctgggcatccaggtggataggtacattgcctccgaggtgtgcgaggactccatcaccgtgggaatggtgcgtcatcagggcaagatcatgtacgtgggcgacgtgcggagcgtgacacagaagcatatccaggagtggggccctttcgacctggtgatcggcggcagcccttgcaatgacctgagcatcgtgaacccagcccggaagggcctgtacgagggaaccggcagactgttcttcgagttttacagactgctgcacgacgcccggcctaaggaaggcgacgaccggcccttcttttggctgttcgagaatgtggtggccatgggagtcagcgacaagcgggatattagccggttcctggagagcaaccccgtgatgatcgatgccaaggaagtgagcgccgcccaccgggccagatacttctggggcaatctgcctggcatgaacagacccctggccagcaccgtgaacgacaagctggagctgcaggagtgcctggagcacggccggatcgccaagttcagcaaggtgagaaccatcaccacccgaagcaacagcatcaaacaaggcaaggaccagcactttcctgtgttcatgaacgagaaggaggacatcctgtggtgtaccgagatggagagagtgttcgggttcccagtccactacacagatgtcagcaacatgtctagactggccagacagagactgctgggaagaagctggtccgtccctgtgatcagacacctgttcgcccctctgaaggagtacttcgcctgcgtgagcagcggcaacagcaacgccaacagccggggccccagcttctctagcggcctggtgccactgtccctgagagggagccacatgggccccatggagatctacaaaaccgtgagcgcctggaagcggcagcctgtgcgcgtgctgagcctgtttcggaatatcgataaagtcctgaaaagcctgggattcctggagagcggctctggctccggcggtggcaccctgaagtacgtggaggatgtgacaaacgtggtcagacgggatgtggagaagtggggccccttcgatctggtgtacggcagcacccaacccctgggcagctcttgtgaccggtgccctggctggtacatgtttcagttccaccggatcctgcagtacgccctgccgagacaggagtcccagcggccattcttttggattttcatggacaacttgctgctgaccgaggatgaccaggaaactaccactcggttcctgcagaccgaagccgtgaccctgcaggacgtgagaggccgggactaccagaacgccatgcgggtgtggtccaacatccctggactgaaaagcaagcacgcacctctgacccctaaagaagaggagtacctgcaggcccaggtgcggagcagaagcaagctggacgcccctaaggtggatctgctggtgaagaattgcctcctgcccctgagagagtacttcaagtatttcagccagaatagtctgcccctgggaggcagcggcggcggcgcccaggagagcctgaccctggaggacgtggccgtggacttcagcagggaggagtggaggctgctggcccccgcccagaaggacctgtacagggacgtgatgctggagaacttcaggaacctggtgagcgtgggccaccaggccagcaagcccgacgtgctggccaagctggagaggggcgaggagccctgggccatcgaggaggaggtgaggagcggcaccagccccgagaccggcaaggtgggcggcccaagcagcggcgcccctcctcccagcggcggcagcccagccggctccccaacctctaccgaggagggcacctctgagtccgccacccccgagagcggccctggcacctccaccgagcccagcgagggcagcgcacccggcagccctgccggcagccccacctccacagaggagggaaccagcaccgagcccagcgaaggcagcgccccaggcaccagcaccgagcctagtgagcaggagattaaacggatcaacaagatcagaagaagacttgtgaaagacagcaacaccaagaaggccggcaagacaggccccatgaaaaccctgctggttagagtgatgacacccgatctgagagagcggctggaaaacctgagaaagaagcctgaaaatatcccccagcccatcagcaatacatctagagccaacctgaataagctgctgaccgattacaccgaaatgaagaaggcgatcctgcatgtgtactgggaagagttccagaaggaccctgtgggcctgatgagccgggtggcccagcctgccagcaagaagatcgatcagaacaagctgaaacctgagatggacgagaagggcaacctgaccaccgccggctttgcctgctctcagtgtggccagcccctgttcgtgtacaagctggagcaggtgtctgagaagggcaaggcttacaccaactacttcggacggtgcaatgtggccgagcacgaaaagctgatcctgctggcccagctgaagcccgagaaggatagcgacgaagccgtgacatatagcctgggaaagtttgggcagagggccctggatttctacagcattcatgtgaccaaggagtccacccaccccgtgaagcccctggcccagatcgccggaaacagatacgcctccggacctgtgggaaaggccctgagcgacgcatgtatgggcacaatcgcctccttcctgtctaagtaccaggacatcatcatcgaacaccagaaggtggtgaagggcaaccagaagagactggagagcctgcgggagctggccggcaaggaaaacctggaataccctagcgtgaccctgccacctcagcctcacaccaaggagggcgttgatgcctacaacgaagtgatcgcccgggtgcgaatgtgggtgaacctgaacctgtggcagaagctgaagctaagcagagatgatgccaagcctctgctgagactgaagggattcccttcctttcctctggtcgagagacaggccaacgaagtggactggtgggacatggtgtgtaacgtgaagaagctgatcaacgagaaaaaggaggatggcaaggtgttttggcagaatctggctggctacaagagacaggaagccctgagaccatacctgagcagcgaggaagatcggaagaagggaaagaaattcgctcggtaccagctgggcgacctgctgctgcacctggaaaagaagcacggcgaggactggggaaaggtgtacgacgaggcctgggagcggattgacaagaaagtggaaggcctgagcaagcacatcaagctggaagaggaacggagaagcgaggacgcccagagcaaggccgccctgaccgactggctgcgggctaaggccagcttcgtgatcgagggcctgaaggaggccgacaaggacgagttctgcagatgcgagctgaagctgcagaagtggtacggggacctgcggggaaagcccttcgccatcgaagccgagaacagcatcctggacatcagcggcttcagcaagcagtacaactgtgccttcatctggcagaaggacggcgtgaagaagctgaacctgtacctgatcatcaactacttcaagggcggcaagctgcggttcaagaagatcaaacctgaagccttcgaagccaacagattctacaccgtgatcaacaaaaagagcggcgagatcgtgcccatggaggtgaacttcaacttcgacgaccccaacctgatcatcctgcctctggcctttggcaagagacagggcagagaattcatctggaacgacctgctgtccctggaaaccggcagcctgaagctggccaacggaagagtgatcgagaagacactgtacaacagaagaacccggcaggatgagcctgccctgttcgtggccctgaccttcgagcggcgggaggtcctggactcctccaatatcaaaccaatgaacctgatcggcgtggcaagaggcgaaaacatccccgccgtgatcgccctgaccgaccccgagggctgcccactgagccggtttaaggatagcctgggaaacccaacccacatcctgagaatcggcgagagctataaggagaagcagcggaccatccaggccaagaaggaggtggagcagcggagagccggcggctacagccggaagtacgccagcaaagccaagaatctggcagacgatatggtgagaaacaccgctagagatctgctgtactacgccgtgacccaggatgccatgctgatcttcgccaacctgagccggggcttcggccggcagggcaagcggaccttcatggccgagagacagtacacacggatggaggactggctgaccgccaagctggcctacgagggcctgagcaagacctacctgtccaagacactggcccagtacacctccaagacatgcagcaactgtgggtttaccatcaccagcgccgactacgacagggtgctggagaagctgaagaagacagcaacaggctggatgaccacaattaacggcaaggagctgaaggtggagggccagattacctactacaacagatacaagagacagaacgtagtcaaggacctgtccgtcgagctggatagactgagcgaagaatctgtgaacaacgacatctcctcctggacaaagggcagaagcggagaagctctgagcctcctgaagaaaagattctcccatagacccgtgcaggagaagttcgtgtgcctgaactgcggcttcgagacacacgcagccgagcaagccgccctgaacatcgccagatcctggctgttcctgcggagccaggagtacaagaaataccagacaaacaagacaaccggcaacaccgataagagagccttcgtcgagacctggcagtccttttaccggaagaagcttaaggaggtgtggaaacctgccgtgcggtctggcggatctggcggaggctccaccagccccaagaaaaagagaaaagtctaagctgccttctgcggggcttgccttctggccatgcccttcttctctcccttgcacctgtacctcttggtctttgaataaagcctgagtaggaaggctagcaaaaaaaaaaaaaaaaaaaaaaaaaaaaaaaaaaaaaaaaaaaaaaaaaaaaaaaaaaaaaaaaaaaaaaaaaaaaaaaa

SEQ ID NO: 12931 - RNA, 5791 nt, synthetic construct
  source 1..5791: mol_type = other RNA
aggaaataagagagaaaagaagagtaagaagaaatataagagccaccatggcccctaagaagaagcgtaaagtgagccggatggaacgcctcgtctacgaggtgcggcagaagtgcagaaacatcgaggacatctgcatctcctgcggatctctgaacgtgaccctggagcacccactgttcatcggcggcatgtgccagaactgtaaaaactgttttctggagtgtgcctatcaatacgacgatgacggctaccagagctactgcaccatctgttgcggcggaagagaggtgctgatgtgtggaaataacaactgctgccggtgcttctgcgtggaatgcgtggacctgctggtgggccccggcgccgcccaggccgctattaaggaagatccttggaactgctacatgtgcggccacaagggcacatacggcctgctgagacggagagaggactggcctagcagactgcagatgttcttcgccaataaccacgaccaggagttcgacccccctaaggtgtaccctcccgtccccgccgagaagagaaagcccatccgggtcctgagcctgttcgatggcatcgccaccggtctgctggtgctgaaggacctgggcatccaggtggataggtacattgcctccgaggtgtgcgaggactccatcaccgtgggaatggtgcgtcatcagggcaagatcatgtacgtgggcgacgtgcggagcgtgacacagaagcatatccaggagtggggccctttcgacctggtgatcggcggcagcccttgcaatgacctgagcatcgtgaacccagcccggaagggcctgtacgagggaaccggcagactgttcttcgagttttacagactgctgcacgacgcccggcctaaggaaggcgacgaccggcccttcttttggctgttcgagaatgtggtggccatgggagtcagcgacaagcgggatattagccggttcctggagagcaaccccgtgatgatcgatgccaaggaagtgagcgccgcccaccgggccagatacttctggggcaatctgcctggcatgaacagacccctggccagcaccgtgaacgacaagctggagctgcaggagtgcctggagcacggccggatcgccaagttcagcaaggtgagaaccatcaccacccgaagcaacagcatcaaacaaggcaaggaccagcactttcctgtgttcatgaacgagaaggaggacatcctgtggtgtaccgagatggagagagtgttcgggttcccagtccactacacagatgtcagcaacatgtctagactggccagacagagactgctgggaagaagctggtccgtccctgtgatcagacacctgttcgcccctctgaaggagtacttcgcctgcgtgagcagcggcaacagcaacgccaacagccggggccccagcttctctagcggcctggtgccactgtccctgagagggagccacatgggccccatggagatctacaaaaccgtgagcgcctggaagcggcagcctgtgcgcgtgctgagcctgtttcggaatatcgataaagtcctgaaaagcctgggattcctggagagcggctctggctccggcggtggcaccctgaagtacgtggaggatgtgacaaacgtggtcagacgggatgtggagaagtggggccccttcgatctggtgtacggcagcacccaacccctgggcagctcttgtgaccggtgccctggctggtacatgtttcagttccaccggatcctgcagtacgccctgccgagacaggagtcccagcggccattcttttggattttcatggacaacttgctgctgaccgaggatgaccaggaaactaccactcggttcctgcagaccgaagccgtgaccctgcaggacgtgagaggccgggactaccagaacgccatgcgggtgtggtccaacatccctggactgaaaagcaagcacgcacctctgacccctaaagaagaggagtacctgcaggcccaggtgcggagcagaagcaagctggacgcccctaaggtggatctgctggtgaagaattgcctcctgcccctgagagagtacttcaagtatttcagccagaatagtctgcccctgggaggcagcggcggcggcgtgaccttcaaggacgtggccgtgatcttcaccgaggaggagctgggcctgctggaccccgcccagaggaagctgtacagggacgtgatgctggagaacttcaggaacctgctgagcgtgggccaccagcccttccacggcgacaccttccacttcctgagggaggagaagttctgggtgatgggcaccaccagccagagggagggcaacctgggcggcaagatccagaccgagatggagaccgtgcccggcggcccaagcagcggcgcccctcctcccagcggcggcagcccagccggctccccaacctctaccgaggagggcacctctgagtccgccacccccgagagcggccctggcacctccaccgagcccagcgagggcagcgcacccggcagccctgccggcagccccacctccacagaggagggaaccagcaccgagcccagcgaaggcagcgccccaggcaccagcaccgagcctagtgagcaggagattaaacggatcaacaagatcagaagaagacttgtgaaagacagcaacaccaagaaggccggcaagacaggccccatgaaaaccctgctggttagagtgatgacacccgatctgagagagcggctggaaaacctgagaaagaagcctgaaaatatcccccagcccatcagcaatacatctagagccaacctgaataagctgctgaccgattacaccgaaatgaagaaggcgatcctgcatgtgtactgggaagagttccagaaggaccctgtgggcctgatgagccgggtggcccagcctgccagcaagaagatcgatcagaacaagctgaaacctgagatggacgagaagggcaacctgaccaccgccggctttgcctgctctcagtgtggccagcccctgttcgtgtacaagctggagcaggtgtctgagaagggcaaggcttacaccaactacttcggacggtgcaatgtggccgagcacgaaaagctgatcctgctggcccagctgaagcccgagaaggatagcgacgaagccgtgacatatagcctgggaaagtttgggcagagggccctggatttctacagcattcatgtgaccaaggagtccacccaccccgtgaagcccctggcccagatcgccggaaacagatacgcctccggacctgtgggaaaggccctgagcgacgcatgtatgggcacaatcgcctccttcctgtctaagtaccaggacatcatcatcgaacaccagaaggtggtgaagggcaaccagaagagactggagagcctgcgggagctggccggcaaggaaaacctggaataccctagcgtgaccctgccacctcagcctcacaccaaggagggcgttgatgcctacaacgaagtgatcgcccgggtgcgaatgtgggtgaacctgaacctgtggcagaagctgaagctaagcagagatgatgccaagcctctgctgagactgaagggattcccttcctttcctctggtcgagagacaggccaacgaagtggactggtgggacatggtgtgtaacgtgaagaagctgatcaacgagaaaaaggaggatggcaaggtgttttggcagaatctggctggctacaagagacaggaagccctgagaccatacctgagcagcgaggaagatcggaagaagggaaagaaattcgctcggtaccagctgggcgacctgctgctgcacctggaaaagaagcacggcgaggactggggaaaggtgtacgacgaggcctgggagcggattgacaagaaagtggaaggcctgagcaagcacatcaagctggaagaggaacggagaagcgaggacgcccagagcaaggccgccctgaccgactggctgcgggctaaggccagcttcgtgatcgagggcctgaaggaggccgacaaggacgagttctgcagatgcgagctgaagctgcagaagtggtacggggacctgcggggaaagcccttcgccatcgaagccgagaacagcatcctggacatcagcggcttcagcaagcagtacaactgtgccttcatctggcagaaggacggcgtgaagaagctgaacctgtacctgatcatcaactacttcaagggcggcaagctgcggttcaagaagatcaaacctgaagccttcgaagccaacagattctacaccgtgatcaacaaaaagagcggcgagatcgtgcccatggaggtgaacttcaacttcgacgaccccaacctgatcatcctgcctctggcctttggcaagagacagggcagagaattcatctggaacgacctgctgtccctggaaaccggcagcctgaagctggccaacggaagagtgatcgagaagacactgtacaacagaagaacccggcaggatgagcctgccctgttcgtggccctgaccttcgagcggcgggaggtcctggactcctccaatatcaaaccaatgaacctgatcggcgtggcaagaggcgaaaacatccccgccgtgatcgccctgaccgaccccgagggctgcccactgagccggtttaaggatagcctgggaaacccaacccacatcctgagaatcggcgagagctataaggagaagcagcggaccatccaggccaagaaggaggtggagcagcggagagccggcggctacagccggaagtacgccagcaaagccaagaatctggcagacgatatggtgagaaacaccgctagagatctgctgtactacgccgtgacccaggatgccatgctgatcttcgccaacctgagccggggcttcggccggcagggcaagcggaccttcatggccgagagacagtacacacggatggaggactggctgaccgccaagctggcctacgagggcctgagcaagacctacctgtccaagacactggcccagtacacctccaagacatgcagcaactgtgggtttaccatcaccagcgccgactacgacagggtgctggagaagctgaagaagacagcaacaggctggatgaccacaattaacggcaaggagctgaaggtggagggccagattacctactacaacagatacaagagacagaacgtagtcaaggacctgtccgtcgagctggatagactgagcgaagaatctgtgaacaacgacatctcctcctggacaaagggcagaagcggagaagctctgagcctcctgaagaaaagattctcccatagacccgtgcaggagaagttcgtgtgcctgaactgcggcttcgagacacacgcagccgagcaagccgccctgaacatcgccagatcctggctgttcctgcggagccaggagtacaagaaataccagacaaacaagacaaccggcaacaccgataagagagccttcgtcgagacctggcagtccttttaccggaagaagcttaaggaggtgtggaaacctgccgtgcggtctggcggatctggcggaggctccaccagccccaagaaaaagagaaaagtctaagctgccttctgcggggcttgccttctggccatgcccttcttctctcccttgcacctgtacctcttggtctttgaataaagcctgagtaggaaggctagcaaaaaaaaaaaaaaaaaaaaaaaaaaaaaaaaaaaaaaaaaaaaaaaaaaaaaaaaaaaaaaaaaaaaaaaaaaaaaaaa

SEQ ID NO: 12932 - RNA, 5785 nt, synthetic construct
  source 1..5785: mol_type = other RNA
aggaaataagagagaaaagaagagtaagaagaaatataagagccaccatggcccctaagaagaagcgtaaagtgagccggatggaacgcctcgtctacgaggtgcggcagaagtgcagaaacatcgaggacatctgcatctcctgcggatctctgaacgtgaccctggagcacccactgttcatcggcggcatgtgccagaactgtaaaaactgttttctggagtgtgcctatcaatacgacgatgacggctaccagagctactgcaccatctgttgcggcggaagagaggtgctgatgtgtggaaataacaactgctgccggtgcttctgcgtggaatgcgtggacctgctggtgggccccggcgccgcccaggccgctattaaggaagatccttggaactgctacatgtgcggccacaagggcacatacggcctgctgagacggagagaggactggcctagcagactgcagatgttcttcgccaataaccacgaccaggagttcgacccccctaaggtgtaccctcccgtccccgccgagaagagaaagcccatccgggtcctgagcctgttcgatggcatcgccaccggtctgctggtgctgaaggacctgggcatccaggtggataggtacattgcctccgaggtgtgcgaggactccatcaccgtgggaatggtgcgtcatcagggcaagatcatgtacgtgggcgacgtgcggagcgtgacacagaagcatatccaggagtggggccctttcgacctggtgatcggcggcagcccttgcaatgacctgagcatcgtgaacccagcccggaagggcctgtacgagggaaccggcagactgttcttcgagttttacagactgctgcacgacgcccggcctaaggaaggcgacgaccggcccttcttttggctgttcgagaatgtggtggccatgggagtcagcgacaagcgggatattagccggttcctggagagcaaccccgtgatgatcgatgccaaggaagtgagcgccgcccaccgggccagatacttctggggcaatctgcctggcatgaacagacccctggccagcaccgtgaacgacaagctggagctgcaggagtgcctggagcacggccggatcgccaagttcagcaaggtgagaaccatcaccacccgaagcaacagcatcaaacaaggcaaggaccagcactttcctgtgttcatgaacgagaaggaggacatcctgtggtgtaccgagatggagagagtgttcgggttcccagtccactacacagatgtcagcaacatgtctagactggccagacagagactgctgggaagaagctggtccgtccctgtgatcagacacctgttcgcccctctgaaggagtacttcgcctgcgtgagcagcggcaacagcaacgccaacagccggggccccagcttctctagcggcctggtgccactgtccctgagagggagccacatgggccccatggagatctacaaaaccgtgagcgcctggaagcggcagcctgtgcgcgtgctgagcctgtttcggaatatcgataaagtcctgaaaagcctgggattcctggagagcggctctggctccggcggtggcaccctgaagtacgtggaggatgtgacaaacgtggtcagacgggatgtggagaagtggggccccttcgatctggtgtacggcagcacccaacccctgggcagctcttgtgaccggtgccctggctggtacatgtttcagttccaccggatcctgcagtacgccctgccgagacaggagtcccagcggccattcttttggattttcatggacaacttgctgctgaccgaggatgaccaggaaactaccactcggttcctgcagaccgaagccgtgaccctgcaggacgtgagaggccgggactaccagaacgccatgcgggtgtggtccaacatccctggactgaaaagcaagcacgcacctctgacccctaaagaagaggagtacctgcaggcccaggtgcggagcagaagcaagctggacgcccctaaggtggatctgctggtgaagaattgcctcctgcccctgagagagtacttcaagtatttcagccagaatagtctgcccctgggaggcagcggcggcggcagccagggcctggtgaccttcggcgacgtggccatcgacttcagccaggaggagtgggagtggctgagccccatccagaggaacctgtacaggaaggtgatgctggagaactacaggaacctggccagcctgggcctgtgcgtgagcaagcccgacgtgatcagcctgctggagcagggcaaggagccctggaccgtgaagaggaggatgaccagggccggctgccccgacctgaaggccgtgggcggcccaagcagcggcgcccctcctcccagcggcggcagcccagccggctccccaacctctaccgaggagggcacctctgagtccgccacccccgagagcggccctggcacctccaccgagcccagcgagggcagcgcacccggcagccctgccggcagccccacctccacagaggagggaaccagcaccgagcccagcgaaggcagcgccccaggcaccagcaccgagcctagtgagcaggagattaaacggatcaacaagatcagaagaagacttgtgaaagacagcaacaccaagaaggccggcaagacaggccccatgaaaaccctgctggttagagtgatgacacccgatctgagagagcggctggaaaacctgagaaagaagcctgaaaatatcccccagcccatcagcaatacatctagagccaacctgaataagctgctgaccgattacaccgaaatgaagaaggcgatcctgcatgtgtactgggaagagttccagaaggaccctgtgggcctgatgagccgggtggcccagcctgccagcaagaagatcgatcagaacaagctgaaacctgagatggacgagaagggcaacctgaccaccgccggctttgcctgctctcagtgtggccagcccctgttcgtgtacaagctggagcaggtgtctgagaagggcaaggcttacaccaactacttcggacggtgcaatgtggccgagcacgaaaagctgatcctgctggcccagctgaagcccgagaaggatagcgacgaagccgtgacatatagcctgggaaagtttgggcagagggccctggatttctacagcattcatgtgaccaaggagtccacccaccccgtgaagcccctggcccagatcgccggaaacagatacgcctccggacctgtgggaaaggccctgagcgacgcatgtatgggcacaatcgcctccttcctgtctaagtaccaggacatcatcatcgaacaccagaaggtggtgaagggcaaccagaagagactggagagcctgcgggagctggccggcaaggaaaacctggaataccctagcgtgaccctgccacctcagcctcacaccaaggagggcgttgatgcctacaacgaagtgatcgcccgggtgcgaatgtgggtgaacctgaacctgtggcagaagctgaagctaagcagagatgatgccaagcctctgctgagactgaagggattcccttcctttcctctggtcgagagacaggccaacgaagtggactggtgggacatggtgtgtaacgtgaagaagctgatcaacgagaaaaaggaggatggcaaggtgttttggcagaatctggctggctacaagagacaggaagccctgagaccatacctgagcagcgaggaagatcggaagaagggaaagaaattcgctcggtaccagctgggcgacctgctgctgcacctggaaaagaagcacggcgaggactggggaaaggtgtacgacgaggcctgggagcggattgacaagaaagtggaaggcctgagcaagcacatcaagctggaagaggaacggagaagcgaggacgcccagagcaaggccgccctgaccgactggctgcgggctaaggccagcttcgtgatcgagggcctgaaggaggccgacaaggacgagttctgcagatgcgagctgaagctgcagaagtggtacggggacctgcggggaaagcccttcgccatcgaagccgagaacagcatcctggacatcagcggcttcagcaagcagtacaactgtgccttcatctggcagaaggacggcgtgaagaagctgaacctgtacctgatcatcaactacttcaagggcggcaagctgcggttcaagaagatcaaacctgaagccttcgaagccaacagattctacaccgtgatcaacaaaaagagcggcgagatcgtgcccatggaggtgaacttcaacttcgacgaccccaacctgatcatcctgcctctggcctttggcaagagacagggcagagaattcatctggaacgacctgctgtccctggaaaccggcagcctgaagctggccaacggaagagtgatcgagaagacactgtacaacagaagaacccggcaggatgagcctgccctgttcgtggccctgaccttcgagcggcgggaggtcctggactcctccaatatcaaaccaatgaacctgatcggcgtggcaagaggcgaaaacatccccgccgtgatcgccctgaccgaccccgagggctgcccactgagccggtttaaggatagcctgggaaacccaacccacatcctgagaatcggcgagagctataaggagaagcagcggaccatccaggccaagaaggaggtggagcagcggagagccggcggctacagccggaagtacgccagcaaagccaagaatctggcagacgatatggtgagaaacaccgctagagatctgctgtactacgccgtgacccaggatgccatgctgatcttcgccaacctgagccggggcttcggccggcagggcaagcggaccttcatggccgagagacagtacacacggatggaggactggctgaccgccaagctggcctacgagggcctgagcaagacctacctgtccaagacactggcccagtacacctccaagacatgcagcaactgtgggtttaccatcaccagcgccgactacgacagggtgctggagaagctgaagaagacagcaacaggctggatgaccacaattaacggcaaggagctgaaggtggagggccagattacctactacaacagatacaagagacagaacgtagtcaaggacctgtccgtcgagctggatagactgagcgaagaatctgtgaacaacgacatctcctcctggacaaagggcagaagcggagaagctctgagcctcctgaagaaaagattctcccatagacccgtgcaggagaagttcgtgtgcctgaactgcggcttcgagacacacgcagccgagcaagccgccctgaacatcgccagatcctggctgttcctgcggagccaggagtacaagaaataccagacaaacaagacaaccggcaacaccgataagagagccttcgtcgagacctggcagtccttttaccggaagaagcttaaggaggtgtggaaacctgccgtgcggtctggcggatctggcggaggctccaccagccccaagaaaaagagaaaagtctaagctgccttctgcggggcttgccttctggccatgcccttcttctctcccttgcacctgtacctcttggtctttgaataaagcctgagtaggaaggctagcaaaaaaaaaaaaaaaaaaaaaaaaaaaaaaaaaaaaaaaaaaaaaaaaaaaaaaaaaaaaaaaaaaaaaaaaaaaaaaaa

SEQ ID NO: 12933 - RNA, 5785 nt, synthetic construct
  source 1..5785: mol_type = other RNA
aggaaataagagagaaaagaagagtaagaagaaatataagagccaccatggcccctaagaagaagcgtaaagtgagccggatggaacgcctcgtctacgaggtgcggcagaagtgcagaaacatcgaggacatctgcatctcctgcggatctctgaacgtgaccctggagcacccactgttcatcggcggcatgtgccagaactgtaaaaactgttttctggagtgtgcctatcaatacgacgatgacggctaccagagctactgcaccatctgttgcggcggaagagaggtgctgatgtgtggaaataacaactgctgccggtgcttctgcgtggaatgcgtggacctgctggtgggccccggcgccgcccaggccgctattaaggaagatccttggaactgctacatgtgcggccacaagggcacatacggcctgctgagacggagagaggactggcctagcagactgcagatgttcttcgccaataaccacgaccaggagttcgacccccctaaggtgtaccctcccgtccccgccgagaagagaaagcccatccgggtcctgagcctgttcgatggcatcgccaccggtctgctggtgctgaaggacctgggcatccaggtggataggtacattgcctccgaggtgtgcgaggactccatcaccgtgggaatggtgcgtcatcagggcaagatcatgtacgtgggcgacgtgcggagcgtgacacagaagcatatccaggagtggggccctttcgacctggtgatcggcggcagcccttgcaatgacctgagcatcgtgaacccagcccggaagggcctgtacgagggaaccggcagactgttcttcgagttttacagactgctgcacgacgcccggcctaaggaaggcgacgaccggcccttcttttggctgttcgagaatgtggtggccatgggagtcagcgacaagcgggatattagccggttcctggagagcaaccccgtgatgatcgatgccaaggaagtgagcgccgcccaccgggccagatacttctggggcaatctgcctggcatgaacagacccctggccagcaccgtgaacgacaagctggagctgcaggagtgcctggagcacggccggatcgccaagttcagcaaggtgagaaccatcaccacccgaagcaacagcatcaaacaaggcaaggaccagcactttcctgtgttcatgaacgagaaggaggacatcctgtggtgtaccgagatggagagagtgttcgggttcccagtccactacacagatgtcagcaacatgtctagactggccagacagagactgctgggaagaagctggtccgtccctgtgatcagacacctgttcgcccctctgaaggagtacttcgcctgcgtgagcagcggcaacagcaacgccaacagccggggccccagcttctctagcggcctggtgccactgtccctgagagggagccacatgggccccatggagatctacaaaaccgtgagcgcctggaagcggcagcctgtgcgcgtgctgagcctgtttcggaatatcgataaagtcctgaaaagcctgggattcctggagagcggctctggctccggcggtggcaccctgaagtacgtggaggatgtgacaaacgtggtcagacgggatgtggagaagtggggccccttcgatctggtgtacggcagcacccaacccctgggcagctcttgtgaccggtgccctggctggtacatgtttcagttccaccggatcctgcagtacgccctgccgagacaggagtcccagcggccattcttttggattttcatggacaacttgctgctgaccgaggatgaccaggaaactaccactcggttcctgcagaccgaagccgtgaccctgcaggacgtgagaggccgggactaccagaacgccatgcgggtgtggtccaacatccctggactgaaaagcaagcacgcacctctgacccctaaagaagaggagtacctgcaggcccaggtgcggagcagaagcaagctggacgcccctaaggtggatctgctggtgaagaattgcctcctgcccctgagagagtacttcaagtatttcagccagaatagtctgcccctgggaggcagcggcggcggcgcccaggaggtggtgagcttcaaggacgtggccgtggacttcaccagggaggagtggaggctgctgagccccccccagaaggagctgtacaaggaggtgatgctggagaacgccaggaacctgctgagcgtgggcctgagcgccccccccgaggacatgttcagcagcctggagcagagggaggccccctggatgctggagaaggacgacctgaggagctgctgccccgagggcaagatgaggggcggcccaagcagcggcgcccctcctcccagcggcggcagcccagccggctccccaacctctaccgaggagggcacctctgagtccgccacccccgagagcggccctggcacctccaccgagcccagcgagggcagcgcacccggcagccctgccggcagccccacctccacagaggagggaaccagcaccgagcccagcgaaggcagcgccccaggcaccagcaccgagcctagtgagcaggagattaaacggatcaacaagatcagaagaagacttgtgaaagacagcaacaccaagaaggccggcaagacaggccccatgaaaaccctgctggttagagtgatgacacccgatctgagagagcggctggaaaacctgagaaagaagcctgaaaatatcccccagcccatcagcaatacatctagagccaacctgaataagctgctgaccgattacaccgaaatgaagaaggcgatcctgcatgtgtactgggaagagttccagaaggaccctgtgggcctgatgagccgggtggcccagcctgccagcaagaagatcgatcagaacaagctgaaacctgagatggacgagaagggcaacctgaccaccgccggctttgcctgctctcagtgtggccagcccctgttcgtgtacaagctggagcaggtgtctgagaagggcaaggcttacaccaactacttcggacggtgcaatgtggccgagcacgaaaagctgatcctgctggcccagctgaagcccgagaaggatagcgacgaagccgtgacatatagcctgggaaagtttgggcagagggccctggatttctacagcattcatgtgaccaaggagtccacccaccccgtgaagcccctggcccagatcgccggaaacagatacgcctccggacctgtgggaaaggccctgagcgacgcatgtatgggcacaatcgcctccttcctgtctaagtaccaggacatcatcatcgaacaccagaaggtggtgaagggcaaccagaagagactggagagcctgcgggagctggccggcaaggaaaacctggaataccctagcgtgaccctgccacctcagcctcacaccaaggagggcgttgatgcctacaacgaagtgatcgcccgggtgcgaatgtgggtgaacctgaacctgtggcagaagctgaagctaagcagagatgatgccaagcctctgctgagactgaagggattcccttcctttcctctggtcgagagacaggccaacgaagtggactggtgggacatggtgtgtaacgtgaagaagctgatcaacgagaaaaaggaggatggcaaggtgttttggcagaatctggctggctacaagagacaggaagccctgagaccatacctgagcagcgaggaagatcggaagaagggaaagaaattcgctcggtaccagctgggcgacctgctgctgcacctggaaaagaagcacggcgaggactggggaaaggtgtacgacgaggcctgggagcggattgacaagaaagtggaaggcctgagcaagcacatcaagctggaagaggaacggagaagcgaggacgcccagagcaaggccgccctgaccgactggctgcgggctaaggccagcttcgtgatcgagggcctgaaggaggccgacaaggacgagttctgcagatgcgagctgaagctgcagaagtggtacggggacctgcggggaaagcccttcgccatcgaagccgagaacagcatcctggacatcagcggcttcagcaagcagtacaactgtgccttcatctggcagaaggacggcgtgaagaagctgaacctgtacctgatcatcaactacttcaagggcggcaagctgcggttcaagaagatcaaacctgaagccttcgaagccaacagattctacaccgtgatcaacaaaaagagcggcgagatcgtgcccatggaggtgaacttcaacttcgacgaccccaacctgatcatcctgcctctggcctttggcaagagacagggcagagaattcatctggaacgacctgctgtccctggaaaccggcagcctgaagctggccaacggaagagtgatcgagaagacactgtacaacagaagaacccggcaggatgagcctgccctgttcgtggccctgaccttcgagcggcgggaggtcctggactcctccaatatcaaaccaatgaacctgatcggcgtggcaagaggcgaaaacatccccgccgtgatcgccctgaccgaccccgagggctgcccactgagccggtttaaggatagcctgggaaacccaacccacatcctgagaatcggcgagagctataaggagaagcagcggaccatccaggccaagaaggaggtggagcagcggagagccggcggctacagccggaagtacgccagcaaagccaagaatctggcagacgatatggtgagaaacaccgctagagatctgctgtactacgccgtgacccaggatgccatgctgatcttcgccaacctgagccggggcttcggccggcagggcaagcggaccttcatggccgagagacagtacacacggatggaggactggctgaccgccaagctggcctacgagggcctgagcaagacctacctgtccaagacactggcccagtacacctccaagacatgcagcaactgtgggtttaccatcaccagcgccgactacgacagggtgctggagaagctgaagaagacagcaacaggctggatgaccacaattaacggcaaggagctgaaggtggagggccagattacctactacaacagatacaagagacagaacgtagtcaaggacctgtccgtcgagctggatagactgagcgaagaatctgtgaacaacgacatctcctcctggacaaagggcagaagcggagaagctctgagcctcctgaagaaaagattctcccatagacccgtgcaggagaagttcgtgtgcctgaactgcggcttcgagacacacgcagccgagcaagccgccctgaacatcgccagatcctggctgttcctgcggagccaggagtacaagaaataccagacaaacaagacaaccggcaacaccgataagagagccttcgtcgagacctggcagtccttttaccggaagaagcttaaggaggtgtggaaacctgccgtgcggtctggcggatctggcggaggctccaccagccccaagaaaaagagaaaagtctaagctgccttctgcggggcttgccttctggccatgcccttcttctctcccttgcacctgtacctcttggtctttgaataaagcctgagtaggaaggctagcaaaaaaaaaaaaaaaaaaaaaaaaaaaaaaaaaaaaaaaaaaaaaaaaaaaaaaaaaaaaaaaaaaaaaaaaaaaaaaaa

SEQ ID NO: 12934 - RNA, 5785 nt, synthetic construct
  source 1..5785: mol_type = other RNA
aggaaataagagagaaaagaagagtaagaagaaatataagagccaccatggcccctaagaagaagcgtaaagtgagccggatggaacgcctcgtctacgaggtgcggcagaagtgcagaaacatcgaggacatctgcatctcctgcggatctctgaacgtgaccctggagcacccactgttcatcggcggcatgtgccagaactgtaaaaactgttttctggagtgtgcctatcaatacgacgatgacggctaccagagctactgcaccatctgttgcggcggaagagaggtgctgatgtgtggaaataacaactgctgccggtgcttctgcgtggaatgcgtggacctgctggtgggccccggcgccgcccaggccgctattaaggaagatccttggaactgctacatgtgcggccacaagggcacatacggcctgctgagacggagagaggactggcctagcagactgcagatgttcttcgccaataaccacgaccaggagttcgacccccctaaggtgtaccctcccgtccccgccgagaagagaaagcccatccgggtcctgagcctgttcgatggcatcgccaccggtctgctggtgctgaaggacctgggcatccaggtggataggtacattgcctccgaggtgtgcgaggactccatcaccgtgggaatggtgcgtcatcagggcaagatcatgtacgtgggcgacgtgcggagcgtgacacagaagcatatccaggagtggggccctttcgacctggtgatcggcggcagcccttgcaatgacctgagcatcgtgaacccagcccggaagggcctgtacgagggaaccggcagactgttcttcgagttttacagactgctgcacgacgcccggcctaaggaaggcgacgaccggcccttcttttggctgttcgagaatgtggtggccatgggagtcagcgacaagcgggatattagccggttcctggagagcaaccccgtgatgatcgatgccaaggaagtgagcgccgcccaccgggccagatacttctggggcaatctgcctggcatgaacagacccctggccagcaccgtgaacgacaagctggagctgcaggagtgcctggagcacggccggatcgccaagttcagcaaggtgagaaccatcaccacccgaagcaacagcatcaaacaaggcaaggaccagcactttcctgtgttcatgaacgagaaggaggacatcctgtggtgtaccgagatggagagagtgttcgggttcccagtccactacacagatgtcagcaacatgtctagactggccagacagagactgctgggaagaagctggtccgtccctgtgatcagacacctgttcgcccctctgaaggagtacttcgcctgcgtgagcagcggcaacagcaacgccaacagccggggccccagcttctctagcggcctggtgccactgtccctgagagggagccacatgggccccatggagatctacaaaaccgtgagcgcctggaagcggcagcctgtgcgcgtgctgagcctgtttcggaatatcgataaagtcctgaaaagcctgggattcctggagagcggctctggctccggcggtggcaccctgaagtacgtggaggatgtgacaaacgtggtcagacgggatgtggagaagtggggccccttcgatctggtgtacggcagcacccaacccctgggcagctcttgtgaccggtgccctggctggtacatgtttcagttccaccggatcctgcagtacgccctgccgagacaggagtcccagcggccattcttttggattttcatggacaacttgctgctgaccgaggatgaccaggaaactaccactcggttcctgcagaccgaagccgtgaccctgcaggacgtgagaggccgggactaccagaacgccatgcgggtgtggtccaacatccctggactgaaaagcaagcacgcacctctgacccctaaagaagaggagtacctgcaggcccaggtgcggagcagaagcaagctggacgcccctaaggtggatctgctggtgaagaattgcctcctgcccctgagagagtacttcaagtatttcagccagaatagtctgcccctgggaggcagcggcggcggcagccagagcctggtgaccttcggcgacgtggccgtggacttcagccaggaggagtgggagaggctgagcagcgaccagagggacctgtacaggagggtgatgctggagaactacaggaacctggtgagcctgggcctgtgcttcagcaagcccgacatcatcagcagcctggagcagaggaaggagctgtggatggccaagagggaggtgaccaggggccagtgccccgactggaaggccgtgggcggcccaagcagcggcgcccctcctcccagcggcggcagcccagccggctccccaacctctaccgaggagggcacctctgagtccgccacccccgagagcggccctggcacctccaccgagcccagcgagggcagcgcacccggcagccctgccggcagccccacctccacagaggagggaaccagcaccgagcccagcgaaggcagcgccccaggcaccagcaccgagcctagtgagcaggagattaaacggatcaacaagatcagaagaagacttgtgaaagacagcaacaccaagaaggccggcaagacaggccccatgaaaaccctgctggttagagtgatgacacccgatctgagagagcggctggaaaacctgagaaagaagcctgaaaatatcccccagcccatcagcaatacatctagagccaacctgaataagctgctgaccgattacaccgaaatgaagaaggcgatcctgcatgtgtactgggaagagttccagaaggaccctgtgggcctgatgagccgggtggcccagcctgccagcaagaagatcgatcagaacaagctgaaacctgagatggacgagaagggcaacctgaccaccgccggctttgcctgctctcagtgtggccagcccctgttcgtgtacaagctggagcaggtgtctgagaagggcaaggcttacaccaactacttcggacggtgcaatgtggccgagcacgaaaagctgatcctgctggcccagctgaagcccgagaaggatagcgacgaagccgtgacatatagcctgggaaagtttgggcagagggccctggatttctacagcattcatgtgaccaaggagtccacccaccccgtgaagcccctggcccagatcgccggaaacagatacgcctccggacctgtgggaaaggccctgagcgacgcatgtatgggcacaatcgcctccttcctgtctaagtaccaggacatcatcatcgaacaccagaaggtggtgaagggcaaccagaagagactggagagcctgcgggagctggccggcaaggaaaacctggaataccctagcgtgaccctgccacctcagcctcacaccaaggagggcgttgatgcctacaacgaagtgatcgcccgggtgcgaatgtgggtgaacctgaacctgtggcagaagctgaagctaagcagagatgatgccaagcctctgctgagactgaagggattcccttcctttcctctggtcgagagacaggccaacgaagtggactggtgggacatggtgtgtaacgtgaagaagctgatcaacgagaaaaaggaggatggcaaggtgttttggcagaatctggctggctacaagagacaggaagccctgagaccatacctgagcagcgaggaagatcggaagaagggaaagaaattcgctcggtaccagctgggcgacctgctgctgcacctggaaaagaagcacggcgaggactggggaaaggtgtacgacgaggcctgggagcggattgacaagaaagtggaaggcctgagcaagcacatcaagctggaagaggaacggagaagcgaggacgcccagagcaaggccgccctgaccgactggctgcgggctaaggccagcttcgtgatcgagggcctgaaggaggccgacaaggacgagttctgcagatgcgagctgaagctgcagaagtggtacggggacctgcggggaaagcccttcgccatcgaagccgagaacagcatcctggacatcagcggcttcagcaagcagtacaactgtgccttcatctggcagaaggacggcgtgaagaagctgaacctgtacctgatcatcaactacttcaagggcggcaagctgcggttcaagaagatcaaacctgaagccttcgaagccaacagattctacaccgtgatcaacaaaaagagcggcgagatcgtgcccatggaggtgaacttcaacttcgacgaccccaacctgatcatcctgcctctggcctttggcaagagacagggcagagaattcatctggaacgacctgctgtccctggaaaccggcagcctgaagctggccaacggaagagtgatcgagaagacactgtacaacagaagaacccggcaggatgagcctgccctgttcgtggccctgaccttcgagcggcgggaggtcctggactcctccaatatcaaaccaatgaacctgatcggcgtggcaagaggcgaaaacatccccgccgtgatcgccctgaccgaccccgagggctgcccactgagccggtttaaggatagcctgggaaacccaacccacatcctgagaatcggcgagagctataaggagaagcagcggaccatccaggccaagaaggaggtggagcagcggagagccggcggctacagccggaagtacgccagcaaagccaagaatctggcagacgatatggtgagaaacaccgctagagatctgctgtactacgccgtgacccaggatgccatgctgatcttcgccaacctgagccggggcttcggccggcagggcaagcggaccttcatggccgagagacagtacacacggatggaggactggctgaccgccaagctggcctacgagggcctgagcaagacctacctgtccaagacactggcccagtacacctccaagacatgcagcaactgtgggtttaccatcaccagcgccgactacgacagggtgctggagaagctgaagaagacagcaacaggctggatgaccacaattaacggcaaggagctgaaggtggagggccagattacctactacaacagatacaagagacagaacgtagtcaaggacctgtccgtcgagctggatagactgagcgaagaatctgtgaacaacgacatctcctcctggacaaagggcagaagcggagaagctctgagcctcctgaagaaaagattctcccatagacccgtgcaggagaagttcgtgtgcctgaactgcggcttcgagacacacgcagccgagcaagccgccctgaacatcgccagatcctggctgttcctgcggagccaggagtacaagaaataccagacaaacaagacaaccggcaacaccgataagagagccttcgtcgagacctggcagtccttttaccggaagaagcttaaggaggtgtggaaacctgccgtgcggtctggcggatctggcggaggctccaccagccccaagaaaaagagaaaagtctaagctgccttctgcggggcttgccttctggccatgcccttcttctctcccttgcacctgtacctcttggtctttgaataaagcctgagtaggaaggctagcaaaaaaaaaaaaaaaaaaaaaaaaaaaaaaaaaaaaaaaaaaaaaaaaaaaaaaaaaaaaaaaaaaaaaaaaaaaaaaaa

SEQ ID NO: 12935 - RNA, 5785 nt, synthetic construct
  source 1..5785: mol_type = other RNA
aggaaataagagagaaaagaagagtaagaagaaatataagagccaccatggcccctaagaagaagcgtaaagtgagccggatggaacgcctcgtctacgaggtgcggcagaagtgcagaaacatcgaggacatctgcatctcctgcggatctctgaacgtgaccctggagcacccactgttcatcggcggcatgtgccagaactgtaaaaactgttttctggagtgtgcctatcaatacgacgatgacggctaccagagctactgcaccatctgttgcggcggaagagaggtgctgatgtgtggaaataacaactgctgccggtgcttctgcgtggaatgcgtggacctgctggtgggccccggcgccgcccaggccgctattaaggaagatccttggaactgctacatgtgcggccacaagggcacatacggcctgctgagacggagagaggactggcctagcagactgcagatgttcttcgccaataaccacgaccaggagttcgacccccctaaggtgtaccctcccgtccccgccgagaagagaaagcccatccgggtcctgagcctgttcgatggcatcgccaccggtctgctggtgctgaaggacctgggcatccaggtggataggtacattgcctccgaggtgtgcgaggactccatcaccgtgggaatggtgcgtcatcagggcaagatcatgtacgtgggcgacgtgcggagcgtgacacagaagcatatccaggagtggggccctttcgacctggtgatcggcggcagcccttgcaatgacctgagcatcgtgaacccagcccggaagggcctgtacgagggaaccggcagactgttcttcgagttttacagactgctgcacgacgcccggcctaaggaaggcgacgaccggcccttcttttggctgttcgagaatgtggtggccatgggagtcagcgacaagcgggatattagccggttcctggagagcaaccccgtgatgatcgatgccaaggaagtgagcgccgcccaccgggccagatacttctggggcaatctgcctggcatgaacagacccctggccagcaccgtgaacgacaagctggagctgcaggagtgcctggagcacggccggatcgccaagttcagcaaggtgagaaccatcaccacccgaagcaacagcatcaaacaaggcaaggaccagcactttcctgtgttcatgaacgagaaggaggacatcctgtggtgtaccgagatggagagagtgttcgggttcccagtccactacacagatgtcagcaacatgtctagactggccagacagagactgctgggaagaagctggtccgtccctgtgatcagacacctgttcgcccctctgaaggagtacttcgcctgcgtgagcagcggcaacagcaacgccaacagccggggccccagcttctctagcggcctggtgccactgtccctgagagggagccacatgggccccatggagatctacaaaaccgtgagcgcctggaagcggcagcctgtgcgcgtgctgagcctgtttcggaatatcgataaagtcctgaaaagcctgggattcctggagagcggctctggctccggcggtggcaccctgaagtacgtggaggatgtgacaaacgtggtcagacgggatgtggagaagtggggccccttcgatctggtgtacggcagcacccaacccctgggcagctcttgtgaccggtgccctggctggtacatgtttcagttccaccggatcctgcagtacgccctgccgagacaggagtcccagcggccattcttttggattttcatggacaacttgctgctgaccgaggatgaccaggaaactaccactcggttcctgcagaccgaagccgtgaccctgcaggacgtgagaggccgggactaccagaacgccatgcgggtgtggtccaacatccctggactgaaaagcaagcacgcacctctgacccctaaagaagaggagtacctgcaggcccaggtgcggagcagaagcaagctggacgcccctaaggtggatctgctggtgaagaattgcctcctgcccctgagagagtacttcaagtatttcagccagaatagtctgcccctgggaggcagcggcggcggcaagcccggcgccctgagcttcgccgacgtggccgtgtacttcagcagcgaggagtggggctgcctgaggcccgcccagagggccctgtacagggacgtgatgagggagacctacggccacctgggcgccctgggcttcgccggccccaagcccgccctgatcagctggatggagaggaagaaggaggcctggagccccgaggccgaggaccccgaggacagggccaggcaccccggctacggcggcggcccaagcagcggcgcccctcctcccagcggcggcagcccagccggctccccaacctctaccgaggagggcacctctgagtccgccacccccgagagcggccctggcacctccaccgagcccagcgagggcagcgcacccggcagccctgccggcagccccacctccacagaggagggaaccagcaccgagcccagcgaaggcagcgccccaggcaccagcaccgagcctagtgagcaggagattaaacggatcaacaagatcagaagaagacttgtgaaagacagcaacaccaagaaggccggcaagacaggccccatgaaaaccctgctggttagagtgatgacacccgatctgagagagcggctggaaaacctgagaaagaagcctgaaaatatcccccagcccatcagcaatacatctagagccaacctgaataagctgctgaccgattacaccgaaatgaagaaggcgatcctgcatgtgtactgggaagagttccagaaggaccctgtgggcctgatgagccgggtggcccagcctgccagcaagaagatcgatcagaacaagctgaaacctgagatggacgagaagggcaacctgaccaccgccggctttgcctgctctcagtgtggccagcccctgttcgtgtacaagctggagcaggtgtctgagaagggcaaggcttacaccaactacttcggacggtgcaatgtggccgagcacgaaaagctgatcctgctggcccagctgaagcccgagaaggatagcgacgaagccgtgacatatagcctgggaaagtttgggcagagggccctggatttctacagcattcatgtgaccaaggagtccacccaccccgtgaagcccctggcccagatcgccggaaacagatacgcctccggacctgtgggaaaggccctgagcgacgcatgtatgggcacaatcgcctccttcctgtctaagtaccaggacatcatcatcgaacaccagaaggtggtgaagggcaaccagaagagactggagagcctgcgggagctggccggcaaggaaaacctggaataccctagcgtgaccctgccacctcagcctcacaccaaggagggcgttgatgcctacaacgaagtgatcgcccgggtgcgaatgtgggtgaacctgaacctgtggcagaagctgaagctaagcagagatgatgccaagcctctgctgagactgaagggattcccttcctttcctctggtcgagagacaggccaacgaagtggactggtgggacatggtgtgtaacgtgaagaagctgatcaacgagaaaaaggaggatggcaaggtgttttggcagaatctggctggctacaagagacaggaagccctgagaccatacctgagcagcgaggaagatcggaagaagggaaagaaattcgctcggtaccagctgggcgacctgctgctgcacctggaaaagaagcacggcgaggactggggaaaggtgtacgacgaggcctgggagcggattgacaagaaagtggaaggcctgagcaagcacatcaagctggaagaggaacggagaagcgaggacgcccagagcaaggccgccctgaccgactggctgcgggctaaggccagcttcgtgatcgagggcctgaaggaggccgacaaggacgagttctgcagatgcgagctgaagctgcagaagtggtacggggacctgcggggaaagcccttcgccatcgaagccgagaacagcatcctggacatcagcggcttcagcaagcagtacaactgtgccttcatctggcagaaggacggcgtgaagaagctgaacctgtacctgatcatcaactacttcaagggcggcaagctgcggttcaagaagatcaaacctgaagccttcgaagccaacagattctacaccgtgatcaacaaaaagagcggcgagatcgtgcccatggaggtgaacttcaacttcgacgaccccaacctgatcatcctgcctctggcctttggcaagagacagggcagagaattcatctggaacgacctgctgtccctggaaaccggcagcctgaagctggccaacggaagagtgatcgagaagacactgtacaacagaagaacccggcaggatgagcctgccctgttcgtggccctgaccttcgagcggcgggaggtcctggactcctccaatatcaaaccaatgaacctgatcggcgtggcaagaggcgaaaacatccccgccgtgatcgccctgaccgaccccgagggctgcccactgagccggtttaaggatagcctgggaaacccaacccacatcctgagaatcggcgagagctataaggagaagcagcggaccatccaggccaagaaggaggtggagcagcggagagccggcggctacagccggaagtacgccagcaaagccaagaatctggcagacgatatggtgagaaacaccgctagagatctgctgtactacgccgtgacccaggatgccatgctgatcttcgccaacctgagccggggcttcggccggcagggcaagcggaccttcatggccgagagacagtacacacggatggaggactggctgaccgccaagctggcctacgagggcctgagcaagacctacctgtccaagacactggcccagtacacctccaagacatgcagcaactgtgggtttaccatcaccagcgccgactacgacagggtgctggagaagctgaagaagacagcaacaggctggatgaccacaattaacggcaaggagctgaaggtggagggccagattacctactacaacagatacaagagacagaacgtagtcaaggacctgtccgtcgagctggatagactgagcgaagaatctgtgaacaacgacatctcctcctggacaaagggcagaagcggagaagctctgagcctcctgaagaaaagattctcccatagacccgtgcaggagaagttcgtgtgcctgaactgcggcttcgagacacacgcagccgagcaagccgccctgaacatcgccagatcctggctgttcctgcggagccaggagtacaagaaataccagacaaacaagacaaccggcaacaccgataagagagccttcgtcgagacctggcagtccttttaccggaagaagcttaaggaggtgtggaaacctgccgtgcggtctggcggatctggcggaggctccaccagccccaagaaaaagagaaaagtctaagctgccttctgcggggcttgccttctggccatgcccttcttctctcccttgcacctgtacctcttggtctttgaataaagcctgagtaggaaggctagcaaaaaaaaaaaaaaaaaaaaaaaaaaaaaaaaaaaaaaaaaaaaaaaaaaaaaaaaaaaaaaaaaaaaaaaaaaaaaaaa

SEQ ID NO: 12936 - RNA, 5785 nt, synthetic construct
  source 1..5785: mol_type = other RNA
aggaaataagagagaaaagaagagtaagaagaaatataagagccaccatggcccctaagaagaagcgtaaagtgagccggatggaacgcctcgtctacgaggtgcggcagaagtgcagaaacatcgaggacatctgcatctcctgcggatctctgaacgtgaccctggagcacccactgttcatcggcggcatgtgccagaactgtaaaaactgttttctggagtgtgcctatcaatacgacgatgacggctaccagagctactgcaccatctgttgcggcggaagagaggtgctgatgtgtggaaataacaactgctgccggtgcttctgcgtggaatgcgtggacctgctggtgggccccggcgccgcccaggccgctattaaggaagatccttggaactgctacatgtgcggccacaagggcacatacggcctgctgagacggagagaggactggcctagcagactgcagatgttcttcgccaataaccacgaccaggagttcgacccccctaaggtgtaccctcccgtccccgccgagaagagaaagcccatccgggtcctgagcctgttcgatggcatcgccaccggtctgctggtgctgaaggacctgggcatccaggtggataggtacattgcctccgaggtgtgcgaggactccatcaccgtgggaatggtgcgtcatcagggcaagatcatgtacgtgggcgacgtgcggagcgtgacacagaagcatatccaggagtggggccctttcgacctggtgatcggcggcagcccttgcaatgacctgagcatcgtgaacccagcccggaagggcctgtacgagggaaccggcagactgttcttcgagttttacagactgctgcacgacgcccggcctaaggaaggcgacgaccggcccttcttttggctgttcgagaatgtggtggccatgggagtcagcgacaagcgggatattagccggttcctggagagcaaccccgtgatgatcgatgccaaggaagtgagcgccgcccaccgggccagatacttctggggcaatctgcctggcatgaacagacccctggccagcaccgtgaacgacaagctggagctgcaggagtgcctggagcacggccggatcgccaagttcagcaaggtgagaaccatcaccacccgaagcaacagcatcaaacaaggcaaggaccagcactttcctgtgttcatgaacgagaaggaggacatcctgtggtgtaccgagatggagagagtgttcgggttcccagtccactacacagatgtcagcaacatgtctagactggccagacagagactgctgggaagaagctggtccgtccctgtgatcagacacctgttcgcccctctgaaggagtacttcgcctgcgtgagcagcggcaacagcaacgccaacagccggggccccagcttctctagcggcctggtgccactgtccctgagagggagccacatgggccccatggagatctacaaaaccgtgagcgcctggaagcggcagcctgtgcgcgtgctgagcctgtttcggaatatcgataaagtcctgaaaagcctgggattcctggagagcggctctggctccggcggtggcaccctgaagtacgtggaggatgtgacaaacgtggtcagacgggatgtggagaagtggggccccttcgatctggtgtacggcagcacccaacccctgggcagctcttgtgaccggtgccctggctggtacatgtttcagttccaccggatcctgcagtacgccctgccgagacaggagtcccagcggccattcttttggattttcatggacaacttgctgctgaccgaggatgaccaggaaactaccactcggttcctgcagaccgaagccgtgaccctgcaggacgtgagaggccgggactaccagaacgccatgcgggtgtggtccaacatccctggactgaaaagcaagcacgcacctctgacccctaaagaagaggagtacctgcaggcccaggtgcggagcagaagcaagctggacgcccctaaggtggatctgctggtgaagaattgcctcctgcccctgagagagtacttcaagtatttcagccagaatagtctgcccctgggaggcagcggcggcggcatggagcccctgaagttcagggacgtggccgtggagttcagcctggaggagtggcagtgcctggacaccatccagcagaacctgtacaggaacgtgatgctggagaactacaggaacctggtgttcctgggcatcgccgtgagcaagcccgacctgatcacctgcctggagcaggagaaggagccctggaccaggaagaggcacaggatggtggccaagcccgtgacctgcagccacttcgccggcggcccaagcagcggcgcccctcctcccagcggcggcagcccagccggctccccaacctctaccgaggagggcacctctgagtccgccacccccgagagcggccctggcacctccaccgagcccagcgagggcagcgcacccggcagccctgccggcagccccacctccacagaggagggaaccagcaccgagcccagcgaaggcagcgccccaggcaccagcaccgagcctagtgagcaggagattaaacggatcaacaagatcagaagaagacttgtgaaagacagcaacaccaagaaggccggcaagacaggccccatgaaaaccctgctggttagagtgatgacacccgatctgagagagcggctggaaaacctgagaaagaagcctgaaaatatcccccagcccatcagcaatacatctagagccaacctgaataagctgctgaccgattacaccgaaatgaagaaggcgatcctgcatgtgtactgggaagagttccagaaggaccctgtgggcctgatgagccgggtggcccagcctgccagcaagaagatcgatcagaacaagctgaaacctgagatggacgagaagggcaacctgaccaccgccggctttgcctgctctcagtgtggccagcccctgttcgtgtacaagctggagcaggtgtctgagaagggcaaggcttacaccaactacttcggacggtgcaatgtggccgagcacgaaaagctgatcctgctggcccagctgaagcccgagaaggatagcgacgaagccgtgacatatagcctgggaaagtttgggcagagggccctggatttctacagcattcatgtgaccaaggagtccacccaccccgtgaagcccctggcccagatcgccggaaacagatacgcctccggacctgtgggaaaggccctgagcgacgcatgtatgggcacaatcgcctccttcctgtctaagtaccaggacatcatcatcgaacaccagaaggtggtgaagggcaaccagaagagactggagagcctgcgggagctggccggcaaggaaaacctggaataccctagcgtgaccctgccacctcagcctcacaccaaggagggcgttgatgcctacaacgaagtgatcgcccgggtgcgaatgtgggtgaacctgaacctgtggcagaagctgaagctaagcagagatgatgccaagcctctgctgagactgaagggattcccttcctttcctctggtcgagagacaggccaacgaagtggactggtgggacatggtgtgtaacgtgaagaagctgatcaacgagaaaaaggaggatggcaaggtgttttggcagaatctggctggctacaagagacaggaagccctgagaccatacctgagcagcgaggaagatcggaagaagggaaagaaattcgctcggtaccagctgggcgacctgctgctgcacctggaaaagaagcacggcgaggactggggaaaggtgtacgacgaggcctgggagcggattgacaagaaagtggaaggcctgagcaagcacatcaagctggaagaggaacggagaagcgaggacgcccagagcaaggccgccctgaccgactggctgcgggctaaggccagcttcgtgatcgagggcctgaaggaggccgacaaggacgagttctgcagatgcgagctgaagctgcagaagtggtacggggacctgcggggaaagcccttcgccatcgaagccgagaacagcatcctggacatcagcggcttcagcaagcagtacaactgtgccttcatctggcagaaggacggcgtgaagaagctgaacctgtacctgatcatcaactacttcaagggcggcaagctgcggttcaagaagatcaaacctgaagccttcgaagccaacagattctacaccgtgatcaacaaaaagagcggcgagatcgtgcccatggaggtgaacttcaacttcgacgaccccaacctgatcatcctgcctctggcctttggcaagagacagggcagagaattcatctggaacgacctgctgtccctggaaaccggcagcctgaagctggccaacggaagagtgatcgagaagacactgtacaacagaagaacccggcaggatgagcctgccctgttcgtggccctgaccttcgagcggcgggaggtcctggactcctccaatatcaaaccaatgaacctgatcggcgtggcaagaggcgaaaacatccccgccgtgatcgccctgaccgaccccgagggctgcccactgagccggtttaaggatagcctgggaaacccaacccacatcctgagaatcggcgagagctataaggagaagcagcggaccatccaggccaagaaggaggtggagcagcggagagccggcggctacagccggaagtacgccagcaaagccaagaatctggcagacgatatggtgagaaacaccgctagagatctgctgtactacgccgtgacccaggatgccatgctgatcttcgccaacctgagccggggcttcggccggcagggcaagcggaccttcatggccgagagacagtacacacggatggaggactggctgaccgccaagctggcctacgagggcctgagcaagacctacctgtccaagacactggcccagtacacctccaagacatgcagcaactgtgggtttaccatcaccagcgccgactacgacagggtgctggagaagctgaagaagacagcaacaggctggatgaccacaattaacggcaaggagctgaaggtggagggccagattacctactacaacagatacaagagacagaacgtagtcaaggacctgtccgtcgagctggatagactgagcgaagaatctgtgaacaacgacatctcctcctggacaaagggcagaagcggagaagctctgagcctcctgaagaaaagattctcccatagacccgtgcaggagaagttcgtgtgcctgaactgcggcttcgagacacacgcagccgagcaagccgccctgaacatcgccagatcctggctgttcctgcggagccaggagtacaagaaataccagacaaacaagacaaccggcaacaccgataagagagccttcgtcgagacctggcagtccttttaccggaagaagcttaaggaggtgtggaaacctgccgtgcggtctggcggatctggcggaggctccaccagccccaagaaaaagagaaaagtctaagctgccttctgcggggcttgccttctggccatgcccttcttctctcccttgcacctgtacctcttggtctttgaataaagcctgagtaggaaggctagcaaaaaaaaaaaaaaaaaaaaaaaaaaaaaaaaaaaaaaaaaaaaaaaaaaaaaaaaaaaaaaaaaaaaaaaaaaaaaaaa

SEQ ID NO: 12937 - RNA, 5785 nt, synthetic construct
  source 1..5785: mol_type = other RNA
aggaaataagagagaaaagaagagtaagaagaaatataagagccaccatggcccctaagaagaagcgtaaagtgagccggatggaacgcctcgtctacgaggtgcggcagaagtgcagaaacatcgaggacatctgcatctcctgcggatctctgaacgtgaccctggagcacccactgttcatcggcggcatgtgccagaactgtaaaaactgttttctggagtgtgcctatcaatacgacgatgacggctaccagagctactgcaccatctgttgcggcggaagagaggtgctgatgtgtggaaataacaactgctgccggtgcttctgcgtggaatgcgtggacctgctggtgggccccggcgccgcccaggccgctattaaggaagatccttggaactgctacatgtgcggccacaagggcacatacggcctgctgagacggagagaggactggcctagcagactgcagatgttcttcgccaataaccacgaccaggagttcgacccccctaaggtgtaccctcccgtccccgccgagaagagaaagcccatccgggtcctgagcctgttcgatggcatcgccaccggtctgctggtgctgaaggacctgggcatccaggtggataggtacattgcctccgaggtgtgcgaggactccatcaccgtgggaatggtgcgtcatcagggcaagatcatgtacgtgggcgacgtgcggagcgtgacacagaagcatatccaggagtggggccctttcgacctggtgatcggcggcagcccttgcaatgacctgagcatcgtgaacccagcccggaagggcctgtacgagggaaccggcagactgttcttcgagttttacagactgctgcacgacgcccggcctaaggaaggcgacgaccggcccttcttttggctgttcgagaatgtggtggccatgggagtcagcgacaagcgggatattagccggttcctggagagcaaccccgtgatgatcgatgccaaggaagtgagcgccgcccaccgggccagatacttctggggcaatctgcctggcatgaacagacccctggccagcaccgtgaacgacaagctggagctgcaggagtgcctggagcacggccggatcgccaagttcagcaaggtgagaaccatcaccacccgaagcaacagcatcaaacaaggcaaggaccagcactttcctgtgttcatgaacgagaaggaggacatcctgtggtgtaccgagatggagagagtgttcgggttcccagtccactacacagatgtcagcaacatgtctagactggccagacagagactgctgggaagaagctggtccgtccctgtgatcagacacctgttcgcccctctgaaggagtacttcgcctgcgtgagcagcggcaacagcaacgccaacagccggggccccagcttctctagcggcctggtgccactgtccctgagagggagccacatgggccccatggagatctacaaaaccgtgagcgcctggaagcggcagcctgtgcgcgtgctgagcctgtttcggaatatcgataaagtcctgaaaagcctgggattcctggagagcggctctggctccggcggtggcaccctgaagtacgtggaggatgtgacaaacgtggtcagacgggatgtggagaagtggggccccttcgatctggtgtacggcagcacccaacccctgggcagctcttgtgaccggtgccctggctggtacatgtttcagttccaccggatcctgcagtacgccctgccgagacaggagtcccagcggccattcttttggattttcatggacaacttgctgctgaccgaggatgaccaggaaactaccactcggttcctgcagaccgaagccgtgaccctgcaggacgtgagaggccgggactaccagaacgccatgcgggtgtggtccaacatccctggactgaaaagcaagcacgcacctctgacccctaaagaagaggagtacctgcaggcccaggtgcggagcagaagcaagctggacgcccctaaggtggatctgctggtgaagaattgcctcctgcccctgagagagtacttcaagtatttcagccagaatagtctgcccctgggaggcagcggcggcggcctgctgcaggagagcctgaccctggaggacgtggccgtggacttcacccaggaggagtggaggctgctggcccccgcccagaaggacctgtacagggacgtgatgctggagaacttcaggaacctggtgagcgtgggctacgtggccagcatgcccgccgccctgagcaggctggagaggggcggcaggtggatgaccgaggacgagaccaggaggggcatctgccccgagatcaagaaggacggcggcccaagcagcggcgcccctcctcccagcggcggcagcccagccggctccccaacctctaccgaggagggcacctctgagtccgccacccccgagagcggccctggcacctccaccgagcccagcgagggcagcgcacccggcagccctgccggcagccccacctccacagaggagggaaccagcaccgagcccagcgaaggcagcgccccaggcaccagcaccgagcctagtgagcaggagattaaacggatcaacaagatcagaagaagacttgtgaaagacagcaacaccaagaaggccggcaagacaggccccatgaaaaccctgctggttagagtgatgacacccgatctgagagagcggctggaaaacctgagaaagaagcctgaaaatatcccccagcccatcagcaatacatctagagccaacctgaataagctgctgaccgattacaccgaaatgaagaaggcgatcctgcatgtgtactgggaagagttccagaaggaccctgtgggcctgatgagccgggtggcccagcctgccagcaagaagatcgatcagaacaagctgaaacctgagatggacgagaagggcaacctgaccaccgccggctttgcctgctctcagtgtggccagcccctgttcgtgtacaagctggagcaggtgtctgagaagggcaaggcttacaccaactacttcggacggtgcaatgtggccgagcacgaaaagctgatcctgctggcccagctgaagcccgagaaggatagcgacgaagccgtgacatatagcctgggaaagtttgggcagagggccctggatttctacagcattcatgtgaccaaggagtccacccaccccgtgaagcccctggcccagatcgccggaaacagatacgcctccggacctgtgggaaaggccctgagcgacgcatgtatgggcacaatcgcctccttcctgtctaagtaccaggacatcatcatcgaacaccagaaggtggtgaagggcaaccagaagagactggagagcctgcgggagctggccggcaaggaaaacctggaataccctagcgtgaccctgccacctcagcctcacaccaaggagggcgttgatgcctacaacgaagtgatcgcccgggtgcgaatgtgggtgaacctgaacctgtggcagaagctgaagctaagcagagatgatgccaagcctctgctgagactgaagggattcccttcctttcctctggtcgagagacaggccaacgaagtggactggtgggacatggtgtgtaacgtgaagaagctgatcaacgagaaaaaggaggatggcaaggtgttttggcagaatctggctggctacaagagacaggaagccctgagaccatacctgagcagcgaggaagatcggaagaagggaaagaaattcgctcggtaccagctgggcgacctgctgctgcacctggaaaagaagcacggcgaggactggggaaaggtgtacgacgaggcctgggagcggattgacaagaaagtggaaggcctgagcaagcacatcaagctggaagaggaacggagaagcgaggacgcccagagcaaggccgccctgaccgactggctgcgggctaaggccagcttcgtgatcgagggcctgaaggaggccgacaaggacgagttctgcagatgcgagctgaagctgcagaagtggtacggggacctgcggggaaagcccttcgccatcgaagccgagaacagcatcctggacatcagcggcttcagcaagcagtacaactgtgccttcatctggcagaaggacggcgtgaagaagctgaacctgtacctgatcatcaactacttcaagggcggcaagctgcggttcaagaagatcaaacctgaagccttcgaagccaacagattctacaccgtgatcaacaaaaagagcggcgagatcgtgcccatggaggtgaacttcaacttcgacgaccccaacctgatcatcctgcctctggcctttggcaagagacagggcagagaattcatctggaacgacctgctgtccctggaaaccggcagcctgaagctggccaacggaagagtgatcgagaagacactgtacaacagaagaacccggcaggatgagcctgccctgttcgtggccctgaccttcgagcggcgggaggtcctggactcctccaatatcaaaccaatgaacctgatcggcgtggcaagaggcgaaaacatccccgccgtgatcgccctgaccgaccccgagggctgcccactgagccggtttaaggatagcctgggaaacccaacccacatcctgagaatcggcgagagctataaggagaagcagcggaccatccaggccaagaaggaggtggagcagcggagagccggcggctacagccggaagtacgccagcaaagccaagaatctggcagacgatatggtgagaaacaccgctagagatctgctgtactacgccgtgacccaggatgccatgctgatcttcgccaacctgagccggggcttcggccggcagggcaagcggaccttcatggccgagagacagtacacacggatggaggactggctgaccgccaagctggcctacgagggcctgagcaagacctacctgtccaagacactggcccagtacacctccaagacatgcagcaactgtgggtttaccatcaccagcgccgactacgacagggtgctggagaagctgaagaagacagcaacaggctggatgaccacaattaacggcaaggagctgaaggtggagggccagattacctactacaacagatacaagagacagaacgtagtcaaggacctgtccgtcgagctggatagactgagcgaagaatctgtgaacaacgacatctcctcctggacaaagggcagaagcggagaagctctgagcctcctgaagaaaagattctcccatagacccgtgcaggagaagttcgtgtgcctgaactgcggcttcgagacacacgcagccgagcaagccgccctgaacatcgccagatcctggctgttcctgcggagccaggagtacaagaaataccagacaaacaagacaaccggcaacaccgataagagagccttcgtcgagacctggcagtccttttaccggaagaagcttaaggaggtgtggaaacctgccgtgcggtctggcggatctggcggaggctccaccagccccaagaaaaagagaaaagtctaagctgccttctgcggggcttgccttctggccatgcccttcttctctcccttgcacctgtacctcttggtctttgaataaagcctgagtaggaaggctagcaaaaaaaaaaaaaaaaaaaaaaaaaaaaaaaaaaaaaaaaaaaaaaaaaaaaaaaaaaaaaaaaaaaaaaaaaaaaaaaa

SEQ ID NO: 12938 - RNA, 5785 nt, synthetic construct
  source 1..5785: mol_type = other RNA
aggaaataagagagaaaagaagagtaagaagaaatataagagccaccatggcccctaagaagaagcgtaaagtgagccggatggaacgcctcgtctacgaggtgcggcagaagtgcagaaacatcgaggacatctgcatctcctgcggatctctgaacgtgaccctggagcacccactgttcatcggcggcatgtgccagaactgtaaaaactgttttctggagtgtgcctatcaatacgacgatgacggctaccagagctactgcaccatctgttgcggcggaagagaggtgctgatgtgtggaaataacaactgctgccggtgcttctgcgtggaatgcgtggacctgctggtgggccccggcgccgcccaggccgctattaaggaagatccttggaactgctacatgtgcggccacaagggcacatacggcctgctgagacggagagaggactggcctagcagactgcagatgttcttcgccaataaccacgaccaggagttcgacccccctaaggtgtaccctcccgtccccgccgagaagagaaagcccatccgggtcctgagcctgttcgatggcatcgccaccggtctgctggtgctgaaggacctgggcatccaggtggataggtacattgcctccgaggtgtgcgaggactccatcaccgtgggaatggtgcgtcatcagggcaagatcatgtacgtgggcgacgtgcggagcgtgacacagaagcatatccaggagtggggccctttcgacctggtgatcggcggcagcccttgcaatgacctgagcatcgtgaacccagcccggaagggcctgtacgagggaaccggcagactgttcttcgagttttacagactgctgcacgacgcccggcctaaggaaggcgacgaccggcccttcttttggctgttcgagaatgtggtggccatgggagtcagcgacaagcgggatattagccggttcctggagagcaaccccgtgatgatcgatgccaaggaagtgagcgccgcccaccgggccagatacttctggggcaatctgcctggcatgaacagacccctggccagcaccgtgaacgacaagctggagctgcaggagtgcctggagcacggccggatcgccaagttcagcaaggtgagaaccatcaccacccgaagcaacagcatcaaacaaggcaaggaccagcactttcctgtgttcatgaacgagaaggaggacatcctgtggtgtaccgagatggagagagtgttcgggttcccagtccactacacagatgtcagcaacatgtctagactggccagacagagactgctgggaagaagctggtccgtccctgtgatcagacacctgttcgcccctctgaaggagtacttcgcctgcgtgagcagcggcaacagcaacgccaacagccggggccccagcttctctagcggcctggtgccactgtccctgagagggagccacatgggccccatggagatctacaaaaccgtgagcgcctggaagcggcagcctgtgcgcgtgctgagcctgtttcggaatatcgataaagtcctgaaaagcctgggattcctggagagcggctctggctccggcggtggcaccctgaagtacgtggaggatgtgacaaacgtggtcagacgggatgtggagaagtggggccccttcgatctggtgtacggcagcacccaacccctgggcagctcttgtgaccggtgccctggctggtacatgtttcagttccaccggatcctgcagtacgccctgccgagacaggagtcccagcggccattcttttggattttcatggacaacttgctgctgaccgaggatgaccaggaaactaccactcggttcctgcagaccgaagccgtgaccctgcaggacgtgagaggccgggactaccagaacgccatgcgggtgtggtccaacatccctggactgaaaagcaagcacgcacctctgacccctaaagaagaggagtacctgcaggcccaggtgcggagcagaagcaagctggacgcccctaaggtggatctgctggtgaagaattgcctcctgcccctgagagagtacttcaagtatttcagccagaatagtctgcccctgggaggcagcggcggcggcatgaacaccgtgacctacgacgacgtgcacgtgaacttcacctgggaggagtggaccctgctggaccccagccagaagaacctgtacaaggacgtgatgctggagacctacaggaacctgaccgccgtgggctacagctgggaggaccacaacgtggaggagcactgccagagctacaggaggcacagcaggctggagaggagccacaccggcgagaagagcagcgtgcacacccagtgcgtgggcggcccaagcagcggcgcccctcctcccagcggcggcagcccagccggctccccaacctctaccgaggagggcacctctgagtccgccacccccgagagcggccctggcacctccaccgagcccagcgagggcagcgcacccggcagccctgccggcagccccacctccacagaggagggaaccagcaccgagcccagcgaaggcagcgccccaggcaccagcaccgagcctagtgagcaggagattaaacggatcaacaagatcagaagaagacttgtgaaagacagcaacaccaagaaggccggcaagacaggccccatgaaaaccctgctggttagagtgatgacacccgatctgagagagcggctggaaaacctgagaaagaagcctgaaaatatcccccagcccatcagcaatacatctagagccaacctgaataagctgctgaccgattacaccgaaatgaagaaggcgatcctgcatgtgtactgggaagagttccagaaggaccctgtgggcctgatgagccgggtggcccagcctgccagcaagaagatcgatcagaacaagctgaaacctgagatggacgagaagggcaacctgaccaccgccggctttgcctgctctcagtgtggccagcccctgttcgtgtacaagctggagcaggtgtctgagaagggcaaggcttacaccaactacttcggacggtgcaatgtggccgagcacgaaaagctgatcctgctggcccagctgaagcccgagaaggatagcgacgaagccgtgacatatagcctgggaaagtttgggcagagggccctggatttctacagcattcatgtgaccaaggagtccacccaccccgtgaagcccctggcccagatcgccggaaacagatacgcctccggacctgtgggaaaggccctgagcgacgcatgtatgggcacaatcgcctccttcctgtctaagtaccaggacatcatcatcgaacaccagaaggtggtgaagggcaaccagaagagactggagagcctgcgggagctggccggcaaggaaaacctggaataccctagcgtgaccctgccacctcagcctcacaccaaggagggcgttgatgcctacaacgaagtgatcgcccgggtgcgaatgtgggtgaacctgaacctgtggcagaagctgaagctaagcagagatgatgccaagcctctgctgagactgaagggattcccttcctttcctctggtcgagagacaggccaacgaagtggactggtgggacatggtgtgtaacgtgaagaagctgatcaacgagaaaaaggaggatggcaaggtgttttggcagaatctggctggctacaagagacaggaagccctgagaccatacctgagcagcgaggaagatcggaagaagggaaagaaattcgctcggtaccagctgggcgacctgctgctgcacctggaaaagaagcacggcgaggactggggaaaggtgtacgacgaggcctgggagcggattgacaagaaagtggaaggcctgagcaagcacatcaagctggaagaggaacggagaagcgaggacgcccagagcaaggccgccctgaccgactggctgcgggctaaggccagcttcgtgatcgagggcctgaaggaggccgacaaggacgagttctgcagatgcgagctgaagctgcagaagtggtacggggacctgcggggaaagcccttcgccatcgaagccgagaacagcatcctggacatcagcggcttcagcaagcagtacaactgtgccttcatctggcagaaggacggcgtgaagaagctgaacctgtacctgatcatcaactacttcaagggcggcaagctgcggttcaagaagatcaaacctgaagccttcgaagccaacagattctacaccgtgatcaacaaaaagagcggcgagatcgtgcccatggaggtgaacttcaacttcgacgaccccaacctgatcatcctgcctctggcctttggcaagagacagggcagagaattcatctggaacgacctgctgtccctggaaaccggcagcctgaagctggccaacggaagagtgatcgagaagacactgtacaacagaagaacccggcaggatgagcctgccctgttcgtggccctgaccttcgagcggcgggaggtcctggactcctccaatatcaaaccaatgaacctgatcggcgtggcaagaggcgaaaacatccccgccgtgatcgccctgaccgaccccgagggctgcccactgagccggtttaaggatagcctgggaaacccaacccacatcctgagaatcggcgagagctataaggagaagcagcggaccatccaggccaagaaggaggtggagcagcggagagccggcggctacagccggaagtacgccagcaaagccaagaatctggcagacgatatggtgagaaacaccgctagagatctgctgtactacgccgtgacccaggatgccatgctgatcttcgccaacctgagccggggcttcggccggcagggcaagcggaccttcatggccgagagacagtacacacggatggaggactggctgaccgccaagctggcctacgagggcctgagcaagacctacctgtccaagacactggcccagtacacctccaagacatgcagcaactgtgggtttaccatcaccagcgccgactacgacagggtgctggagaagctgaagaagacagcaacaggctggatgaccacaattaacggcaaggagctgaaggtggagggccagattacctactacaacagatacaagagacagaacgtagtcaaggacctgtccgtcgagctggatagactgagcgaagaatctgtgaacaacgacatctcctcctggacaaagggcagaagcggagaagctctgagcctcctgaagaaaagattctcccatagacccgtgcaggagaagttcgtgtgcctgaactgcggcttcgagacacacgcagccgagcaagccgccctgaacatcgccagatcctggctgttcctgcggagccaggagtacaagaaataccagacaaacaagacaaccggcaacaccgataagagagccttcgtcgagacctggcagtccttttaccggaagaagcttaaggaggtgtggaaacctgccgtgcggtctggcggatctggcggaggctccaccagccccaagaaaaagagaaaagtctaagctgccttctgcggggcttgccttctggccatgcccttcttctctcccttgcacctgtacctcttggtctttgaataaagcctgagtaggaaggctagcaaaaaaaaaaaaaaaaaaaaaaaaaaaaaaaaaaaaaaaaaaaaaaaaaaaaaaaaaaaaaaaaaaaaaaaaaaaaaaaa

SEQ ID NO: 12939 - RNA, 5785 nt, synthetic construct
  source 1..5785: mol_type = other RNA
aggaaataagagagaaaagaagagtaagaagaaatataagagccaccatggcccctaagaagaagcgtaaagtgagccggatggaacgcctcgtctacgaggtgcggcagaagtgcagaaacatcgaggacatctgcatctcctgcggatctctgaacgtgaccctggagcacccactgttcatcggcggcatgtgccagaactgtaaaaactgttttctggagtgtgcctatcaatacgacgatgacggctaccagagctactgcaccatctgttgcggcggaagagaggtgctgatgtgtggaaataacaactgctgccggtgcttctgcgtggaatgcgtggacctgctggtgggccccggcgccgcccaggccgctattaaggaagatccttggaactgctacatgtgcggccacaagggcacatacggcctgctgagacggagagaggactggcctagcagactgcagatgttcttcgccaataaccacgaccaggagttcgacccccctaaggtgtaccctcccgtccccgccgagaagagaaagcccatccgggtcctgagcctgttcgatggcatcgccaccggtctgctggtgctgaaggacctgggcatccaggtggataggtacattgcctccgaggtgtgcgaggactccatcaccgtgggaatggtgcgtcatcagggcaagatcatgtacgtgggcgacgtgcggagcgtgacacagaagcatatccaggagtggggccctttcgacctggtgatcggcggcagcccttgcaatgacctgagcatcgtgaacccagcccggaagggcctgtacgagggaaccggcagactgttcttcgagttttacagactgctgcacgacgcccggcctaaggaaggcgacgaccggcccttcttttggctgttcgagaatgtggtggccatgggagtcagcgacaagcgggatattagccggttcctggagagcaaccccgtgatgatcgatgccaaggaagtgagcgccgcccaccgggccagatacttctggggcaatctgcctggcatgaacagacccctggccagcaccgtgaacgacaagctggagctgcaggagtgcctggagcacggccggatcgccaagttcagcaaggtgagaaccatcaccacccgaagcaacagcatcaaacaaggcaaggaccagcactttcctgtgttcatgaacgagaaggaggacatcctgtggtgtaccgagatggagagagtgttcgggttcccagtccactacacagatgtcagcaacatgtctagactggccagacagagactgctgggaagaagctggtccgtccctgtgatcagacacctgttcgcccctctgaaggagtacttcgcctgcgtgagcagcggcaacagcaacgccaacagccggggccccagcttctctagcggcctggtgccactgtccctgagagggagccacatgggccccatggagatctacaaaaccgtgagcgcctggaagcggcagcctgtgcgcgtgctgagcctgtttcggaatatcgataaagtcctgaaaagcctgggattcctggagagcggctctggctccggcggtggcaccctgaagtacgtggaggatgtgacaaacgtggtcagacgggatgtggagaagtggggccccttcgatctggtgtacggcagcacccaacccctgggcagctcttgtgaccggtgccctggctggtacatgtttcagttccaccggatcctgcagtacgccctgccgagacaggagtcccagcggccattcttttggattttcatggacaacttgctgctgaccgaggatgaccaggaaactaccactcggttcctgcagaccgaagccgtgaccctgcaggacgtgagaggccgggactaccagaacgccatgcgggtgtggtccaacatccctggactgaaaagcaagcacgcacctctgacccctaaagaagaggagtacctgcaggcccaggtgcggagcagaagcaagctggacgcccctaaggtggatctgctggtgaagaattgcctcctgcccctgagagagtacttcaagtatttcagccagaatagtctgcccctgggaggcagcggcggcggcgccagggcccccgtgagcttcgaggaggtggccgtgtacttcagccccgaggagtggcagaccctgcagggctggcagaaggagatgtacaggggcgtgatgagggagaactacgagatcatgctgagcctgggctaccagttcagcaagcccgagatcctgctgatgatggagaggggcgaggagccctgcgtggaggactgccagaggaggatccccgtgaccttcagggagaagcacctgggcggcccaagcagcggcgcccctcctcccagcggcggcagcccagccggctccccaacctctaccgaggagggcacctctgagtccgccacccccgagagcggccctggcacctccaccgagcccagcgagggcagcgcacccggcagccctgccggcagccccacctccacagaggagggaaccagcaccgagcccagcgaaggcagcgccccaggcaccagcaccgagcctagtgagcaggagattaaacggatcaacaagatcagaagaagacttgtgaaagacagcaacaccaagaaggccggcaagacaggccccatgaaaaccctgctggttagagtgatgacacccgatctgagagagcggctggaaaacctgagaaagaagcctgaaaatatcccccagcccatcagcaatacatctagagccaacctgaataagctgctgaccgattacaccgaaatgaagaaggcgatcctgcatgtgtactgggaagagttccagaaggaccctgtgggcctgatgagccgggtggcccagcctgccagcaagaagatcgatcagaacaagctgaaacctgagatggacgagaagggcaacctgaccaccgccggctttgcctgctctcagtgtggccagcccctgttcgtgtacaagctggagcaggtgtctgagaagggcaaggcttacaccaactacttcggacggtgcaatgtggccgagcacgaaaagctgatcctgctggcccagctgaagcccgagaaggatagcgacgaagccgtgacatatagcctgggaaagtttgggcagagggccctggatttctacagcattcatgtgaccaaggagtccacccaccccgtgaagcccctggcccagatcgccggaaacagatacgcctccggacctgtgggaaaggccctgagcgacgcatgtatgggcacaatcgcctccttcctgtctaagtaccaggacatcatcatcgaacaccagaaggtggtgaagggcaaccagaagagactggagagcctgcgggagctggccggcaaggaaaacctggaataccctagcgtgaccctgccacctcagcctcacaccaaggagggcgttgatgcctacaacgaagtgatcgcccgggtgcgaatgtgggtgaacctgaacctgtggcagaagctgaagctaagcagagatgatgccaagcctctgctgagactgaagggattcccttcctttcctctggtcgagagacaggccaacgaagtggactggtgggacatggtgtgtaacgtgaagaagctgatcaacgagaaaaaggaggatggcaaggtgttttggcagaatctggctggctacaagagacaggaagccctgagaccatacctgagcagcgaggaagatcggaagaagggaaagaaattcgctcggtaccagctgggcgacctgctgctgcacctggaaaagaagcacggcgaggactggggaaaggtgtacgacgaggcctgggagcggattgacaagaaagtggaaggcctgagcaagcacatcaagctggaagaggaacggagaagcgaggacgcccagagcaaggccgccctgaccgactggctgcgggctaaggccagcttcgtgatcgagggcctgaaggaggccgacaaggacgagttctgcagatgcgagctgaagctgcagaagtggtacggggacctgcggggaaagcccttcgccatcgaagccgagaacagcatcctggacatcagcggcttcagcaagcagtacaactgtgccttcatctggcagaaggacggcgtgaagaagctgaacctgtacctgatcatcaactacttcaagggcggcaagctgcggttcaagaagatcaaacctgaagccttcgaagccaacagattctacaccgtgatcaacaaaaagagcggcgagatcgtgcccatggaggtgaacttcaacttcgacgaccccaacctgatcatcctgcctctggcctttggcaagagacagggcagagaattcatctggaacgacctgctgtccctggaaaccggcagcctgaagctggccaacggaagagtgatcgagaagacactgtacaacagaagaacccggcaggatgagcctgccctgttcgtggccctgaccttcgagcggcgggaggtcctggactcctccaatatcaaaccaatgaacctgatcggcgtggcaagaggcgaaaacatccccgccgtgatcgccctgaccgaccccgagggctgcccactgagccggtttaaggatagcctgggaaacccaacccacatcctgagaatcggcgagagctataaggagaagcagcggaccatccaggccaagaaggaggtggagcagcggagagccggcggctacagccggaagtacgccagcaaagccaagaatctggcagacgatatggtgagaaacaccgctagagatctgctgtactacgccgtgacccaggatgccatgctgatcttcgccaacctgagccggggcttcggccggcagggcaagcggaccttcatggccgagagacagtacacacggatggaggactggctgaccgccaagctggcctacgagggcctgagcaagacctacctgtccaagacactggcccagtacacctccaagacatgcagcaactgtgggtttaccatcaccagcgccgactacgacagggtgctggagaagctgaagaagacagcaacaggctggatgaccacaattaacggcaaggagctgaaggtggagggccagattacctactacaacagatacaagagacagaacgtagtcaaggacctgtccgtcgagctggatagactgagcgaagaatctgtgaacaacgacatctcctcctggacaaagggcagaagcggagaagctctgagcctcctgaagaaaagattctcccatagacccgtgcaggagaagttcgtgtgcctgaactgcggcttcgagacacacgcagccgagcaagccgccctgaacatcgccagatcctggctgttcctgcggagccaggagtacaagaaataccagacaaacaagacaaccggcaacaccgataagagagccttcgtcgagacctggcagtccttttaccggaagaagcttaaggaggtgtggaaacctgccgtgcggtctggcggatctggcggaggctccaccagccccaagaaaaagagaaaagtctaagctgccttctgcggggcttgccttctggccatgcccttcttctctcccttgcacctgtacctcttggtctttgaataaagcctgagtaggaaggctagcaaaaaaaaaaaaaaaaaaaaaaaaaaaaaaaaaaaaaaaaaaaaaaaaaaaaaaaaaaaaaaaaaaaaaaaaaaaaaaaa

SEQ ID NO: 12940 - RNA, 5785 nt, synthetic construct
  source 1..5785: mol_type = other RNA
aggaaataagagagaaaagaagagtaagaagaaatataagagccaccatggcccctaagaagaagcgtaaagtgagccggatggaacgcctcgtctacgaggtgcggcagaagtgcagaaacatcgaggacatctgcatctcctgcggatctctgaacgtgaccctggagcacccactgttcatcggcggcatgtgccagaactgtaaaaactgttttctggagtgtgcctatcaatacgacgatgacggctaccagagctactgcaccatctgttgcggcggaagagaggtgctgatgtgtggaaataacaactgctgccggtgcttctgcgtggaatgcgtggacctgctggtgggccccggcgccgcccaggccgctattaaggaagatccttggaactgctacatgtgcggccacaagggcacatacggcctgctgagacggagagaggactggcctagcagactgcagatgttcttcgccaataaccacgaccaggagttcgacccccctaaggtgtaccctcccgtccccgccgagaagagaaagcccatccgggtcctgagcctgttcgatggcatcgccaccggtctgctggtgctgaaggacctgggcatccaggtggataggtacattgcctccgaggtgtgcgaggactccatcaccgtgggaatggtgcgtcatcagggcaagatcatgtacgtgggcgacgtgcggagcgtgacacagaagcatatccaggagtggggccctttcgacctggtgatcggcggcagcccttgcaatgacctgagcatcgtgaacccagcccggaagggcctgtacgagggaaccggcagactgttcttcgagttttacagactgctgcacgacgcccggcctaaggaaggcgacgaccggcccttcttttggctgttcgagaatgtggtggccatgggagtcagcgacaagcgggatattagccggttcctggagagcaaccccgtgatgatcgatgccaaggaagtgagcgccgcccaccgggccagatacttctggggcaatctgcctggcatgaacagacccctggccagcaccgtgaacgacaagctggagctgcaggagtgcctggagcacggccggatcgccaagttcagcaaggtgagaaccatcaccacccgaagcaacagcatcaaacaaggcaaggaccagcactttcctgtgttcatgaacgagaaggaggacatcctgtggtgtaccgagatggagagagtgttcgggttcccagtccactacacagatgtcagcaacatgtctagactggccagacagagactgctgggaagaagctggtccgtccctgtgatcagacacctgttcgcccctctgaaggagtacttcgcctgcgtgagcagcggcaacagcaacgccaacagccggggccccagcttctctagcggcctggtgccactgtccctgagagggagccacatgggccccatggagatctacaaaaccgtgagcgcctggaagcggcagcctgtgcgcgtgctgagcctgtttcggaatatcgataaagtcctgaaaagcctgggattcctggagagcggctctggctccggcggtggcaccctgaagtacgtggaggatgtgacaaacgtggtcagacgggatgtggagaagtggggccccttcgatctggtgtacggcagcacccaacccctgggcagctcttgtgaccggtgccctggctggtacatgtttcagttccaccggatcctgcagtacgccctgccgagacaggagtcccagcggccattcttttggattttcatggacaacttgctgctgaccgaggatgaccaggaaactaccactcggttcctgcagaccgaagccgtgaccctgcaggacgtgagaggccgggactaccagaacgccatgcgggtgtggtccaacatccctggactgaaaagcaagcacgcacctctgacccctaaagaagaggagtacctgcaggcccaggtgcggagcagaagcaagctggacgcccctaaggtggatctgctggtgaagaattgcctcctgcccctgagagagtacttcaagtatttcagccagaatagtctgcccctgggaggcagcggcggcggcatggagaccctgaccttcagggacgtggccatcgagttcagcctggaggagtggcagtgcctggacatcgcccagcaggacctgtacaggaaggtgatgctggagaactacaggaacctggccttcctgggcatcgccctgaccaagcccgacctgatcacctgcctggagcagaggaaggtgccctggaacatgaagaggcacgagatggccgacgagccccccgtgctgtgcagcaacttcggcggcccaagcagcggcgcccctcctcccagcggcggcagcccagccggctccccaacctctaccgaggagggcacctctgagtccgccacccccgagagcggccctggcacctccaccgagcccagcgagggcagcgcacccggcagccctgccggcagccccacctccacagaggagggaaccagcaccgagcccagcgaaggcagcgccccaggcaccagcaccgagcctagtgagcaggagattaaacggatcaacaagatcagaagaagacttgtgaaagacagcaacaccaagaaggccggcaagacaggccccatgaaaaccctgctggttagagtgatgacacccgatctgagagagcggctggaaaacctgagaaagaagcctgaaaatatcccccagcccatcagcaatacatctagagccaacctgaataagctgctgaccgattacaccgaaatgaagaaggcgatcctgcatgtgtactgggaagagttccagaaggaccctgtgggcctgatgagccgggtggcccagcctgccagcaagaagatcgatcagaacaagctgaaacctgagatggacgagaagggcaacctgaccaccgccggctttgcctgctctcagtgtggccagcccctgttcgtgtacaagctggagcaggtgtctgagaagggcaaggcttacaccaactacttcggacggtgcaatgtggccgagcacgaaaagctgatcctgctggcccagctgaagcccgagaaggatagcgacgaagccgtgacatatagcctgggaaagtttgggcagagggccctggatttctacagcattcatgtgaccaaggagtccacccaccccgtgaagcccctggcccagatcgccggaaacagatacgcctccggacctgtgggaaaggccctgagcgacgcatgtatgggcacaatcgcctccttcctgtctaagtaccaggacatcatcatcgaacaccagaaggtggtgaagggcaaccagaagagactggagagcctgcgggagctggccggcaaggaaaacctggaataccctagcgtgaccctgccacctcagcctcacaccaaggagggcgttgatgcctacaacgaagtgatcgcccgggtgcgaatgtgggtgaacctgaacctgtggcagaagctgaagctaagcagagatgatgccaagcctctgctgagactgaagggattcccttcctttcctctggtcgagagacaggccaacgaagtggactggtgggacatggtgtgtaacgtgaagaagctgatcaacgagaaaaaggaggatggcaaggtgttttggcagaatctggctggctacaagagacaggaagccctgagaccatacctgagcagcgaggaagatcggaagaagggaaagaaattcgctcggtaccagctgggcgacctgctgctgcacctggaaaagaagcacggcgaggactggggaaaggtgtacgacgaggcctgggagcggattgacaagaaagtggaaggcctgagcaagcacatcaagctggaagaggaacggagaagcgaggacgcccagagcaaggccgccctgaccgactggctgcgggctaaggccagcttcgtgatcgagggcctgaaggaggccgacaaggacgagttctgcagatgcgagctgaagctgcagaagtggtacggggacctgcggggaaagcccttcgccatcgaagccgagaacagcatcctggacatcagcggcttcagcaagcagtacaactgtgccttcatctggcagaaggacggcgtgaagaagctgaacctgtacctgatcatcaactacttcaagggcggcaagctgcggttcaagaagatcaaacctgaagccttcgaagccaacagattctacaccgtgatcaacaaaaagagcggcgagatcgtgcccatggaggtgaacttcaacttcgacgaccccaacctgatcatcctgcctctggcctttggcaagagacagggcagagaattcatctggaacgacctgctgtccctggaaaccggcagcctgaagctggccaacggaagagtgatcgagaagacactgtacaacagaagaacccggcaggatgagcctgccctgttcgtggccctgaccttcgagcggcgggaggtcctggactcctccaatatcaaaccaatgaacctgatcggcgtggcaagaggcgaaaacatccccgccgtgatcgccctgaccgaccccgagggctgcccactgagccggtttaaggatagcctgggaaacccaacccacatcctgagaatcggcgagagctataaggagaagcagcggaccatccaggccaagaaggaggtggagcagcggagagccggcggctacagccggaagtacgccagcaaagccaagaatctggcagacgatatggtgagaaacaccgctagagatctgctgtactacgccgtgacccaggatgccatgctgatcttcgccaacctgagccggggcttcggccggcagggcaagcggaccttcatggccgagagacagtacacacggatggaggactggctgaccgccaagctggcctacgagggcctgagcaagacctacctgtccaagacactggcccagtacacctccaagacatgcagcaactgtgggtttaccatcaccagcgccgactacgacagggtgctggagaagctgaagaagacagcaacaggctggatgaccacaattaacggcaaggagctgaaggtggagggccagattacctactacaacagatacaagagacagaacgtagtcaaggacctgtccgtcgagctggatagactgagcgaagaatctgtgaacaacgacatctcctcctggacaaagggcagaagcggagaagctctgagcctcctgaagaaaagattctcccatagacccgtgcaggagaagttcgtgtgcctgaactgcggcttcgagacacacgcagccgagcaagccgccctgaacatcgccagatcctggctgttcctgcggagccaggagtacaagaaataccagacaaacaagacaaccggcaacaccgataagagagccttcgtcgagacctggcagtccttttaccggaagaagcttaaggaggtgtggaaacctgccgtgcggtctggcggatctggcggaggctccaccagccccaagaaaaagagaaaagtctaagctgccttctgcggggcttgccttctggccatgcccttcttctctcccttgcacctgtacctcttggtctttgaataaagcctgagtaggaaggctagcaaaaaaaaaaaaaaaaaaaaaaaaaaaaaaaaaaaaaaaaaaaaaaaaaaaaaaaaaaaaaaaaaaaaaaaaaaaaaaaa

SEQ ID NO: 12941 - RNA, 5785 nt, synthetic construct
  source 1..5785: mol_type = other RNA
aggaaataagagagaaaagaagagtaagaagaaatataagagccaccatggcccctaagaagaagcgtaaagtgagccggatggaacgcctcgtctacgaggtgcggcagaagtgcagaaacatcgaggacatctgcatctcctgcggatctctgaacgtgaccctggagcacccactgttcatcggcggcatgtgccagaactgtaaaaactgttttctggagtgtgcctatcaatacgacgatgacggctaccagagctactgcaccatctgttgcggcggaagagaggtgctgatgtgtggaaataacaactgctgccggtgcttctgcgtggaatgcgtggacctgctggtgggccccggcgccgcccaggccgctattaaggaagatccttggaactgctacatgtgcggccacaagggcacatacggcctgctgagacggagagaggactggcctagcagactgcagatgttcttcgccaataaccacgaccaggagttcgacccccctaaggtgtaccctcccgtccccgccgagaagagaaagcccatccgggtcctgagcctgttcgatggcatcgccaccggtctgctggtgctgaaggacctgggcatccaggtggataggtacattgcctccgaggtgtgcgaggactccatcaccgtgggaatggtgcgtcatcagggcaagatcatgtacgtgggcgacgtgcggagcgtgacacagaagcatatccaggagtggggccctttcgacctggtgatcggcggcagcccttgcaatgacctgagcatcgtgaacccagcccggaagggcctgtacgagggaaccggcagactgttcttcgagttttacagactgctgcacgacgcccggcctaaggaaggcgacgaccggcccttcttttggctgttcgagaatgtggtggccatgggagtcagcgacaagcgggatattagccggttcctggagagcaaccccgtgatgatcgatgccaaggaagtgagcgccgcccaccgggccagatacttctggggcaatctgcctggcatgaacagacccctggccagcaccgtgaacgacaagctggagctgcaggagtgcctggagcacggccggatcgccaagttcagcaaggtgagaaccatcaccacccgaagcaacagcatcaaacaaggcaaggaccagcactttcctgtgttcatgaacgagaaggaggacatcctgtggtgtaccgagatggagagagtgttcgggttcccagtccactacacagatgtcagcaacatgtctagactggccagacagagactgctgggaagaagctggtccgtccctgtgatcagacacctgttcgcccctctgaaggagtacttcgcctgcgtgagcagcggcaacagcaacgccaacagccggggccccagcttctctagcggcctggtgccactgtccctgagagggagccacatgggccccatggagatctacaaaaccgtgagcgcctggaagcggcagcctgtgcgcgtgctgagcctgtttcggaatatcgataaagtcctgaaaagcctgggattcctggagagcggctctggctccggcggtggcaccctgaagtacgtggaggatgtgacaaacgtggtcagacgggatgtggagaagtggggccccttcgatctggtgtacggcagcacccaacccctgggcagctcttgtgaccggtgccctggctggtacatgtttcagttccaccggatcctgcagtacgccctgccgagacaggagtcccagcggccattcttttggattttcatggacaacttgctgctgaccgaggatgaccaggaaactaccactcggttcctgcagaccgaagccgtgaccctgcaggacgtgagaggccgggactaccagaacgccatgcgggtgtggtccaacatccctggactgaaaagcaagcacgcacctctgacccctaaagaagaggagtacctgcaggcccaggtgcggagcagaagcaagctggacgcccctaaggtggatctgctggtgaagaattgcctcctgcccctgagagagtacttcaagtatttcagccagaatagtctgcccctgggaggcagcggcggcggcgaggagctgcccgtggtgttcgaggacgtggccgtgtacttcaccagggaggagtggggcgtgctggacaagaggcagaaggagctgtacagggacgtgatgaggatgaactacgagctgctggccagcctgggccccgccgccgccaagcccgacctgatcagcaagctggagaggagggccgccccctggatcaaggaccccaacggccccaagtggggcaagggcagggtgcccgcctgcggcggcccaagcagcggcgcccctcctcccagcggcggcagcccagccggctccccaacctctaccgaggagggcacctctgagtccgccacccccgagagcggccctggcacctccaccgagcccagcgagggcagcgcacccggcagccctgccggcagccccacctccacagaggagggaaccagcaccgagcccagcgaaggcagcgccccaggcaccagcaccgagcctagtgagcaggagattaaacggatcaacaagatcagaagaagacttgtgaaagacagcaacaccaagaaggccggcaagacaggccccatgaaaaccctgctggttagagtgatgacacccgatctgagagagcggctggaaaacctgagaaagaagcctgaaaatatcccccagcccatcagcaatacatctagagccaacctgaataagctgctgaccgattacaccgaaatgaagaaggcgatcctgcatgtgtactgggaagagttccagaaggaccctgtgggcctgatgagccgggtggcccagcctgccagcaagaagatcgatcagaacaagctgaaacctgagatggacgagaagggcaacctgaccaccgccggctttgcctgctctcagtgtggccagcccctgttcgtgtacaagctggagcaggtgtctgagaagggcaaggcttacaccaactacttcggacggtgcaatgtggccgagcacgaaaagctgatcctgctggcccagctgaagcccgagaaggatagcgacgaagccgtgacatatagcctgggaaagtttgggcagagggccctggatttctacagcattcatgtgaccaaggagtccacccaccccgtgaagcccctggcccagatcgccggaaacagatacgcctccggacctgtgggaaaggccctgagcgacgcatgtatgggcacaatcgcctccttcctgtctaagtaccaggacatcatcatcgaacaccagaaggtggtgaagggcaaccagaagagactggagagcctgcgggagctggccggcaaggaaaacctggaataccctagcgtgaccctgccacctcagcctcacaccaaggagggcgttgatgcctacaacgaagtgatcgcccgggtgcgaatgtgggtgaacctgaacctgtggcagaagctgaagctaagcagagatgatgccaagcctctgctgagactgaagggattcccttcctttcctctggtcgagagacaggccaacgaagtggactggtgggacatggtgtgtaacgtgaagaagctgatcaacgagaaaaaggaggatggcaaggtgttttggcagaatctggctggctacaagagacaggaagccctgagaccatacctgagcagcgaggaagatcggaagaagggaaagaaattcgctcggtaccagctgggcgacctgctgctgcacctggaaaagaagcacggcgaggactggggaaaggtgtacgacgaggcctgggagcggattgacaagaaagtggaaggcctgagcaagcacatcaagctggaagaggaacggagaagcgaggacgcccagagcaaggccgccctgaccgactggctgcgggctaaggccagcttcgtgatcgagggcctgaaggaggccgacaaggacgagttctgcagatgcgagctgaagctgcagaagtggtacggggacctgcggggaaagcccttcgccatcgaagccgagaacagcatcctggacatcagcggcttcagcaagcagtacaactgtgccttcatctggcagaaggacggcgtgaagaagctgaacctgtacctgatcatcaactacttcaagggcggcaagctgcggttcaagaagatcaaacctgaagccttcgaagccaacagattctacaccgtgatcaacaaaaagagcggcgagatcgtgcccatggaggtgaacttcaacttcgacgaccccaacctgatcatcctgcctctggcctttggcaagagacagggcagagaattcatctggaacgacctgctgtccctggaaaccggcagcctgaagctggccaacggaagagtgatcgagaagacactgtacaacagaagaacccggcaggatgagcctgccctgttcgtggccctgaccttcgagcggcgggaggtcctggactcctccaatatcaaaccaatgaacctgatcggcgtggcaagaggcgaaaacatccccgccgtgatcgccctgaccgaccccgagggctgcccactgagccggtttaaggatagcctgggaaacccaacccacatcctgagaatcggcgagagctataaggagaagcagcggaccatccaggccaagaaggaggtggagcagcggagagccggcggctacagccggaagtacgccagcaaagccaagaatctggcagacgatatggtgagaaacaccgctagagatctgctgtactacgccgtgacccaggatgccatgctgatcttcgccaacctgagccggggcttcggccggcagggcaagcggaccttcatggccgagagacagtacacacggatggaggactggctgaccgccaagctggcctacgagggcctgagcaagacctacctgtccaagacactggcccagtacacctccaagacatgcagcaactgtgggtttaccatcaccagcgccgactacgacagggtgctggagaagctgaagaagacagcaacaggctggatgaccacaattaacggcaaggagctgaaggtggagggccagattacctactacaacagatacaagagacagaacgtagtcaaggacctgtccgtcgagctggatagactgagcgaagaatctgtgaacaacgacatctcctcctggacaaagggcagaagcggagaagctctgagcctcctgaagaaaagattctcccatagacccgtgcaggagaagttcgtgtgcctgaactgcggcttcgagacacacgcagccgagcaagccgccctgaacatcgccagatcctggctgttcctgcggagccaggagtacaagaaataccagacaaacaagacaaccggcaacaccgataagagagccttcgtcgagacctggcagtccttttaccggaagaagcttaaggaggtgtggaaacctgccgtgcggtctggcggatctggcggaggctccaccagccccaagaaaaagagaaaagtctaagctgccttctgcggggcttgccttctggccatgcccttcttctctcccttgcacctgtacctcttggtctttgaataaagcctgagtaggaaggctagcaaaaaaaaaaaaaaaaaaaaaaaaaaaaaaaaaaaaaaaaaaaaaaaaaaaaaaaaaaaaaaaaaaaaaaaaaaaaaaaa

SEQ ID NO: 12942 - RNA, 5785 nt, synthetic construct
  source 1..5785: mol_type = other RNA
aggaaataagagagaaaagaagagtaagaagaaatataagagccaccatggcccctaagaagaagcgtaaagtgagccggatggaacgcctcgtctacgaggtgcggcagaagtgcagaaacatcgaggacatctgcatctcctgcggatctctgaacgtgaccctggagcacccactgttcatcggcggcatgtgccagaactgtaaaaactgttttctggagtgtgcctatcaatacgacgatgacggctaccagagctactgcaccatctgttgcggcggaagagaggtgctgatgtgtggaaataacaactgctgccggtgcttctgcgtggaatgcgtggacctgctggtgggccccggcgccgcccaggccgctattaaggaagatccttggaactgctacatgtgcggccacaagggcacatacggcctgctgagacggagagaggactggcctagcagactgcagatgttcttcgccaataaccacgaccaggagttcgacccccctaaggtgtaccctcccgtccccgccgagaagagaaagcccatccgggtcctgagcctgttcgatggcatcgccaccggtctgctggtgctgaaggacctgggcatccaggtggataggtacattgcctccgaggtgtgcgaggactccatcaccgtgggaatggtgcgtcatcagggcaagatcatgtacgtgggcgacgtgcggagcgtgacacagaagcatatccaggagtggggccctttcgacctggtgatcggcggcagcccttgcaatgacctgagcatcgtgaacccagcccggaagggcctgtacgagggaaccggcagactgttcttcgagttttacagactgctgcacgacgcccggcctaaggaaggcgacgaccggcccttcttttggctgttcgagaatgtggtggccatgggagtcagcgacaagcgggatattagccggttcctggagagcaaccccgtgatgatcgatgccaaggaagtgagcgccgcccaccgggccagatacttctggggcaatctgcctggcatgaacagacccctggccagcaccgtgaacgacaagctggagctgcaggagtgcctggagcacggccggatcgccaagttcagcaaggtgagaaccatcaccacccgaagcaacagcatcaaacaaggcaaggaccagcactttcctgtgttcatgaacgagaaggaggacatcctgtggtgtaccgagatggagagagtgttcgggttcccagtccactacacagatgtcagcaacatgtctagactggccagacagagactgctgggaagaagctggtccgtccctgtgatcagacacctgttcgcccctctgaaggagtacttcgcctgcgtgagcagcggcaacagcaacgccaacagccggggccccagcttctctagcggcctggtgccactgtccctgagagggagccacatgggccccatggagatctacaaaaccgtgagcgcctggaagcggcagcctgtgcgcgtgctgagcctgtttcggaatatcgataaagtcctgaaaagcctgggattcctggagagcggctctggctccggcggtggcaccctgaagtacgtggaggatgtgacaaacgtggtcagacgggatgtggagaagtggggccccttcgatctggtgtacggcagcacccaacccctgggcagctcttgtgaccggtgccctggctggtacatgtttcagttccaccggatcctgcagtacgccctgccgagacaggagtcccagcggccattcttttggattttcatggacaacttgctgctgaccgaggatgaccaggaaactaccactcggttcctgcagaccgaagccgtgaccctgcaggacgtgagaggccgggactaccagaacgccatgcgggtgtggtccaacatccctggactgaaaagcaagcacgcacctctgacccctaaagaagaggagtacctgcaggcccaggtgcggagcagaagcaagctggacgcccctaaggtggatctgctggtgaagaattgcctcctgcccctgagagagtacttcaagtatttcagccagaatagtctgcccctgggaggcagcggcggcggcagccaggacctggtgaccttcaaggacgtggccatcgacttcagccaggaggagtggcagtggatgaaccccgcccagaagaggctgtacaggagcatgatgctggagaactaccagagcctggtgagcctgggcctgtgcgtgagcaagccctacgtgatcagcctgctggagcagggcagggagccctgggagatgaccagcgagatgaccaggagccccttcagcgactgggagagcatcggcggcccaagcagcggcgcccctcctcccagcggcggcagcccagccggctccccaacctctaccgaggagggcacctctgagtccgccacccccgagagcggccctggcacctccaccgagcccagcgagggcagcgcacccggcagccctgccggcagccccacctccacagaggagggaaccagcaccgagcccagcgaaggcagcgccccaggcaccagcaccgagcctagtgagcaggagattaaacggatcaacaagatcagaagaagacttgtgaaagacagcaacaccaagaaggccggcaagacaggccccatgaaaaccctgctggttagagtgatgacacccgatctgagagagcggctggaaaacctgagaaagaagcctgaaaatatcccccagcccatcagcaatacatctagagccaacctgaataagctgctgaccgattacaccgaaatgaagaaggcgatcctgcatgtgtactgggaagagttccagaaggaccctgtgggcctgatgagccgggtggcccagcctgccagcaagaagatcgatcagaacaagctgaaacctgagatggacgagaagggcaacctgaccaccgccggctttgcctgctctcagtgtggccagcccctgttcgtgtacaagctggagcaggtgtctgagaagggcaaggcttacaccaactacttcggacggtgcaatgtggccgagcacgaaaagctgatcctgctggcccagctgaagcccgagaaggatagcgacgaagccgtgacatatagcctgggaaagtttgggcagagggccctggatttctacagcattcatgtgaccaaggagtccacccaccccgtgaagcccctggcccagatcgccggaaacagatacgcctccggacctgtgggaaaggccctgagcgacgcatgtatgggcacaatcgcctccttcctgtctaagtaccaggacatcatcatcgaacaccagaaggtggtgaagggcaaccagaagagactggagagcctgcgggagctggccggcaaggaaaacctggaataccctagcgtgaccctgccacctcagcctcacaccaaggagggcgttgatgcctacaacgaagtgatcgcccgggtgcgaatgtgggtgaacctgaacctgtggcagaagctgaagctaagcagagatgatgccaagcctctgctgagactgaagggattcccttcctttcctctggtcgagagacaggccaacgaagtggactggtgggacatggtgtgtaacgtgaagaagctgatcaacgagaaaaaggaggatggcaaggtgttttggcagaatctggctggctacaagagacaggaagccctgagaccatacctgagcagcgaggaagatcggaagaagggaaagaaattcgctcggtaccagctgggcgacctgctgctgcacctggaaaagaagcacggcgaggactggggaaaggtgtacgacgaggcctgggagcggattgacaagaaagtggaaggcctgagcaagcacatcaagctggaagaggaacggagaagcgaggacgcccagagcaaggccgccctgaccgactggctgcgggctaaggccagcttcgtgatcgagggcctgaaggaggccgacaaggacgagttctgcagatgcgagctgaagctgcagaagtggtacggggacctgcggggaaagcccttcgccatcgaagccgagaacagcatcctggacatcagcggcttcagcaagcagtacaactgtgccttcatctggcagaaggacggcgtgaagaagctgaacctgtacctgatcatcaactacttcaagggcggcaagctgcggttcaagaagatcaaacctgaagccttcgaagccaacagattctacaccgtgatcaacaaaaagagcggcgagatcgtgcccatggaggtgaacttcaacttcgacgaccccaacctgatcatcctgcctctggcctttggcaagagacagggcagagaattcatctggaacgacctgctgtccctggaaaccggcagcctgaagctggccaacggaagagtgatcgagaagacactgtacaacagaagaacccggcaggatgagcctgccctgttcgtggccctgaccttcgagcggcgggaggtcctggactcctccaatatcaaaccaatgaacctgatcggcgtggcaagaggcgaaaacatccccgccgtgatcgccctgaccgaccccgagggctgcccactgagccggtttaaggatagcctgggaaacccaacccacatcctgagaatcggcgagagctataaggagaagcagcggaccatccaggccaagaaggaggtggagcagcggagagccggcggctacagccggaagtacgccagcaaagccaagaatctggcagacgatatggtgagaaacaccgctagagatctgctgtactacgccgtgacccaggatgccatgctgatcttcgccaacctgagccggggcttcggccggcagggcaagcggaccttcatggccgagagacagtacacacggatggaggactggctgaccgccaagctggcctacgagggcctgagcaagacctacctgtccaagacactggcccagtacacctccaagacatgcagcaactgtgggtttaccatcaccagcgccgactacgacagggtgctggagaagctgaagaagacagcaacaggctggatgaccacaattaacggcaaggagctgaaggtggagggccagattacctactacaacagatacaagagacagaacgtagtcaaggacctgtccgtcgagctggatagactgagcgaagaatctgtgaacaacgacatctcctcctggacaaagggcagaagcggagaagctctgagcctcctgaagaaaagattctcccatagacccgtgcaggagaagttcgtgtgcctgaactgcggcttcgagacacacgcagccgagcaagccgccctgaacatcgccagatcctggctgttcctgcggagccaggagtacaagaaataccagacaaacaagacaaccggcaacaccgataagagagccttcgtcgagacctggcagtccttttaccggaagaagcttaaggaggtgtggaaacctgccgtgcggtctggcggatctggcggaggctccaccagccccaagaaaaagagaaaagtctaagctgccttctgcggggcttgccttctggccatgcccttcttctctcccttgcacctgtacctcttggtctttgaataaagcctgagtaggaaggctagcaaaaaaaaaaaaaaaaaaaaaaaaaaaaaaaaaaaaaaaaaaaaaaaaaaaaaaaaaaaaaaaaaaaaaaaaaaaaaaaa

SEQ ID NO: 12943 - RNA, 5785 nt, synthetic construct
  source 1..5785: mol_type = other RNA
aggaaataagagagaaaagaagagtaagaagaaatataagagccaccatggcccctaagaagaagcgtaaagtgagccggatggaacgcctcgtctacgaggtgcggcagaagtgcagaaacatcgaggacatctgcatctcctgcggatctctgaacgtgaccctggagcacccactgttcatcggcggcatgtgccagaactgtaaaaactgttttctggagtgtgcctatcaatacgacgatgacggctaccagagctactgcaccatctgttgcggcggaagagaggtgctgatgtgtggaaataacaactgctgccggtgcttctgcgtggaatgcgtggacctgctggtgggccccggcgccgcccaggccgctattaaggaagatccttggaactgctacatgtgcggccacaagggcacatacggcctgctgagacggagagaggactggcctagcagactgcagatgttcttcgccaataaccacgaccaggagttcgacccccctaaggtgtaccctcccgtccccgccgagaagagaaagcccatccgggtcctgagcctgttcgatggcatcgccaccggtctgctggtgctgaaggacctgggcatccaggtggataggtacattgcctccgaggtgtgcgaggactccatcaccgtgggaatggtgcgtcatcagggcaagatcatgtacgtgggcgacgtgcggagcgtgacacagaagcatatccaggagtggggccctttcgacctggtgatcggcggcagcccttgcaatgacctgagcatcgtgaacccagcccggaagggcctgtacgagggaaccggcagactgttcttcgagttttacagactgctgcacgacgcccggcctaaggaaggcgacgaccggcccttcttttggctgttcgagaatgtggtggccatgggagtcagcgacaagcgggatattagccggttcctggagagcaaccccgtgatgatcgatgccaaggaagtgagcgccgcccaccgggccagatacttctggggcaatctgcctggcatgaacagacccctggccagcaccgtgaacgacaagctggagctgcaggagtgcctggagcacggccggatcgccaagttcagcaaggtgagaaccatcaccacccgaagcaacagcatcaaacaaggcaaggaccagcactttcctgtgttcatgaacgagaaggaggacatcctgtggtgtaccgagatggagagagtgttcgggttcccagtccactacacagatgtcagcaacatgtctagactggccagacagagactgctgggaagaagctggtccgtccctgtgatcagacacctgttcgcccctctgaaggagtacttcgcctgcgtgagcagcggcaacagcaacgccaacagccggggccccagcttctctagcggcctggtgccactgtccctgagagggagccacatgggccccatggagatctacaaaaccgtgagcgcctggaagcggcagcctgtgcgcgtgctgagcctgtttcggaatatcgataaagtcctgaaaagcctgggattcctggagagcggctctggctccggcggtggcaccctgaagtacgtggaggatgtgacaaacgtggtcagacgggatgtggagaagtggggccccttcgatctggtgtacggcagcacccaacccctgggcagctcttgtgaccggtgccctggctggtacatgtttcagttccaccggatcctgcagtacgccctgccgagacaggagtcccagcggccattcttttggattttcatggacaacttgctgctgaccgaggatgaccaggaaactaccactcggttcctgcagaccgaagccgtgaccctgcaggacgtgagaggccgggactaccagaacgccatgcgggtgtggtccaacatccctggactgaaaagcaagcacgcacctctgacccctaaagaagaggagtacctgcaggcccaggtgcggagcagaagcaagctggacgcccctaaggtggatctgctggtgaagaattgcctcctgcccctgagagagtacttcaagtatttcagccagaatagtctgcccctgggaggcagcggcggcggcagcgaggagaccgtgaccttcaaggacgtggccgtggacttcacctgggaggagtggaagcagctgacccccgtgcagagggacctgtacagggacgtgatgctggagaactaccagaacctggtgagcctgggcctgcccgtgttccagagcgacctgatcagccagctggagaggggcgaggtgccctggatccccgagggcgagaccttcaggggcccctgccccggcagcatcaaccagggcggcccaagcagcggcgcccctcctcccagcggcggcagcccagccggctccccaacctctaccgaggagggcacctctgagtccgccacccccgagagcggccctggcacctccaccgagcccagcgagggcagcgcacccggcagccctgccggcagccccacctccacagaggagggaaccagcaccgagcccagcgaaggcagcgccccaggcaccagcaccgagcctagtgagcaggagattaaacggatcaacaagatcagaagaagacttgtgaaagacagcaacaccaagaaggccggcaagacaggccccatgaaaaccctgctggttagagtgatgacacccgatctgagagagcggctggaaaacctgagaaagaagcctgaaaatatcccccagcccatcagcaatacatctagagccaacctgaataagctgctgaccgattacaccgaaatgaagaaggcgatcctgcatgtgtactgggaagagttccagaaggaccctgtgggcctgatgagccgggtggcccagcctgccagcaagaagatcgatcagaacaagctgaaacctgagatggacgagaagggcaacctgaccaccgccggctttgcctgctctcagtgtggccagcccctgttcgtgtacaagctggagcaggtgtctgagaagggcaaggcttacaccaactacttcggacggtgcaatgtggccgagcacgaaaagctgatcctgctggcccagctgaagcccgagaaggatagcgacgaagccgtgacatatagcctgggaaagtttgggcagagggccctggatttctacagcattcatgtgaccaaggagtccacccaccccgtgaagcccctggcccagatcgccggaaacagatacgcctccggacctgtgggaaaggccctgagcgacgcatgtatgggcacaatcgcctccttcctgtctaagtaccaggacatcatcatcgaacaccagaaggtggtgaagggcaaccagaagagactggagagcctgcgggagctggccggcaaggaaaacctggaataccctagcgtgaccctgccacctcagcctcacaccaaggagggcgttgatgcctacaacgaagtgatcgcccgggtgcgaatgtgggtgaacctgaacctgtggcagaagctgaagctaagcagagatgatgccaagcctctgctgagactgaagggattcccttcctttcctctggtcgagagacaggccaacgaagtggactggtgggacatggtgtgtaacgtgaagaagctgatcaacgagaaaaaggaggatggcaaggtgttttggcagaatctggctggctacaagagacaggaagccctgagaccatacctgagcagcgaggaagatcggaagaagggaaagaaattcgctcggtaccagctgggcgacctgctgctgcacctggaaaagaagcacggcgaggactggggaaaggtgtacgacgaggcctgggagcggattgacaagaaagtggaaggcctgagcaagcacatcaagctggaagaggaacggagaagcgaggacgcccagagcaaggccgccctgaccgactggctgcgggctaaggccagcttcgtgatcgagggcctgaaggaggccgacaaggacgagttctgcagatgcgagctgaagctgcagaagtggtacggggacctgcggggaaagcccttcgccatcgaagccgagaacagcatcctggacatcagcggcttcagcaagcagtacaactgtgccttcatctggcagaaggacggcgtgaagaagctgaacctgtacctgatcatcaactacttcaagggcggcaagctgcggttcaagaagatcaaacctgaagccttcgaagccaacagattctacaccgtgatcaacaaaaagagcggcgagatcgtgcccatggaggtgaacttcaacttcgacgaccccaacctgatcatcctgcctctggcctttggcaagagacagggcagagaattcatctggaacgacctgctgtccctggaaaccggcagcctgaagctggccaacggaagagtgatcgagaagacactgtacaacagaagaacccggcaggatgagcctgccctgttcgtggccctgaccttcgagcggcgggaggtcctggactcctccaatatcaaaccaatgaacctgatcggcgtggcaagaggcgaaaacatccccgccgtgatcgccctgaccgaccccgagggctgcccactgagccggtttaaggatagcctgggaaacccaacccacatcctgagaatcggcgagagctataaggagaagcagcggaccatccaggccaagaaggaggtggagcagcggagagccggcggctacagccggaagtacgccagcaaagccaagaatctggcagacgatatggtgagaaacaccgctagagatctgctgtactacgccgtgacccaggatgccatgctgatcttcgccaacctgagccggggcttcggccggcagggcaagcggaccttcatggccgagagacagtacacacggatggaggactggctgaccgccaagctggcctacgagggcctgagcaagacctacctgtccaagacactggcccagtacacctccaagacatgcagcaactgtgggtttaccatcaccagcgccgactacgacagggtgctggagaagctgaagaagacagcaacaggctggatgaccacaattaacggcaaggagctgaaggtggagggccagattacctactacaacagatacaagagacagaacgtagtcaaggacctgtccgtcgagctggatagactgagcgaagaatctgtgaacaacgacatctcctcctggacaaagggcagaagcggagaagctctgagcctcctgaagaaaagattctcccatagacccgtgcaggagaagttcgtgtgcctgaactgcggcttcgagacacacgcagccgagcaagccgccctgaacatcgccagatcctggctgttcctgcggagccaggagtacaagaaataccagacaaacaagacaaccggcaacaccgataagagagccttcgtcgagacctggcagtccttttaccggaagaagcttaaggaggtgtggaaacctgccgtgcggtctggcggatctggcggaggctccaccagccccaagaaaaagagaaaagtctaagctgccttctgcggggcttgccttctggccatgcccttcttctctcccttgcacctgtacctcttggtctttgaataaagcctgagtaggaaggctagcaaaaaaaaaaaaaaaaaaaaaaaaaaaaaaaaaaaaaaaaaaaaaaaaaaaaaaaaaaaaaaaaaaaaaaaaaaaaaaaa

SEQ ID NO: 12944 - RNA, 5785 nt, synthetic construct
  source 1..5785: mol_type = other RNA
aggaaataagagagaaaagaagagtaagaagaaatataagagccaccatggcccctaagaagaagcgtaaagtgagccggatggaacgcctcgtctacgaggtgcggcagaagtgcagaaacatcgaggacatctgcatctcctgcggatctctgaacgtgaccctggagcacccactgttcatcggcggcatgtgccagaactgtaaaaactgttttctggagtgtgcctatcaatacgacgatgacggctaccagagctactgcaccatctgttgcggcggaagagaggtgctgatgtgtggaaataacaactgctgccggtgcttctgcgtggaatgcgtggacctgctggtgggccccggcgccgcccaggccgctattaaggaagatccttggaactgctacatgtgcggccacaagggcacatacggcctgctgagacggagagaggactggcctagcagactgcagatgttcttcgccaataaccacgaccaggagttcgacccccctaaggtgtaccctcccgtccccgccgagaagagaaagcccatccgggtcctgagcctgttcgatggcatcgccaccggtctgctggtgctgaaggacctgggcatccaggtggataggtacattgcctccgaggtgtgcgaggactccatcaccgtgggaatggtgcgtcatcagggcaagatcatgtacgtgggcgacgtgcggagcgtgacacagaagcatatccaggagtggggccctttcgacctggtgatcggcggcagcccttgcaatgacctgagcatcgtgaacccagcccggaagggcctgtacgagggaaccggcagactgttcttcgagttttacagactgctgcacgacgcccggcctaaggaaggcgacgaccggcccttcttttggctgttcgagaatgtggtggccatgggagtcagcgacaagcgggatattagccggttcctggagagcaaccccgtgatgatcgatgccaaggaagtgagcgccgcccaccgggccagatacttctggggcaatctgcctggcatgaacagacccctggccagcaccgtgaacgacaagctggagctgcaggagtgcctggagcacggccggatcgccaagttcagcaaggtgagaaccatcaccacccgaagcaacagcatcaaacaaggcaaggaccagcactttcctgtgttcatgaacgagaaggaggacatcctgtggtgtaccgagatggagagagtgttcgggttcccagtccactacacagatgtcagcaacatgtctagactggccagacagagactgctgggaagaagctggtccgtccctgtgatcagacacctgttcgcccctctgaaggagtacttcgcctgcgtgagcagcggcaacagcaacgccaacagccggggccccagcttctctagcggcctggtgccactgtccctgagagggagccacatgggccccatggagatctacaaaaccgtgagcgcctggaagcggcagcctgtgcgcgtgctgagcctgtttcggaatatcgataaagtcctgaaaagcctgggattcctggagagcggctctggctccggcggtggcaccctgaagtacgtggaggatgtgacaaacgtggtcagacgggatgtggagaagtggggccccttcgatctggtgtacggcagcacccaacccctgggcagctcttgtgaccggtgccctggctggtacatgtttcagttccaccggatcctgcagtacgccctgccgagacaggagtcccagcggccattcttttggattttcatggacaacttgctgctgaccgaggatgaccaggaaactaccactcggttcctgcagaccgaagccgtgaccctgcaggacgtgagaggccgggactaccagaacgccatgcgggtgtggtccaacatccctggactgaaaagcaagcacgcacctctgacccctaaagaagaggagtacctgcaggcccaggtgcggagcagaagcaagctggacgcccctaaggtggatctgctggtgaagaattgcctcctgcccctgagagagtacttcaagtatttcagccagaatagtctgcccctgggaggcagcggcggcggcttccaggaggccgtgaccttcaaggacgtggccgtggccttcaccgaggaggagctgggcctgctggacagcgcccagaggaagctgtacagggaggtgatgctggagaacttcaggaacctggtgagcgtgggccaccagagcttcaagcccgagatgatcagccagctggagagggaggagaagctgtgggtgaaggagatccagacccagatgggcaggtgcaggggcggcaggaaccagggcggcccaagcagcggcgcccctcctcccagcggcggcagcccagccggctccccaacctctaccgaggagggcacctctgagtccgccacccccgagagcggccctggcacctccaccgagcccagcgagggcagcgcacccggcagccctgccggcagccccacctccacagaggagggaaccagcaccgagcccagcgaaggcagcgccccaggcaccagcaccgagcctagtgagcaggagattaaacggatcaacaagatcagaagaagacttgtgaaagacagcaacaccaagaaggccggcaagacaggccccatgaaaaccctgctggttagagtgatgacacccgatctgagagagcggctggaaaacctgagaaagaagcctgaaaatatcccccagcccatcagcaatacatctagagccaacctgaataagctgctgaccgattacaccgaaatgaagaaggcgatcctgcatgtgtactgggaagagttccagaaggaccctgtgggcctgatgagccgggtggcccagcctgccagcaagaagatcgatcagaacaagctgaaacctgagatggacgagaagggcaacctgaccaccgccggctttgcctgctctcagtgtggccagcccctgttcgtgtacaagctggagcaggtgtctgagaagggcaaggcttacaccaactacttcggacggtgcaatgtggccgagcacgaaaagctgatcctgctggcccagctgaagcccgagaaggatagcgacgaagccgtgacatatagcctgggaaagtttgggcagagggccctggatttctacagcattcatgtgaccaaggagtccacccaccccgtgaagcccctggcccagatcgccggaaacagatacgcctccggacctgtgggaaaggccctgagcgacgcatgtatgggcacaatcgcctccttcctgtctaagtaccaggacatcatcatcgaacaccagaaggtggtgaagggcaaccagaagagactggagagcctgcgggagctggccggcaaggaaaacctggaataccctagcgtgaccctgccacctcagcctcacaccaaggagggcgttgatgcctacaacgaagtgatcgcccgggtgcgaatgtgggtgaacctgaacctgtggcagaagctgaagctaagcagagatgatgccaagcctctgctgagactgaagggattcccttcctttcctctggtcgagagacaggccaacgaagtggactggtgggacatggtgtgtaacgtgaagaagctgatcaacgagaaaaaggaggatggcaaggtgttttggcagaatctggctggctacaagagacaggaagccctgagaccatacctgagcagcgaggaagatcggaagaagggaaagaaattcgctcggtaccagctgggcgacctgctgctgcacctggaaaagaagcacggcgaggactggggaaaggtgtacgacgaggcctgggagcggattgacaagaaagtggaaggcctgagcaagcacatcaagctggaagaggaacggagaagcgaggacgcccagagcaaggccgccctgaccgactggctgcgggctaaggccagcttcgtgatcgagggcctgaaggaggccgacaaggacgagttctgcagatgcgagctgaagctgcagaagtggtacggggacctgcggggaaagcccttcgccatcgaagccgagaacagcatcctggacatcagcggcttcagcaagcagtacaactgtgccttcatctggcagaaggacggcgtgaagaagctgaacctgtacctgatcatcaactacttcaagggcggcaagctgcggttcaagaagatcaaacctgaagccttcgaagccaacagattctacaccgtgatcaacaaaaagagcggcgagatcgtgcccatggaggtgaacttcaacttcgacgaccccaacctgatcatcctgcctctggcctttggcaagagacagggcagagaattcatctggaacgacctgctgtccctggaaaccggcagcctgaagctggccaacggaagagtgatcgagaagacactgtacaacagaagaacccggcaggatgagcctgccctgttcgtggccctgaccttcgagcggcgggaggtcctggactcctccaatatcaaaccaatgaacctgatcggcgtggcaagaggcgaaaacatccccgccgtgatcgccctgaccgaccccgagggctgcccactgagccggtttaaggatagcctgggaaacccaacccacatcctgagaatcggcgagagctataaggagaagcagcggaccatccaggccaagaaggaggtggagcagcggagagccggcggctacagccggaagtacgccagcaaagccaagaatctggcagacgatatggtgagaaacaccgctagagatctgctgtactacgccgtgacccaggatgccatgctgatcttcgccaacctgagccggggcttcggccggcagggcaagcggaccttcatggccgagagacagtacacacggatggaggactggctgaccgccaagctggcctacgagggcctgagcaagacctacctgtccaagacactggcccagtacacctccaagacatgcagcaactgtgggtttaccatcaccagcgccgactacgacagggtgctggagaagctgaagaagacagcaacaggctggatgaccacaattaacggcaaggagctgaaggtggagggccagattacctactacaacagatacaagagacagaacgtagtcaaggacctgtccgtcgagctggatagactgagcgaagaatctgtgaacaacgacatctcctcctggacaaagggcagaagcggagaagctctgagcctcctgaagaaaagattctcccatagacccgtgcaggagaagttcgtgtgcctgaactgcggcttcgagacacacgcagccgagcaagccgccctgaacatcgccagatcctggctgttcctgcggagccaggagtacaagaaataccagacaaacaagacaaccggcaacaccgataagagagccttcgtcgagacctggcagtccttttaccggaagaagcttaaggaggtgtggaaacctgccgtgcggtctggcggatctggcggaggctccaccagccccaagaaaaagagaaaagtctaagctgccttctgcggggcttgccttctggccatgcccttcttctctcccttgcacctgtacctcttggtctttgaataaagcctgagtaggaaggctagcaaaaaaaaaaaaaaaaaaaaaaaaaaaaaaaaaaaaaaaaaaaaaaaaaaaaaaaaaaaaaaaaaaaaaaaaaaaaaaaa

SEQ ID NO: 12945 - RNA, 5785 nt, synthetic construct
  source 1..5785: mol_type = other RNA
aggaaataagagagaaaagaagagtaagaagaaatataagagccaccatggcccctaagaagaagcgtaaagtgagccggatggaacgcctcgtctacgaggtgcggcagaagtgcagaaacatcgaggacatctgcatctcctgcggatctctgaacgtgaccctggagcacccactgttcatcggcggcatgtgccagaactgtaaaaactgttttctggagtgtgcctatcaatacgacgatgacggctaccagagctactgcaccatctgttgcggcggaagagaggtgctgatgtgtggaaataacaactgctgccggtgcttctgcgtggaatgcgtggacctgctggtgggccccggcgccgcccaggccgctattaaggaagatccttggaactgctacatgtgcggccacaagggcacatacggcctgctgagacggagagaggactggcctagcagactgcagatgttcttcgccaataaccacgaccaggagttcgacccccctaaggtgtaccctcccgtccccgccgagaagagaaagcccatccgggtcctgagcctgttcgatggcatcgccaccggtctgctggtgctgaaggacctgggcatccaggtggataggtacattgcctccgaggtgtgcgaggactccatcaccgtgggaatggtgcgtcatcagggcaagatcatgtacgtgggcgacgtgcggagcgtgacacagaagcatatccaggagtggggccctttcgacctggtgatcggcggcagcccttgcaatgacctgagcatcgtgaacccagcccggaagggcctgtacgagggaaccggcagactgttcttcgagttttacagactgctgcacgacgcccggcctaaggaaggcgacgaccggcccttcttttggctgttcgagaatgtggtggccatgggagtcagcgacaagcgggatattagccggttcctggagagcaaccccgtgatgatcgatgccaaggaagtgagcgccgcccaccgggccagatacttctggggcaatctgcctggcatgaacagacccctggccagcaccgtgaacgacaagctggagctgcaggagtgcctggagcacggccggatcgccaagttcagcaaggtgagaaccatcaccacccgaagcaacagcatcaaacaaggcaaggaccagcactttcctgtgttcatgaacgagaaggaggacatcctgtggtgtaccgagatggagagagtgttcgggttcccagtccactacacagatgtcagcaacatgtctagactggccagacagagactgctgggaagaagctggtccgtccctgtgatcagacacctgttcgcccctctgaaggagtacttcgcctgcgtgagcagcggcaacagcaacgccaacagccggggccccagcttctctagcggcctggtgccactgtccctgagagggagccacatgggccccatggagatctacaaaaccgtgagcgcctggaagcggcagcctgtgcgcgtgctgagcctgtttcggaatatcgataaagtcctgaaaagcctgggattcctggagagcggctctggctccggcggtggcaccctgaagtacgtggaggatgtgacaaacgtggtcagacgggatgtggagaagtggggccccttcgatctggtgtacggcagcacccaacccctgggcagctcttgtgaccggtgccctggctggtacatgtttcagttccaccggatcctgcagtacgccctgccgagacaggagtcccagcggccattcttttggattttcatggacaacttgctgctgaccgaggatgaccaggaaactaccactcggttcctgcagaccgaagccgtgaccctgcaggacgtgagaggccgggactaccagaacgccatgcgggtgtggtccaacatccctggactgaaaagcaagcacgcacctctgacccctaaagaagaggagtacctgcaggcccaggtgcggagcagaagcaagctggacgcccctaaggtggatctgctggtgaagaattgcctcctgcccctgagagagtacttcaagtatttcagccagaatagtctgcccctgggaggcagcggcggcggccaggccagcgtgaccttcgaggacgtggccgtgaggttcacccaggaggagtgggccctgctggaccccagccagaagatcctgtacggcgacgtgatgcaggagacctacaggaacctgaccagcgtgggcatcaactgggagtgctgggacctggaggcctacttcaggagcctggagaggaacctgagggtgcagctggtgaagagggactgcgagctgaagaacaacgacccctgcggcggcggcccaagcagcggcgcccctcctcccagcggcggcagcccagccggctccccaacctctaccgaggagggcacctctgagtccgccacccccgagagcggccctggcacctccaccgagcccagcgagggcagcgcacccggcagccctgccggcagccccacctccacagaggagggaaccagcaccgagcccagcgaaggcagcgccccaggcaccagcaccgagcctagtgagcaggagattaaacggatcaacaagatcagaagaagacttgtgaaagacagcaacaccaagaaggccggcaagacaggccccatgaaaaccctgctggttagagtgatgacacccgatctgagagagcggctggaaaacctgagaaagaagcctgaaaatatcccccagcccatcagcaatacatctagagccaacctgaataagctgctgaccgattacaccgaaatgaagaaggcgatcctgcatgtgtactgggaagagttccagaaggaccctgtgggcctgatgagccgggtggcccagcctgccagcaagaagatcgatcagaacaagctgaaacctgagatggacgagaagggcaacctgaccaccgccggctttgcctgctctcagtgtggccagcccctgttcgtgtacaagctggagcaggtgtctgagaagggcaaggcttacaccaactacttcggacggtgcaatgtggccgagcacgaaaagctgatcctgctggcccagctgaagcccgagaaggatagcgacgaagccgtgacatatagcctgggaaagtttgggcagagggccctggatttctacagcattcatgtgaccaaggagtccacccaccccgtgaagcccctggcccagatcgccggaaacagatacgcctccggacctgtgggaaaggccctgagcgacgcatgtatgggcacaatcgcctccttcctgtctaagtaccaggacatcatcatcgaacaccagaaggtggtgaagggcaaccagaagagactggagagcctgcgggagctggccggcaaggaaaacctggaataccctagcgtgaccctgccacctcagcctcacaccaaggagggcgttgatgcctacaacgaagtgatcgcccgggtgcgaatgtgggtgaacctgaacctgtggcagaagctgaagctaagcagagatgatgccaagcctctgctgagactgaagggattcccttcctttcctctggtcgagagacaggccaacgaagtggactggtgggacatggtgtgtaacgtgaagaagctgatcaacgagaaaaaggaggatggcaaggtgttttggcagaatctggctggctacaagagacaggaagccctgagaccatacctgagcagcgaggaagatcggaagaagggaaagaaattcgctcggtaccagctgggcgacctgctgctgcacctggaaaagaagcacggcgaggactggggaaaggtgtacgacgaggcctgggagcggattgacaagaaagtggaaggcctgagcaagcacatcaagctggaagaggaacggagaagcgaggacgcccagagcaaggccgccctgaccgactggctgcgggctaaggccagcttcgtgatcgagggcctgaaggaggccgacaaggacgagttctgcagatgcgagctgaagctgcagaagtggtacggggacctgcggggaaagcccttcgccatcgaagccgagaacagcatcctggacatcagcggcttcagcaagcagtacaactgtgccttcatctggcagaaggacggcgtgaagaagctgaacctgtacctgatcatcaactacttcaagggcggcaagctgcggttcaagaagatcaaacctgaagccttcgaagccaacagattctacaccgtgatcaacaaaaagagcggcgagatcgtgcccatggaggtgaacttcaacttcgacgaccccaacctgatcatcctgcctctggcctttggcaagagacagggcagagaattcatctggaacgacctgctgtccctggaaaccggcagcctgaagctggccaacggaagagtgatcgagaagacactgtacaacagaagaacccggcaggatgagcctgccctgttcgtggccctgaccttcgagcggcgggaggtcctggactcctccaatatcaaaccaatgaacctgatcggcgtggcaagaggcgaaaacatccccgccgtgatcgccctgaccgaccccgagggctgcccactgagccggtttaaggatagcctgggaaacccaacccacatcctgagaatcggcgagagctataaggagaagcagcggaccatccaggccaagaaggaggtggagcagcggagagccggcggctacagccggaagtacgccagcaaagccaagaatctggcagacgatatggtgagaaacaccgctagagatctgctgtactacgccgtgacccaggatgccatgctgatcttcgccaacctgagccggggcttcggccggcagggcaagcggaccttcatggccgagagacagtacacacggatggaggactggctgaccgccaagctggcctacgagggcctgagcaagacctacctgtccaagacactggcccagtacacctccaagacatgcagcaactgtgggtttaccatcaccagcgccgactacgacagggtgctggagaagctgaagaagacagcaacaggctggatgaccacaattaacggcaaggagctgaaggtggagggccagattacctactacaacagatacaagagacagaacgtagtcaaggacctgtccgtcgagctggatagactgagcgaagaatctgtgaacaacgacatctcctcctggacaaagggcagaagcggagaagctctgagcctcctgaagaaaagattctcccatagacccgtgcaggagaagttcgtgtgcctgaactgcggcttcgagacacacgcagccgagcaagccgccctgaacatcgccagatcctggctgttcctgcggagccaggagtacaagaaataccagacaaacaagacaaccggcaacaccgataagagagccttcgtcgagacctggcagtccttttaccggaagaagcttaaggaggtgtggaaacctgccgtgcggtctggcggatctggcggaggctccaccagccccaagaaaaagagaaaagtctaagctgccttctgcggggcttgccttctggccatgcccttcttctctcccttgcacctgtacctcttggtctttgaataaagcctgagtaggaaggctagcaaaaaaaaaaaaaaaaaaaaaaaaaaaaaaaaaaaaaaaaaaaaaaaaaaaaaaaaaaaaaaaaaaaaaaaaaaaaaaaa

SEQ ID NO: 12946 - RNA, 5785 nt, synthetic construct
  source 1..5785: mol_type = other RNA
aggaaataagagagaaaagaagagtaagaagaaatataagagccaccatggcccctaagaagaagcgtaaagtgagccggatggaacgcctcgtctacgaggtgcggcagaagtgcagaaacatcgaggacatctgcatctcctgcggatctctgaacgtgaccctggagcacccactgttcatcggcggcatgtgccagaactgtaaaaactgttttctggagtgtgcctatcaatacgacgatgacggctaccagagctactgcaccatctgttgcggcggaagagaggtgctgatgtgtggaaataacaactgctgccggtgcttctgcgtggaatgcgtggacctgctggtgggccccggcgccgcccaggccgctattaaggaagatccttggaactgctacatgtgcggccacaagggcacatacggcctgctgagacggagagaggactggcctagcagactgcagatgttcttcgccaataaccacgaccaggagttcgacccccctaaggtgtaccctcccgtccccgccgagaagagaaagcccatccgggtcctgagcctgttcgatggcatcgccaccggtctgctggtgctgaaggacctgggcatccaggtggataggtacattgcctccgaggtgtgcgaggactccatcaccgtgggaatggtgcgtcatcagggcaagatcatgtacgtgggcgacgtgcggagcgtgacacagaagcatatccaggagtggggccctttcgacctggtgatcggcggcagcccttgcaatgacctgagcatcgtgaacccagcccggaagggcctgtacgagggaaccggcagactgttcttcgagttttacagactgctgcacgacgcccggcctaaggaaggcgacgaccggcccttcttttggctgttcgagaatgtggtggccatgggagtcagcgacaagcgggatattagccggttcctggagagcaaccccgtgatgatcgatgccaaggaagtgagcgccgcccaccgggccagatacttctggggcaatctgcctggcatgaacagacccctggccagcaccgtgaacgacaagctggagctgcaggagtgcctggagcacggccggatcgccaagttcagcaaggtgagaaccatcaccacccgaagcaacagcatcaaacaaggcaaggaccagcactttcctgtgttcatgaacgagaaggaggacatcctgtggtgtaccgagatggagagagtgttcgggttcccagtccactacacagatgtcagcaacatgtctagactggccagacagagactgctgggaagaagctggtccgtccctgtgatcagacacctgttcgcccctctgaaggagtacttcgcctgcgtgagcagcggcaacagcaacgccaacagccggggccccagcttctctagcggcctggtgccactgtccctgagagggagccacatgggccccatggagatctacaaaaccgtgagcgcctggaagcggcagcctgtgcgcgtgctgagcctgtttcggaatatcgataaagtcctgaaaagcctgggattcctggagagcggctctggctccggcggtggcaccctgaagtacgtggaggatgtgacaaacgtggtcagacgggatgtggagaagtggggccccttcgatctggtgtacggcagcacccaacccctgggcagctcttgtgaccggtgccctggctggtacatgtttcagttccaccggatcctgcagtacgccctgccgagacaggagtcccagcggccattcttttggattttcatggacaacttgctgctgaccgaggatgaccaggaaactaccactcggttcctgcagaccgaagccgtgaccctgcaggacgtgagaggccgggactaccagaacgccatgcgggtgtggtccaacatccctggactgaaaagcaagcacgcacctctgacccctaaagaagaggagtacctgcaggcccaggtgcggagcagaagcaagctggacgcccctaaggtggatctgctggtgaagaattgcctcctgcccctgagagagtacttcaagtatttcagccagaatagtctgcccctgggaggcagcggcggcggcatggacagcgtggccttcgaggacgtggccgtgaacttcacccaggaggagtgggccctgctgagccccagccagaagaacctgtacagggacgtgatgctggaggccttcaggaacctggccagcgtgggcatccagtggaaggaccaggacaccgagaacctgtaccagaacctgggcatcaagctgaggcacatgagggcccacgccggccacaccaggagcgagtgcggcggcgagtggggcggcccaagcagcggcgcccctcctcccagcggcggcagcccagccggctccccaacctctaccgaggagggcacctctgagtccgccacccccgagagcggccctggcacctccaccgagcccagcgagggcagcgcacccggcagccctgccggcagccccacctccacagaggagggaaccagcaccgagcccagcgaaggcagcgccccaggcaccagcaccgagcctagtgagcaggagattaaacggatcaacaagatcagaagaagacttgtgaaagacagcaacaccaagaaggccggcaagacaggccccatgaaaaccctgctggttagagtgatgacacccgatctgagagagcggctggaaaacctgagaaagaagcctgaaaatatcccccagcccatcagcaatacatctagagccaacctgaataagctgctgaccgattacaccgaaatgaagaaggcgatcctgcatgtgtactgggaagagttccagaaggaccctgtgggcctgatgagccgggtggcccagcctgccagcaagaagatcgatcagaacaagctgaaacctgagatggacgagaagggcaacctgaccaccgccggctttgcctgctctcagtgtggccagcccctgttcgtgtacaagctggagcaggtgtctgagaagggcaaggcttacaccaactacttcggacggtgcaatgtggccgagcacgaaaagctgatcctgctggcccagctgaagcccgagaaggatagcgacgaagccgtgacatatagcctgggaaagtttgggcagagggccctggatttctacagcattcatgtgaccaaggagtccacccaccccgtgaagcccctggcccagatcgccggaaacagatacgcctccggacctgtgggaaaggccctgagcgacgcatgtatgggcacaatcgcctccttcctgtctaagtaccaggacatcatcatcgaacaccagaaggtggtgaagggcaaccagaagagactggagagcctgcgggagctggccggcaaggaaaacctggaataccctagcgtgaccctgccacctcagcctcacaccaaggagggcgttgatgcctacaacgaagtgatcgcccgggtgcgaatgtgggtgaacctgaacctgtggcagaagctgaagctaagcagagatgatgccaagcctctgctgagactgaagggattcccttcctttcctctggtcgagagacaggccaacgaagtggactggtgggacatggtgtgtaacgtgaagaagctgatcaacgagaaaaaggaggatggcaaggtgttttggcagaatctggctggctacaagagacaggaagccctgagaccatacctgagcagcgaggaagatcggaagaagggaaagaaattcgctcggtaccagctgggcgacctgctgctgcacctggaaaagaagcacggcgaggactggggaaaggtgtacgacgaggcctgggagcggattgacaagaaagtggaaggcctgagcaagcacatcaagctggaagaggaacggagaagcgaggacgcccagagcaaggccgccctgaccgactggctgcgggctaaggccagcttcgtgatcgagggcctgaaggaggccgacaaggacgagttctgcagatgcgagctgaagctgcagaagtggtacggggacctgcggggaaagcccttcgccatcgaagccgagaacagcatcctggacatcagcggcttcagcaagcagtacaactgtgccttcatctggcagaaggacggcgtgaagaagctgaacctgtacctgatcatcaactacttcaagggcggcaagctgcggttcaagaagatcaaacctgaagccttcgaagccaacagattctacaccgtgatcaacaaaaagagcggcgagatcgtgcccatggaggtgaacttcaacttcgacgaccccaacctgatcatcctgcctctggcctttggcaagagacagggcagagaattcatctggaacgacctgctgtccctggaaaccggcagcctgaagctggccaacggaagagtgatcgagaagacactgtacaacagaagaacccggcaggatgagcctgccctgttcgtggccctgaccttcgagcggcgggaggtcctggactcctccaatatcaaaccaatgaacctgatcggcgtggcaagaggcgaaaacatccccgccgtgatcgccctgaccgaccccgagggctgcccactgagccggtttaaggatagcctgggaaacccaacccacatcctgagaatcggcgagagctataaggagaagcagcggaccatccaggccaagaaggaggtggagcagcggagagccggcggctacagccggaagtacgccagcaaagccaagaatctggcagacgatatggtgagaaacaccgctagagatctgctgtactacgccgtgacccaggatgccatgctgatcttcgccaacctgagccggggcttcggccggcagggcaagcggaccttcatggccgagagacagtacacacggatggaggactggctgaccgccaagctggcctacgagggcctgagcaagacctacctgtccaagacactggcccagtacacctccaagacatgcagcaactgtgggtttaccatcaccagcgccgactacgacagggtgctggagaagctgaagaagacagcaacaggctggatgaccacaattaacggcaaggagctgaaggtggagggccagattacctactacaacagatacaagagacagaacgtagtcaaggacctgtccgtcgagctggatagactgagcgaagaatctgtgaacaacgacatctcctcctggacaaagggcagaagcggagaagctctgagcctcctgaagaaaagattctcccatagacccgtgcaggagaagttcgtgtgcctgaactgcggcttcgagacacacgcagccgagcaagccgccctgaacatcgccagatcctggctgttcctgcggagccaggagtacaagaaataccagacaaacaagacaaccggcaacaccgataagagagccttcgtcgagacctggcagtccttttaccggaagaagcttaaggaggtgtggaaacctgccgtgcggtctggcggatctggcggaggctccaccagccccaagaaaaagagaaaagtctaagctgccttctgcggggcttgccttctggccatgcccttcttctctcccttgcacctgtacctcttggtctttgaataaagcctgagtaggaaggctagcaaaaaaaaaaaaaaaaaaaaaaaaaaaaaaaaaaaaaaaaaaaaaaaaaaaaaaaaaaaaaaaaaaaaaaaaaaaaaaaa

SEQ ID NO: 12947 - RNA, 5785 nt, synthetic construct
  source 1..5785: mol_type = other RNA
aggaaataagagagaaaagaagagtaagaagaaatataagagccaccatggcccctaagaagaagcgtaaagtgagccggatggaacgcctcgtctacgaggtgcggcagaagtgcagaaacatcgaggacatctgcatctcctgcggatctctgaacgtgaccctggagcacccactgttcatcggcggcatgtgccagaactgtaaaaactgttttctggagtgtgcctatcaatacgacgatgacggctaccagagctactgcaccatctgttgcggcggaagagaggtgctgatgtgtggaaataacaactgctgccggtgcttctgcgtggaatgcgtggacctgctggtgggccccggcgccgcccaggccgctattaaggaagatccttggaactgctacatgtgcggccacaagggcacatacggcctgctgagacggagagaggactggcctagcagactgcagatgttcttcgccaataaccacgaccaggagttcgacccccctaaggtgtaccctcccgtccccgccgagaagagaaagcccatccgggtcctgagcctgttcgatggcatcgccaccggtctgctggtgctgaaggacctgggcatccaggtggataggtacattgcctccgaggtgtgcgaggactccatcaccgtgggaatggtgcgtcatcagggcaagatcatgtacgtgggcgacgtgcggagcgtgacacagaagcatatccaggagtggggccctttcgacctggtgatcggcggcagcccttgcaatgacctgagcatcgtgaacccagcccggaagggcctgtacgagggaaccggcagactgttcttcgagttttacagactgctgcacgacgcccggcctaaggaaggcgacgaccggcccttcttttggctgttcgagaatgtggtggccatgggagtcagcgacaagcgggatattagccggttcctggagagcaaccccgtgatgatcgatgccaaggaagtgagcgccgcccaccgggccagatacttctggggcaatctgcctggcatgaacagacccctggccagcaccgtgaacgacaagctggagctgcaggagtgcctggagcacggccggatcgccaagttcagcaaggtgagaaccatcaccacccgaagcaacagcatcaaacaaggcaaggaccagcactttcctgtgttcatgaacgagaaggaggacatcctgtggtgtaccgagatggagagagtgttcgggttcccagtccactacacagatgtcagcaacatgtctagactggccagacagagactgctgggaagaagctggtccgtccctgtgatcagacacctgttcgcccctctgaaggagtacttcgcctgcgtgagcagcggcaacagcaacgccaacagccggggccccagcttctctagcggcctggtgccactgtccctgagagggagccacatgggccccatggagatctacaaaaccgtgagcgcctggaagcggcagcctgtgcgcgtgctgagcctgtttcggaatatcgataaagtcctgaaaagcctgggattcctggagagcggctctggctccggcggtggcaccctgaagtacgtggaggatgtgacaaacgtggtcagacgggatgtggagaagtggggccccttcgatctggtgtacggcagcacccaacccctgggcagctcttgtgaccggtgccctggctggtacatgtttcagttccaccggatcctgcagtacgccctgccgagacaggagtcccagcggccattcttttggattttcatggacaacttgctgctgaccgaggatgaccaggaaactaccactcggttcctgcagaccgaagccgtgaccctgcaggacgtgagaggccgggactaccagaacgccatgcgggtgtggtccaacatccctggactgaaaagcaagcacgcacctctgacccctaaagaagaggagtacctgcaggcccaggtgcggagcagaagcaagctggacgcccctaaggtggatctgctggtgaagaattgcctcctgcccctgagagagtacttcaagtatttcagccagaatagtctgcccctgggaggcagcggcggcggcatggtgcacggcagcgtgaccttcagggacgtggccatcgacttcagccaggaggagtgggagtgcctgcagcccgaccagaggaccctgtacagggacgtgatgctggagaactacagccacctgatcagcctgggcagcagcatcagcaagcccgacgtgatcaccctgctggagcaggagaaggagccctggatggtggtgaggaaggagaccagcaggaggtaccccgacctggagagcggcggcccaagcagcggcgcccctcctcccagcggcggcagcccagccggctccccaacctctaccgaggagggcacctctgagtccgccacccccgagagcggccctggcacctccaccgagcccagcgagggcagcgcacccggcagccctgccggcagccccacctccacagaggagggaaccagcaccgagcccagcgaaggcagcgccccaggcaccagcaccgagcctagtgagcaggagattaaacggatcaacaagatcagaagaagacttgtgaaagacagcaacaccaagaaggccggcaagacaggccccatgaaaaccctgctggttagagtgatgacacccgatctgagagagcggctggaaaacctgagaaagaagcctgaaaatatcccccagcccatcagcaatacatctagagccaacctgaataagctgctgaccgattacaccgaaatgaagaaggcgatcctgcatgtgtactgggaagagttccagaaggaccctgtgggcctgatgagccgggtggcccagcctgccagcaagaagatcgatcagaacaagctgaaacctgagatggacgagaagggcaacctgaccaccgccggctttgcctgctctcagtgtggccagcccctgttcgtgtacaagctggagcaggtgtctgagaagggcaaggcttacaccaactacttcggacggtgcaatgtggccgagcacgaaaagctgatcctgctggcccagctgaagcccgagaaggatagcgacgaagccgtgacatatagcctgggaaagtttgggcagagggccctggatttctacagcattcatgtgaccaaggagtccacccaccccgtgaagcccctggcccagatcgccggaaacagatacgcctccggacctgtgggaaaggccctgagcgacgcatgtatgggcacaatcgcctccttcctgtctaagtaccaggacatcatcatcgaacaccagaaggtggtgaagggcaaccagaagagactggagagcctgcgggagctggccggcaaggaaaacctggaataccctagcgtgaccctgccacctcagcctcacaccaaggagggcgttgatgcctacaacgaagtgatcgcccgggtgcgaatgtgggtgaacctgaacctgtggcagaagctgaagctaagcagagatgatgccaagcctctgctgagactgaagggattcccttcctttcctctggtcgagagacaggccaacgaagtggactggtgggacatggtgtgtaacgtgaagaagctgatcaacgagaaaaaggaggatggcaaggtgttttggcagaatctggctggctacaagagacaggaagccctgagaccatacctgagcagcgaggaagatcggaagaagggaaagaaattcgctcggtaccagctgggcgacctgctgctgcacctggaaaagaagcacggcgaggactggggaaaggtgtacgacgaggcctgggagcggattgacaagaaagtggaaggcctgagcaagcacatcaagctggaagaggaacggagaagcgaggacgcccagagcaaggccgccctgaccgactggctgcgggctaaggccagcttcgtgatcgagggcctgaaggaggccgacaaggacgagttctgcagatgcgagctgaagctgcagaagtggtacggggacctgcggggaaagcccttcgccatcgaagccgagaacagcatcctggacatcagcggcttcagcaagcagtacaactgtgccttcatctggcagaaggacggcgtgaagaagctgaacctgtacctgatcatcaactacttcaagggcggcaagctgcggttcaagaagatcaaacctgaagccttcgaagccaacagattctacaccgtgatcaacaaaaagagcggcgagatcgtgcccatggaggtgaacttcaacttcgacgaccccaacctgatcatcctgcctctggcctttggcaagagacagggcagagaattcatctggaacgacctgctgtccctggaaaccggcagcctgaagctggccaacggaagagtgatcgagaagacactgtacaacagaagaacccggcaggatgagcctgccctgttcgtggccctgaccttcgagcggcgggaggtcctggactcctccaatatcaaaccaatgaacctgatcggcgtggcaagaggcgaaaacatccccgccgtgatcgccctgaccgaccccgagggctgcccactgagccggtttaaggatagcctgggaaacccaacccacatcctgagaatcggcgagagctataaggagaagcagcggaccatccaggccaagaaggaggtggagcagcggagagccggcggctacagccggaagtacgccagcaaagccaagaatctggcagacgatatggtgagaaacaccgctagagatctgctgtactacgccgtgacccaggatgccatgctgatcttcgccaacctgagccggggcttcggccggcagggcaagcggaccttcatggccgagagacagtacacacggatggaggactggctgaccgccaagctggcctacgagggcctgagcaagacctacctgtccaagacactggcccagtacacctccaagacatgcagcaactgtgggtttaccatcaccagcgccgactacgacagggtgctggagaagctgaagaagacagcaacaggctggatgaccacaattaacggcaaggagctgaaggtggagggccagattacctactacaacagatacaagagacagaacgtagtcaaggacctgtccgtcgagctggatagactgagcgaagaatctgtgaacaacgacatctcctcctggacaaagggcagaagcggagaagctctgagcctcctgaagaaaagattctcccatagacccgtgcaggagaagttcgtgtgcctgaactgcggcttcgagacacacgcagccgagcaagccgccctgaacatcgccagatcctggctgttcctgcggagccaggagtacaagaaataccagacaaacaagacaaccggcaacaccgataagagagccttcgtcgagacctggcagtccttttaccggaagaagcttaaggaggtgtggaaacctgccgtgcggtctggcggatctggcggaggctccaccagccccaagaaaaagagaaaagtctaagctgccttctgcggggcttgccttctggccatgcccttcttctctcccttgcacctgtacctcttggtctttgaataaagcctgagtaggaaggctagcaaaaaaaaaaaaaaaaaaaaaaaaaaaaaaaaaaaaaaaaaaaaaaaaaaaaaaaaaaaaaaaaaaaaaaaaaaaaaaaa

SEQ ID NO: 12948 - RNA, 5785 nt, synthetic construct
  source 1..5785: mol_type = other RNA
aggaaataagagagaaaagaagagtaagaagaaatataagagccaccatggcccctaagaagaagcgtaaagtgagccggatggaacgcctcgtctacgaggtgcggcagaagtgcagaaacatcgaggacatctgcatctcctgcggatctctgaacgtgaccctggagcacccactgttcatcggcggcatgtgccagaactgtaaaaactgttttctggagtgtgcctatcaatacgacgatgacggctaccagagctactgcaccatctgttgcggcggaagagaggtgctgatgtgtggaaataacaactgctgccggtgcttctgcgtggaatgcgtggacctgctggtgggccccggcgccgcccaggccgctattaaggaagatccttggaactgctacatgtgcggccacaagggcacatacggcctgctgagacggagagaggactggcctagcagactgcagatgttcttcgccaataaccacgaccaggagttcgacccccctaaggtgtaccctcccgtccccgccgagaagagaaagcccatccgggtcctgagcctgttcgatggcatcgccaccggtctgctggtgctgaaggacctgggcatccaggtggataggtacattgcctccgaggtgtgcgaggactccatcaccgtgggaatggtgcgtcatcagggcaagatcatgtacgtgggcgacgtgcggagcgtgacacagaagcatatccaggagtggggccctttcgacctggtgatcggcggcagcccttgcaatgacctgagcatcgtgaacccagcccggaagggcctgtacgagggaaccggcagactgttcttcgagttttacagactgctgcacgacgcccggcctaaggaaggcgacgaccggcccttcttttggctgttcgagaatgtggtggccatgggagtcagcgacaagcgggatattagccggttcctggagagcaaccccgtgatgatcgatgccaaggaagtgagcgccgcccaccgggccagatacttctggggcaatctgcctggcatgaacagacccctggccagcaccgtgaacgacaagctggagctgcaggagtgcctggagcacggccggatcgccaagttcagcaaggtgagaaccatcaccacccgaagcaacagcatcaaacaaggcaaggaccagcactttcctgtgttcatgaacgagaaggaggacatcctgtggtgtaccgagatggagagagtgttcgggttcccagtccactacacagatgtcagcaacatgtctagactggccagacagagactgctgggaagaagctggtccgtccctgtgatcagacacctgttcgcccctctgaaggagtacttcgcctgcgtgagcagcggcaacagcaacgccaacagccggggccccagcttctctagcggcctggtgccactgtccctgagagggagccacatgggccccatggagatctacaaaaccgtgagcgcctggaagcggcagcctgtgcgcgtgctgagcctgtttcggaatatcgataaagtcctgaaaagcctgggattcctggagagcggctctggctccggcggtggcaccctgaagtacgtggaggatgtgacaaacgtggtcagacgggatgtggagaagtggggccccttcgatctggtgtacggcagcacccaacccctgggcagctcttgtgaccggtgccctggctggtacatgtttcagttccaccggatcctgcagtacgccctgccgagacaggagtcccagcggccattcttttggattttcatggacaacttgctgctgaccgaggatgaccaggaaactaccactcggttcctgcagaccgaagccgtgaccctgcaggacgtgagaggccgggactaccagaacgccatgcgggtgtggtccaacatccctggactgaaaagcaagcacgcacctctgacccctaaagaagaggagtacctgcaggcccaggtgcggagcagaagcaagctggacgcccctaaggtggatctgctggtgaagaattgcctcctgcccctgagagagtacttcaagtatttcagccagaatagtctgcccctgggaggcagcggcggcggcacccaggtgagcgtgaccttcgacgacgtggccgtgaccttcacccaggaggagtggggccacctggaccccgcccagaggaccctgtacagggaggtgatgctggagacctgcaggctgctgatgagcctgggctgccccgtgcccaggcccgagctgatctaccagcaggagcacggccaggagctgtggaccgtgaagagggacctgagcaggagcacctgcgccggctacagcagcgagggcggcccaagcagcggcgcccctcctcccagcggcggcagcccagccggctccccaacctctaccgaggagggcacctctgagtccgccacccccgagagcggccctggcacctccaccgagcccagcgagggcagcgcacccggcagccctgccggcagccccacctccacagaggagggaaccagcaccgagcccagcgaaggcagcgccccaggcaccagcaccgagcctagtgagcaggagattaaacggatcaacaagatcagaagaagacttgtgaaagacagcaacaccaagaaggccggcaagacaggccccatgaaaaccctgctggttagagtgatgacacccgatctgagagagcggctggaaaacctgagaaagaagcctgaaaatatcccccagcccatcagcaatacatctagagccaacctgaataagctgctgaccgattacaccgaaatgaagaaggcgatcctgcatgtgtactgggaagagttccagaaggaccctgtgggcctgatgagccgggtggcccagcctgccagcaagaagatcgatcagaacaagctgaaacctgagatggacgagaagggcaacctgaccaccgccggctttgcctgctctcagtgtggccagcccctgttcgtgtacaagctggagcaggtgtctgagaagggcaaggcttacaccaactacttcggacggtgcaatgtggccgagcacgaaaagctgatcctgctggcccagctgaagcccgagaaggatagcgacgaagccgtgacatatagcctgggaaagtttgggcagagggccctggatttctacagcattcatgtgaccaaggagtccacccaccccgtgaagcccctggcccagatcgccggaaacagatacgcctccggacctgtgggaaaggccctgagcgacgcatgtatgggcacaatcgcctccttcctgtctaagtaccaggacatcatcatcgaacaccagaaggtggtgaagggcaaccagaagagactggagagcctgcgggagctggccggcaaggaaaacctggaataccctagcgtgaccctgccacctcagcctcacaccaaggagggcgttgatgcctacaacgaagtgatcgcccgggtgcgaatgtgggtgaacctgaacctgtggcagaagctgaagctaagcagagatgatgccaagcctctgctgagactgaagggattcccttcctttcctctggtcgagagacaggccaacgaagtggactggtgggacatggtgtgtaacgtgaagaagctgatcaacgagaaaaaggaggatggcaaggtgttttggcagaatctggctggctacaagagacaggaagccctgagaccatacctgagcagcgaggaagatcggaagaagggaaagaaattcgctcggtaccagctgggcgacctgctgctgcacctggaaaagaagcacggcgaggactggggaaaggtgtacgacgaggcctgggagcggattgacaagaaagtggaaggcctgagcaagcacatcaagctggaagaggaacggagaagcgaggacgcccagagcaaggccgccctgaccgactggctgcgggctaaggccagcttcgtgatcgagggcctgaaggaggccgacaaggacgagttctgcagatgcgagctgaagctgcagaagtggtacggggacctgcggggaaagcccttcgccatcgaagccgagaacagcatcctggacatcagcggcttcagcaagcagtacaactgtgccttcatctggcagaaggacggcgtgaagaagctgaacctgtacctgatcatcaactacttcaagggcggcaagctgcggttcaagaagatcaaacctgaagccttcgaagccaacagattctacaccgtgatcaacaaaaagagcggcgagatcgtgcccatggaggtgaacttcaacttcgacgaccccaacctgatcatcctgcctctggcctttggcaagagacagggcagagaattcatctggaacgacctgctgtccctggaaaccggcagcctgaagctggccaacggaagagtgatcgagaagacactgtacaacagaagaacccggcaggatgagcctgccctgttcgtggccctgaccttcgagcggcgggaggtcctggactcctccaatatcaaaccaatgaacctgatcggcgtggcaagaggcgaaaacatccccgccgtgatcgccctgaccgaccccgagggctgcccactgagccggtttaaggatagcctgggaaacccaacccacatcctgagaatcggcgagagctataaggagaagcagcggaccatccaggccaagaaggaggtggagcagcggagagccggcggctacagccggaagtacgccagcaaagccaagaatctggcagacgatatggtgagaaacaccgctagagatctgctgtactacgccgtgacccaggatgccatgctgatcttcgccaacctgagccggggcttcggccggcagggcaagcggaccttcatggccgagagacagtacacacggatggaggactggctgaccgccaagctggcctacgagggcctgagcaagacctacctgtccaagacactggcccagtacacctccaagacatgcagcaactgtgggtttaccatcaccagcgccgactacgacagggtgctggagaagctgaagaagacagcaacaggctggatgaccacaattaacggcaaggagctgaaggtggagggccagattacctactacaacagatacaagagacagaacgtagtcaaggacctgtccgtcgagctggatagactgagcgaagaatctgtgaacaacgacatctcctcctggacaaagggcagaagcggagaagctctgagcctcctgaagaaaagattctcccatagacccgtgcaggagaagttcgtgtgcctgaactgcggcttcgagacacacgcagccgagcaagccgccctgaacatcgccagatcctggctgttcctgcggagccaggagtacaagaaataccagacaaacaagacaaccggcaacaccgataagagagccttcgtcgagacctggcagtccttttaccggaagaagcttaaggaggtgtggaaacctgccgtgcggtctggcggatctggcggaggctccaccagccccaagaaaaagagaaaagtctaagctgccttctgcggggcttgccttctggccatgcccttcttctctcccttgcacctgtacctcttggtctttgaataaagcctgagtaggaaggctagcaaaaaaaaaaaaaaaaaaaaaaaaaaaaaaaaaaaaaaaaaaaaaaaaaaaaaaaaaaaaaaaaaaaaaaaaaaaaaaaa

SEQ ID NO: 12949 - RNA, 5785 nt, synthetic construct
  source 1..5785: mol_type = other RNA
aggaaataagagagaaaagaagagtaagaagaaatataagagccaccatggcccctaagaagaagcgtaaagtgagccggatggaacgcctcgtctacgaggtgcggcagaagtgcagaaacatcgaggacatctgcatctcctgcggatctctgaacgtgaccctggagcacccactgttcatcggcggcatgtgccagaactgtaaaaactgttttctggagtgtgcctatcaatacgacgatgacggctaccagagctactgcaccatctgttgcggcggaagagaggtgctgatgtgtggaaataacaactgctgccggtgcttctgcgtggaatgcgtggacctgctggtgggccccggcgccgcccaggccgctattaaggaagatccttggaactgctacatgtgcggccacaagggcacatacggcctgctgagacggagagaggactggcctagcagactgcagatgttcttcgccaataaccacgaccaggagttcgacccccctaaggtgtaccctcccgtccccgccgagaagagaaagcccatccgggtcctgagcctgttcgatggcatcgccaccggtctgctggtgctgaaggacctgggcatccaggtggataggtacattgcctccgaggtgtgcgaggactccatcaccgtgggaatggtgcgtcatcagggcaagatcatgtacgtgggcgacgtgcggagcgtgacacagaagcatatccaggagtggggccctttcgacctggtgatcggcggcagcccttgcaatgacctgagcatcgtgaacccagcccggaagggcctgtacgagggaaccggcagactgttcttcgagttttacagactgctgcacgacgcccggcctaaggaaggcgacgaccggcccttcttttggctgttcgagaatgtggtggccatgggagtcagcgacaagcgggatattagccggttcctggagagcaaccccgtgatgatcgatgccaaggaagtgagcgccgcccaccgggccagatacttctggggcaatctgcctggcatgaacagacccctggccagcaccgtgaacgacaagctggagctgcaggagtgcctggagcacggccggatcgccaagttcagcaaggtgagaaccatcaccacccgaagcaacagcatcaaacaaggcaaggaccagcactttcctgtgttcatgaacgagaaggaggacatcctgtggtgtaccgagatggagagagtgttcgggttcccagtccactacacagatgtcagcaacatgtctagactggccagacagagactgctgggaagaagctggtccgtccctgtgatcagacacctgttcgcccctctgaaggagtacttcgcctgcgtgagcagcggcaacagcaacgccaacagccggggccccagcttctctagcggcctggtgccactgtccctgagagggagccacatgggccccatggagatctacaaaaccgtgagcgcctggaagcggcagcctgtgcgcgtgctgagcctgtttcggaatatcgataaagtcctgaaaagcctgggattcctggagagcggctctggctccggcggtggcaccctgaagtacgtggaggatgtgacaaacgtggtcagacgggatgtggagaagtggggccccttcgatctggtgtacggcagcacccaacccctgggcagctcttgtgaccggtgccctggctggtacatgtttcagttccaccggatcctgcagtacgccctgccgagacaggagtcccagcggccattcttttggattttcatggacaacttgctgctgaccgaggatgaccaggaaactaccactcggttcctgcagaccgaagccgtgaccctgcaggacgtgagaggccgggactaccagaacgccatgcgggtgtggtccaacatccctggactgaaaagcaagcacgcacctctgacccctaaagaagaggagtacctgcaggcccaggtgcggagcagaagcaagctggacgcccctaaggtggatctgctggtgaagaattgcctcctgcccctgagagagtacttcaagtatttcagccagaatagtctgcccctgggaggcagcggcggcggcatggccttcgaggacgtggccgtgtacttcagcgaggaggagtggggcctgctggacaccgcccagagggccctgtacaggcacgtgatgctggagaacttcaccctggtgaccagcctgggcctgagcaccagcaggcccctggtggtgatccagctggagaggggcgaggacccctgggtgcccagcgtgaaggacatgaccctggccaggaacgcctacggcaggaggaccaccggcagcggcggcccaagcagcggcgcccctcctcccagcggcggcagcccagccggctccccaacctctaccgaggagggcacctctgagtccgccacccccgagagcggccctggcacctccaccgagcccagcgagggcagcgcacccggcagccctgccggcagccccacctccacagaggagggaaccagcaccgagcccagcgaaggcagcgccccaggcaccagcaccgagcctagtgagcaggagattaaacggatcaacaagatcagaagaagacttgtgaaagacagcaacaccaagaaggccggcaagacaggccccatgaaaaccctgctggttagagtgatgacacccgatctgagagagcggctggaaaacctgagaaagaagcctgaaaatatcccccagcccatcagcaatacatctagagccaacctgaataagctgctgaccgattacaccgaaatgaagaaggcgatcctgcatgtgtactgggaagagttccagaaggaccctgtgggcctgatgagccgggtggcccagcctgccagcaagaagatcgatcagaacaagctgaaacctgagatggacgagaagggcaacctgaccaccgccggctttgcctgctctcagtgtggccagcccctgttcgtgtacaagctggagcaggtgtctgagaagggcaaggcttacaccaactacttcggacggtgcaatgtggccgagcacgaaaagctgatcctgctggcccagctgaagcccgagaaggatagcgacgaagccgtgacatatagcctgggaaagtttgggcagagggccctggatttctacagcattcatgtgaccaaggagtccacccaccccgtgaagcccctggcccagatcgccggaaacagatacgcctccggacctgtgggaaaggccctgagcgacgcatgtatgggcacaatcgcctccttcctgtctaagtaccaggacatcatcatcgaacaccagaaggtggtgaagggcaaccagaagagactggagagcctgcgggagctggccggcaaggaaaacctggaataccctagcgtgaccctgccacctcagcctcacaccaaggagggcgttgatgcctacaacgaagtgatcgcccgggtgcgaatgtgggtgaacctgaacctgtggcagaagctgaagctaagcagagatgatgccaagcctctgctgagactgaagggattcccttcctttcctctggtcgagagacaggccaacgaagtggactggtgggacatggtgtgtaacgtgaagaagctgatcaacgagaaaaaggaggatggcaaggtgttttggcagaatctggctggctacaagagacaggaagccctgagaccatacctgagcagcgaggaagatcggaagaagggaaagaaattcgctcggtaccagctgggcgacctgctgctgcacctggaaaagaagcacggcgaggactggggaaaggtgtacgacgaggcctgggagcggattgacaagaaagtggaaggcctgagcaagcacatcaagctggaagaggaacggagaagcgaggacgcccagagcaaggccgccctgaccgactggctgcgggctaaggccagcttcgtgatcgagggcctgaaggaggccgacaaggacgagttctgcagatgcgagctgaagctgcagaagtggtacggggacctgcggggaaagcccttcgccatcgaagccgagaacagcatcctggacatcagcggcttcagcaagcagtacaactgtgccttcatctggcagaaggacggcgtgaagaagctgaacctgtacctgatcatcaactacttcaagggcggcaagctgcggttcaagaagatcaaacctgaagccttcgaagccaacagattctacaccgtgatcaacaaaaagagcggcgagatcgtgcccatggaggtgaacttcaacttcgacgaccccaacctgatcatcctgcctctggcctttggcaagagacagggcagagaattcatctggaacgacctgctgtccctggaaaccggcagcctgaagctggccaacggaagagtgatcgagaagacactgtacaacagaagaacccggcaggatgagcctgccctgttcgtggccctgaccttcgagcggcgggaggtcctggactcctccaatatcaaaccaatgaacctgatcggcgtggcaagaggcgaaaacatccccgccgtgatcgccctgaccgaccccgagggctgcccactgagccggtttaaggatagcctgggaaacccaacccacatcctgagaatcggcgagagctataaggagaagcagcggaccatccaggccaagaaggaggtggagcagcggagagccggcggctacagccggaagtacgccagcaaagccaagaatctggcagacgatatggtgagaaacaccgctagagatctgctgtactacgccgtgacccaggatgccatgctgatcttcgccaacctgagccggggcttcggccggcagggcaagcggaccttcatggccgagagacagtacacacggatggaggactggctgaccgccaagctggcctacgagggcctgagcaagacctacctgtccaagacactggcccagtacacctccaagacatgcagcaactgtgggtttaccatcaccagcgccgactacgacagggtgctggagaagctgaagaagacagcaacaggctggatgaccacaattaacggcaaggagctgaaggtggagggccagattacctactacaacagatacaagagacagaacgtagtcaaggacctgtccgtcgagctggatagactgagcgaagaatctgtgaacaacgacatctcctcctggacaaagggcagaagcggagaagctctgagcctcctgaagaaaagattctcccatagacccgtgcaggagaagttcgtgtgcctgaactgcggcttcgagacacacgcagccgagcaagccgccctgaacatcgccagatcctggctgttcctgcggagccaggagtacaagaaataccagacaaacaagacaaccggcaacaccgataagagagccttcgtcgagacctggcagtccttttaccggaagaagcttaaggaggtgtggaaacctgccgtgcggtctggcggatctggcggaggctccaccagccccaagaaaaagagaaaagtctaagctgccttctgcggggcttgccttctggccatgcccttcttctctcccttgcacctgtacctcttggtctttgaataaagcctgagtaggaaggctagcaaaaaaaaaaaaaaaaaaaaaaaaaaaaaaaaaaaaaaaaaaaaaaaaaaaaaaaaaaaaaaaaaaaaaaaaaaaaaaaa

SEQ ID NO: 12950 - RNA, 5785 nt, synthetic construct
  source 1..5785: mol_type = other RNA
aggaaataagagagaaaagaagagtaagaagaaatataagagccaccatggcccctaagaagaagcgtaaagtgagccggatggaacgcctcgtctacgaggtgcggcagaagtgcagaaacatcgaggacatctgcatctcctgcggatctctgaacgtgaccctggagcacccactgttcatcggcggcatgtgccagaactgtaaaaactgttttctggagtgtgcctatcaatacgacgatgacggctaccagagctactgcaccatctgttgcggcggaagagaggtgctgatgtgtggaaataacaactgctgccggtgcttctgcgtggaatgcgtggacctgctggtgggccccggcgccgcccaggccgctattaaggaagatccttggaactgctacatgtgcggccacaagggcacatacggcctgctgagacggagagaggactggcctagcagactgcagatgttcttcgccaataaccacgaccaggagttcgacccccctaaggtgtaccctcccgtccccgccgagaagagaaagcccatccgggtcctgagcctgttcgatggcatcgccaccggtctgctggtgctgaaggacctgggcatccaggtggataggtacattgcctccgaggtgtgcgaggactccatcaccgtgggaatggtgcgtcatcagggcaagatcatgtacgtgggcgacgtgcggagcgtgacacagaagcatatccaggagtggggccctttcgacctggtgatcggcggcagcccttgcaatgacctgagcatcgtgaacccagcccggaagggcctgtacgagggaaccggcagactgttcttcgagttttacagactgctgcacgacgcccggcctaaggaaggcgacgaccggcccttcttttggctgttcgagaatgtggtggccatgggagtcagcgacaagcgggatattagccggttcctggagagcaaccccgtgatgatcgatgccaaggaagtgagcgccgcccaccgggccagatacttctggggcaatctgcctggcatgaacagacccctggccagcaccgtgaacgacaagctggagctgcaggagtgcctggagcacggccggatcgccaagttcagcaaggtgagaaccatcaccacccgaagcaacagcatcaaacaaggcaaggaccagcactttcctgtgttcatgaacgagaaggaggacatcctgtggtgtaccgagatggagagagtgttcgggttcccagtccactacacagatgtcagcaacatgtctagactggccagacagagactgctgggaagaagctggtccgtccctgtgatcagacacctgttcgcccctctgaaggagtacttcgcctgcgtgagcagcggcaacagcaacgccaacagccggggccccagcttctctagcggcctggtgccactgtccctgagagggagccacatgggccccatggagatctacaaaaccgtgagcgcctggaagcggcagcctgtgcgcgtgctgagcctgtttcggaatatcgataaagtcctgaaaagcctgggattcctggagagcggctctggctccggcggtggcaccctgaagtacgtggaggatgtgacaaacgtggtcagacgggatgtggagaagtggggccccttcgatctggtgtacggcagcacccaacccctgggcagctcttgtgaccggtgccctggctggtacatgtttcagttccaccggatcctgcagtacgccctgccgagacaggagtcccagcggccattcttttggattttcatggacaacttgctgctgaccgaggatgaccaggaaactaccactcggttcctgcagaccgaagccgtgaccctgcaggacgtgagaggccgggactaccagaacgccatgcgggtgtggtccaacatccctggactgaaaagcaagcacgcacctctgacccctaaagaagaggagtacctgcaggcccaggtgcggagcagaagcaagctggacgcccctaaggtggatctgctggtgaagaattgcctcctgcccctgagagagtacttcaagtatttcagccagaatagtctgcccctgggaggcagcggcggcggcatggccgccagccaggagagcctgaccttcaaggacgtgagcgtggacttcagcctggaggagtgggagtgcctggaccccgcccagaggaagctgtacagcgacgtgatgctggagaactacagcaacctggtgagcctgggcctggtggtgagcaagcccggcctggtgaccttcctggagcagatgcaggaggtgtgggacgtgagcaggaagaagagcatcagcaccccccccggcaggggcggcccaagcagcggcgcccctcctcccagcggcggcagcccagccggctccccaacctctaccgaggagggcacctctgagtccgccacccccgagagcggccctggcacctccaccgagcccagcgagggcagcgcacccggcagccctgccggcagccccacctccacagaggagggaaccagcaccgagcccagcgaaggcagcgccccaggcaccagcaccgagcctagtgagcaggagattaaacggatcaacaagatcagaagaagacttgtgaaagacagcaacaccaagaaggccggcaagacaggccccatgaaaaccctgctggttagagtgatgacacccgatctgagagagcggctggaaaacctgagaaagaagcctgaaaatatcccccagcccatcagcaatacatctagagccaacctgaataagctgctgaccgattacaccgaaatgaagaaggcgatcctgcatgtgtactgggaagagttccagaaggaccctgtgggcctgatgagccgggtggcccagcctgccagcaagaagatcgatcagaacaagctgaaacctgagatggacgagaagggcaacctgaccaccgccggctttgcctgctctcagtgtggccagcccctgttcgtgtacaagctggagcaggtgtctgagaagggcaaggcttacaccaactacttcggacggtgcaatgtggccgagcacgaaaagctgatcctgctggcccagctgaagcccgagaaggatagcgacgaagccgtgacatatagcctgggaaagtttgggcagagggccctggatttctacagcattcatgtgaccaaggagtccacccaccccgtgaagcccctggcccagatcgccggaaacagatacgcctccggacctgtgggaaaggccctgagcgacgcatgtatgggcacaatcgcctccttcctgtctaagtaccaggacatcatcatcgaacaccagaaggtggtgaagggcaaccagaagagactggagagcctgcgggagctggccggcaaggaaaacctggaataccctagcgtgaccctgccacctcagcctcacaccaaggagggcgttgatgcctacaacgaagtgatcgcccgggtgcgaatgtgggtgaacctgaacctgtggcagaagctgaagctaagcagagatgatgccaagcctctgctgagactgaagggattcccttcctttcctctggtcgagagacaggccaacgaagtggactggtgggacatggtgtgtaacgtgaagaagctgatcaacgagaaaaaggaggatggcaaggtgttttggcagaatctggctggctacaagagacaggaagccctgagaccatacctgagcagcgaggaagatcggaagaagggaaagaaattcgctcggtaccagctgggcgacctgctgctgcacctggaaaagaagcacggcgaggactggggaaaggtgtacgacgaggcctgggagcggattgacaagaaagtggaaggcctgagcaagcacatcaagctggaagaggaacggagaagcgaggacgcccagagcaaggccgccctgaccgactggctgcgggctaaggccagcttcgtgatcgagggcctgaaggaggccgacaaggacgagttctgcagatgcgagctgaagctgcagaagtggtacggggacctgcggggaaagcccttcgccatcgaagccgagaacagcatcctggacatcagcggcttcagcaagcagtacaactgtgccttcatctggcagaaggacggcgtgaagaagctgaacctgtacctgatcatcaactacttcaagggcggcaagctgcggttcaagaagatcaaacctgaagccttcgaagccaacagattctacaccgtgatcaacaaaaagagcggcgagatcgtgcccatggaggtgaacttcaacttcgacgaccccaacctgatcatcctgcctctggcctttggcaagagacagggcagagaattcatctggaacgacctgctgtccctggaaaccggcagcctgaagctggccaacggaagagtgatcgagaagacactgtacaacagaagaacccggcaggatgagcctgccctgttcgtggccctgaccttcgagcggcgggaggtcctggactcctccaatatcaaaccaatgaacctgatcggcgtggcaagaggcgaaaacatccccgccgtgatcgccctgaccgaccccgagggctgcccactgagccggtttaaggatagcctgggaaacccaacccacatcctgagaatcggcgagagctataaggagaagcagcggaccatccaggccaagaaggaggtggagcagcggagagccggcggctacagccggaagtacgccagcaaagccaagaatctggcagacgatatggtgagaaacaccgctagagatctgctgtactacgccgtgacccaggatgccatgctgatcttcgccaacctgagccggggcttcggccggcagggcaagcggaccttcatggccgagagacagtacacacggatggaggactggctgaccgccaagctggcctacgagggcctgagcaagacctacctgtccaagacactggcccagtacacctccaagacatgcagcaactgtgggtttaccatcaccagcgccgactacgacagggtgctggagaagctgaagaagacagcaacaggctggatgaccacaattaacggcaaggagctgaaggtggagggccagattacctactacaacagatacaagagacagaacgtagtcaaggacctgtccgtcgagctggatagactgagcgaagaatctgtgaacaacgacatctcctcctggacaaagggcagaagcggagaagctctgagcctcctgaagaaaagattctcccatagacccgtgcaggagaagttcgtgtgcctgaactgcggcttcgagacacacgcagccgagcaagccgccctgaacatcgccagatcctggctgttcctgcggagccaggagtacaagaaataccagacaaacaagacaaccggcaacaccgataagagagccttcgtcgagacctggcagtccttttaccggaagaagcttaaggaggtgtggaaacctgccgtgcggtctggcggatctggcggaggctccaccagccccaagaaaaagagaaaagtctaagctgccttctgcggggcttgccttctggccatgcccttcttctctcccttgcacctgtacctcttggtctttgaataaagcctgagtaggaaggctagcaaaaaaaaaaaaaaaaaaaaaaaaaaaaaaaaaaaaaaaaaaaaaaaaaaaaaaaaaaaaaaaaaaaaaaaaaaaaaaaa

SEQ ID NO: 12951 - RNA, 5785 nt, synthetic construct
  source 1..5785: mol_type = other RNA
aggaaataagagagaaaagaagagtaagaagaaatataagagccaccatggcccctaagaagaagcgtaaagtgagccggatggaacgcctcgtctacgaggtgcggcagaagtgcagaaacatcgaggacatctgcatctcctgcggatctctgaacgtgaccctggagcacccactgttcatcggcggcatgtgccagaactgtaaaaactgttttctggagtgtgcctatcaatacgacgatgacggctaccagagctactgcaccatctgttgcggcggaagagaggtgctgatgtgtggaaataacaactgctgccggtgcttctgcgtggaatgcgtggacctgctggtgggccccggcgccgcccaggccgctattaaggaagatccttggaactgctacatgtgcggccacaagggcacatacggcctgctgagacggagagaggactggcctagcagactgcagatgttcttcgccaataaccacgaccaggagttcgacccccctaaggtgtaccctcccgtccccgccgagaagagaaagcccatccgggtcctgagcctgttcgatggcatcgccaccggtctgctggtgctgaaggacctgggcatccaggtggataggtacattgcctccgaggtgtgcgaggactccatcaccgtgggaatggtgcgtcatcagggcaagatcatgtacgtgggcgacgtgcggagcgtgacacagaagcatatccaggagtggggccctttcgacctggtgatcggcggcagcccttgcaatgacctgagcatcgtgaacccagcccggaagggcctgtacgagggaaccggcagactgttcttcgagttttacagactgctgcacgacgcccggcctaaggaaggcgacgaccggcccttcttttggctgttcgagaatgtggtggccatgggagtcagcgacaagcgggatattagccggttcctggagagcaaccccgtgatgatcgatgccaaggaagtgagcgccgcccaccgggccagatacttctggggcaatctgcctggcatgaacagacccctggccagcaccgtgaacgacaagctggagctgcaggagtgcctggagcacggccggatcgccaagttcagcaaggtgagaaccatcaccacccgaagcaacagcatcaaacaaggcaaggaccagcactttcctgtgttcatgaacgagaaggaggacatcctgtggtgtaccgagatggagagagtgttcgggttcccagtccactacacagatgtcagcaacatgtctagactggccagacagagactgctgggaagaagctggtccgtccctgtgatcagacacctgttcgcccctctgaaggagtacttcgcctgcgtgagcagcggcaacagcaacgccaacagccggggccccagcttctctagcggcctggtgccactgtccctgagagggagccacatgggccccatggagatctacaaaaccgtgagcgcctggaagcggcagcctgtgcgcgtgctgagcctgtttcggaatatcgataaagtcctgaaaagcctgggattcctggagagcggctctggctccggcggtggcaccctgaagtacgtggaggatgtgacaaacgtggtcagacgggatgtggagaagtggggccccttcgatctggtgtacggcagcacccaacccctgggcagctcttgtgaccggtgccctggctggtacatgtttcagttccaccggatcctgcagtacgccctgccgagacaggagtcccagcggccattcttttggattttcatggacaacttgctgctgaccgaggatgaccaggaaactaccactcggttcctgcagaccgaagccgtgaccctgcaggacgtgagaggccgggactaccagaacgccatgcgggtgtggtccaacatccctggactgaaaagcaagcacgcacctctgacccctaaagaagaggagtacctgcaggcccaggtgcggagcagaagcaagctggacgcccctaaggtggatctgctggtgaagaattgcctcctgcccctgagagagtacttcaagtatttcagccagaatagtctgcccctgggaggcagcggcggcggcagccagggcctggtgaccttcggcgacgtggccctggacttcagccaggaggagtgggagtggctgaaccccagccagaaggacctgtacagggacgtgatgctggagaactacaggaacctggtgtggctgggcctgagcatcagcaagcccaacatgatcagcctgctggagcagggcaaggagccctggatggtggagagggagatgagccacggccagtgcgccgactgggagagctggggcggcccaagcagcggcgcccctcctcccagcggcggcagcccagccggctccccaacctctaccgaggagggcacctctgagtccgccacccccgagagcggccctggcacctccaccgagcccagcgagggcagcgcacccggcagccctgccggcagccccacctccacagaggagggaaccagcaccgagcccagcgaaggcagcgccccaggcaccagcaccgagcctagtgagcaggagattaaacggatcaacaagatcagaagaagacttgtgaaagacagcaacaccaagaaggccggcaagacaggccccatgaaaaccctgctggttagagtgatgacacccgatctgagagagcggctggaaaacctgagaaagaagcctgaaaatatcccccagcccatcagcaatacatctagagccaacctgaataagctgctgaccgattacaccgaaatgaagaaggcgatcctgcatgtgtactgggaagagttccagaaggaccctgtgggcctgatgagccgggtggcccagcctgccagcaagaagatcgatcagaacaagctgaaacctgagatggacgagaagggcaacctgaccaccgccggctttgcctgctctcagtgtggccagcccctgttcgtgtacaagctggagcaggtgtctgagaagggcaaggcttacaccaactacttcggacggtgcaatgtggccgagcacgaaaagctgatcctgctggcccagctgaagcccgagaaggatagcgacgaagccgtgacatatagcctgggaaagtttgggcagagggccctggatttctacagcattcatgtgaccaaggagtccacccaccccgtgaagcccctggcccagatcgccggaaacagatacgcctccggacctgtgggaaaggccctgagcgacgcatgtatgggcacaatcgcctccttcctgtctaagtaccaggacatcatcatcgaacaccagaaggtggtgaagggcaaccagaagagactggagagcctgcgggagctggccggcaaggaaaacctggaataccctagcgtgaccctgccacctcagcctcacaccaaggagggcgttgatgcctacaacgaagtgatcgcccgggtgcgaatgtgggtgaacctgaacctgtggcagaagctgaagctaagcagagatgatgccaagcctctgctgagactgaagggattcccttcctttcctctggtcgagagacaggccaacgaagtggactggtgggacatggtgtgtaacgtgaagaagctgatcaacgagaaaaaggaggatggcaaggtgttttggcagaatctggctggctacaagagacaggaagccctgagaccatacctgagcagcgaggaagatcggaagaagggaaagaaattcgctcggtaccagctgggcgacctgctgctgcacctggaaaagaagcacggcgaggactggggaaaggtgtacgacgaggcctgggagcggattgacaagaaagtggaaggcctgagcaagcacatcaagctggaagaggaacggagaagcgaggacgcccagagcaaggccgccctgaccgactggctgcgggctaaggccagcttcgtgatcgagggcctgaaggaggccgacaaggacgagttctgcagatgcgagctgaagctgcagaagtggtacggggacctgcggggaaagcccttcgccatcgaagccgagaacagcatcctggacatcagcggcttcagcaagcagtacaactgtgccttcatctggcagaaggacggcgtgaagaagctgaacctgtacctgatcatcaactacttcaagggcggcaagctgcggttcaagaagatcaaacctgaagccttcgaagccaacagattctacaccgtgatcaacaaaaagagcggcgagatcgtgcccatggaggtgaacttcaacttcgacgaccccaacctgatcatcctgcctctggcctttggcaagagacagggcagagaattcatctggaacgacctgctgtccctggaaaccggcagcctgaagctggccaacggaagagtgatcgagaagacactgtacaacagaagaacccggcaggatgagcctgccctgttcgtggccctgaccttcgagcggcgggaggtcctggactcctccaatatcaaaccaatgaacctgatcggcgtggcaagaggcgaaaacatccccgccgtgatcgccctgaccgaccccgagggctgcccactgagccggtttaaggatagcctgggaaacccaacccacatcctgagaatcggcgagagctataaggagaagcagcggaccatccaggccaagaaggaggtggagcagcggagagccggcggctacagccggaagtacgccagcaaagccaagaatctggcagacgatatggtgagaaacaccgctagagatctgctgtactacgccgtgacccaggatgccatgctgatcttcgccaacctgagccggggcttcggccggcagggcaagcggaccttcatggccgagagacagtacacacggatggaggactggctgaccgccaagctggcctacgagggcctgagcaagacctacctgtccaagacactggcccagtacacctccaagacatgcagcaactgtgggtttaccatcaccagcgccgactacgacagggtgctggagaagctgaagaagacagcaacaggctggatgaccacaattaacggcaaggagctgaaggtggagggccagattacctactacaacagatacaagagacagaacgtagtcaaggacctgtccgtcgagctggatagactgagcgaagaatctgtgaacaacgacatctcctcctggacaaagggcagaagcggagaagctctgagcctcctgaagaaaagattctcccatagacccgtgcaggagaagttcgtgtgcctgaactgcggcttcgagacacacgcagccgagcaagccgccctgaacatcgccagatcctggctgttcctgcggagccaggagtacaagaaataccagacaaacaagacaaccggcaacaccgataagagagccttcgtcgagacctggcagtccttttaccggaagaagcttaaggaggtgtggaaacctgccgtgcggtctggcggatctggcggaggctccaccagccccaagaaaaagagaaaagtctaagctgccttctgcggggcttgccttctggccatgcccttcttctctcccttgcacctgtacctcttggtctttgaataaagcctgagtaggaaggctagcaaaaaaaaaaaaaaaaaaaaaaaaaaaaaaaaaaaaaaaaaaaaaaaaaaaaaaaaaaaaaaaaaaaaaaaaaaaaaaaa

SEQ ID NO: 12952 - RNA, 5785 nt, synthetic construct
  source 1..5785: mol_type = other RNA
aggaaataagagagaaaagaagagtaagaagaaatataagagccaccatggcccctaagaagaagcgtaaagtgagccggatggaacgcctcgtctacgaggtgcggcagaagtgcagaaacatcgaggacatctgcatctcctgcggatctctgaacgtgaccctggagcacccactgttcatcggcggcatgtgccagaactgtaaaaactgttttctggagtgtgcctatcaatacgacgatgacggctaccagagctactgcaccatctgttgcggcggaagagaggtgctgatgtgtggaaataacaactgctgccggtgcttctgcgtggaatgcgtggacctgctggtgggccccggcgccgcccaggccgctattaaggaagatccttggaactgctacatgtgcggccacaagggcacatacggcctgctgagacggagagaggactggcctagcagactgcagatgttcttcgccaataaccacgaccaggagttcgacccccctaaggtgtaccctcccgtccccgccgagaagagaaagcccatccgggtcctgagcctgttcgatggcatcgccaccggtctgctggtgctgaaggacctgggcatccaggtggataggtacattgcctccgaggtgtgcgaggactccatcaccgtgggaatggtgcgtcatcagggcaagatcatgtacgtgggcgacgtgcggagcgtgacacagaagcatatccaggagtggggccctttcgacctggtgatcggcggcagcccttgcaatgacctgagcatcgtgaacccagcccggaagggcctgtacgagggaaccggcagactgttcttcgagttttacagactgctgcacgacgcccggcctaaggaaggcgacgaccggcccttcttttggctgttcgagaatgtggtggccatgggagtcagcgacaagcgggatattagccggttcctggagagcaaccccgtgatgatcgatgccaaggaagtgagcgccgcccaccgggccagatacttctggggcaatctgcctggcatgaacagacccctggccagcaccgtgaacgacaagctggagctgcaggagtgcctggagcacggccggatcgccaagttcagcaaggtgagaaccatcaccacccgaagcaacagcatcaaacaaggcaaggaccagcactttcctgtgttcatgaacgagaaggaggacatcctgtggtgtaccgagatggagagagtgttcgggttcccagtccactacacagatgtcagcaacatgtctagactggccagacagagactgctgggaagaagctggtccgtccctgtgatcagacacctgttcgcccctctgaaggagtacttcgcctgcgtgagcagcggcaacagcaacgccaacagccggggccccagcttctctagcggcctggtgccactgtccctgagagggagccacatgggccccatggagatctacaaaaccgtgagcgcctggaagcggcagcctgtgcgcgtgctgagcctgtttcggaatatcgataaagtcctgaaaagcctgggattcctggagagcggctctggctccggcggtggcaccctgaagtacgtggaggatgtgacaaacgtggtcagacgggatgtggagaagtggggccccttcgatctggtgtacggcagcacccaacccctgggcagctcttgtgaccggtgccctggctggtacatgtttcagttccaccggatcctgcagtacgccctgccgagacaggagtcccagcggccattcttttggattttcatggacaacttgctgctgaccgaggatgaccaggaaactaccactcggttcctgcagaccgaagccgtgaccctgcaggacgtgagaggccgggactaccagaacgccatgcgggtgtggtccaacatccctggactgaaaagcaagcacgcacctctgacccctaaagaagaggagtacctgcaggcccaggtgcggagcagaagcaagctggacgcccctaaggtggatctgctggtgaagaattgcctcctgcccctgagagagtacttcaagtatttcagccagaatagtctgcccctgggaggcagcggcggcggcgagaagggccccctgaccttcagggacgtggccatcgagttcagcctggaggagtggcagtgcctggacaccgcccagcaggacctgtacaggagggtgatgctggagaactacaggaacctggtgttcctgggcatcgccgtgagcaaccccgacctgatcacctgcctggagcagggcaaggagccctggaacatgaagaggcacgccatggccgacgagccccccgtgatgtacagccacggcggcccaagcagcggcgcccctcctcccagcggcggcagcccagccggctccccaacctctaccgaggagggcacctctgagtccgccacccccgagagcggccctggcacctccaccgagcccagcgagggcagcgcacccggcagccctgccggcagccccacctccacagaggagggaaccagcaccgagcccagcgaaggcagcgccccaggcaccagcaccgagcctagtgagcaggagattaaacggatcaacaagatcagaagaagacttgtgaaagacagcaacaccaagaaggccggcaagacaggccccatgaaaaccctgctggttagagtgatgacacccgatctgagagagcggctggaaaacctgagaaagaagcctgaaaatatcccccagcccatcagcaatacatctagagccaacctgaataagctgctgaccgattacaccgaaatgaagaaggcgatcctgcatgtgtactgggaagagttccagaaggaccctgtgggcctgatgagccgggtggcccagcctgccagcaagaagatcgatcagaacaagctgaaacctgagatggacgagaagggcaacctgaccaccgccggctttgcctgctctcagtgtggccagcccctgttcgtgtacaagctggagcaggtgtctgagaagggcaaggcttacaccaactacttcggacggtgcaatgtggccgagcacgaaaagctgatcctgctggcccagctgaagcccgagaaggatagcgacgaagccgtgacatatagcctgggaaagtttgggcagagggccctggatttctacagcattcatgtgaccaaggagtccacccaccccgtgaagcccctggcccagatcgccggaaacagatacgcctccggacctgtgggaaaggccctgagcgacgcatgtatgggcacaatcgcctccttcctgtctaagtaccaggacatcatcatcgaacaccagaaggtggtgaagggcaaccagaagagactggagagcctgcgggagctggccggcaaggaaaacctggaataccctagcgtgaccctgccacctcagcctcacaccaaggagggcgttgatgcctacaacgaagtgatcgcccgggtgcgaatgtgggtgaacctgaacctgtggcagaagctgaagctaagcagagatgatgccaagcctctgctgagactgaagggattcccttcctttcctctggtcgagagacaggccaacgaagtggactggtgggacatggtgtgtaacgtgaagaagctgatcaacgagaaaaaggaggatggcaaggtgttttggcagaatctggctggctacaagagacaggaagccctgagaccatacctgagcagcgaggaagatcggaagaagggaaagaaattcgctcggtaccagctgggcgacctgctgctgcacctggaaaagaagcacggcgaggactggggaaaggtgtacgacgaggcctgggagcggattgacaagaaagtggaaggcctgagcaagcacatcaagctggaagaggaacggagaagcgaggacgcccagagcaaggccgccctgaccgactggctgcgggctaaggccagcttcgtgatcgagggcctgaaggaggccgacaaggacgagttctgcagatgcgagctgaagctgcagaagtggtacggggacctgcggggaaagcccttcgccatcgaagccgagaacagcatcctggacatcagcggcttcagcaagcagtacaactgtgccttcatctggcagaaggacggcgtgaagaagctgaacctgtacctgatcatcaactacttcaagggcggcaagctgcggttcaagaagatcaaacctgaagccttcgaagccaacagattctacaccgtgatcaacaaaaagagcggcgagatcgtgcccatggaggtgaacttcaacttcgacgaccccaacctgatcatcctgcctctggcctttggcaagagacagggcagagaattcatctggaacgacctgctgtccctggaaaccggcagcctgaagctggccaacggaagagtgatcgagaagacactgtacaacagaagaacccggcaggatgagcctgccctgttcgtggccctgaccttcgagcggcgggaggtcctggactcctccaatatcaaaccaatgaacctgatcggcgtggcaagaggcgaaaacatccccgccgtgatcgccctgaccgaccccgagggctgcccactgagccggtttaaggatagcctgggaaacccaacccacatcctgagaatcggcgagagctataaggagaagcagcggaccatccaggccaagaaggaggtggagcagcggagagccggcggctacagccggaagtacgccagcaaagccaagaatctggcagacgatatggtgagaaacaccgctagagatctgctgtactacgccgtgacccaggatgccatgctgatcttcgccaacctgagccggggcttcggccggcagggcaagcggaccttcatggccgagagacagtacacacggatggaggactggctgaccgccaagctggcctacgagggcctgagcaagacctacctgtccaagacactggcccagtacacctccaagacatgcagcaactgtgggtttaccatcaccagcgccgactacgacagggtgctggagaagctgaagaagacagcaacaggctggatgaccacaattaacggcaaggagctgaaggtggagggccagattacctactacaacagatacaagagacagaacgtagtcaaggacctgtccgtcgagctggatagactgagcgaagaatctgtgaacaacgacatctcctcctggacaaagggcagaagcggagaagctctgagcctcctgaagaaaagattctcccatagacccgtgcaggagaagttcgtgtgcctgaactgcggcttcgagacacacgcagccgagcaagccgccctgaacatcgccagatcctggctgttcctgcggagccaggagtacaagaaataccagacaaacaagacaaccggcaacaccgataagagagccttcgtcgagacctggcagtccttttaccggaagaagcttaaggaggtgtggaaacctgccgtgcggtctggcggatctggcggaggctccaccagccccaagaaaaagagaaaagtctaagctgccttctgcggggcttgccttctggccatgcccttcttctctcccttgcacctgtacctcttggtctttgaataaagcctgagtaggaaggctagcaaaaaaaaaaaaaaaaaaaaaaaaaaaaaaaaaaaaaaaaaaaaaaaaaaaaaaaaaaaaaaaaaaaaaaaaaaaaaaaa

SEQ ID NO: 12953 - RNA, 5785 nt, synthetic construct
  source 1..5785: mol_type = other RNA
aggaaataagagagaaaagaagagtaagaagaaatataagagccaccatggcccctaagaagaagcgtaaagtgagccggatggaacgcctcgtctacgaggtgcggcagaagtgcagaaacatcgaggacatctgcatctcctgcggatctctgaacgtgaccctggagcacccactgttcatcggcggcatgtgccagaactgtaaaaactgttttctggagtgtgcctatcaatacgacgatgacggctaccagagctactgcaccatctgttgcggcggaagagaggtgctgatgtgtggaaataacaactgctgccggtgcttctgcgtggaatgcgtggacctgctggtgggccccggcgccgcccaggccgctattaaggaagatccttggaactgctacatgtgcggccacaagggcacatacggcctgctgagacggagagaggactggcctagcagactgcagatgttcttcgccaataaccacgaccaggagttcgacccccctaaggtgtaccctcccgtccccgccgagaagagaaagcccatccgggtcctgagcctgttcgatggcatcgccaccggtctgctggtgctgaaggacctgggcatccaggtggataggtacattgcctccgaggtgtgcgaggactccatcaccgtgggaatggtgcgtcatcagggcaagatcatgtacgtgggcgacgtgcggagcgtgacacagaagcatatccaggagtggggccctttcgacctggtgatcggcggcagcccttgcaatgacctgagcatcgtgaacccagcccggaagggcctgtacgagggaaccggcagactgttcttcgagttttacagactgctgcacgacgcccggcctaaggaaggcgacgaccggcccttcttttggctgttcgagaatgtggtggccatgggagtcagcgacaagcgggatattagccggttcctggagagcaaccccgtgatgatcgatgccaaggaagtgagcgccgcccaccgggccagatacttctggggcaatctgcctggcatgaacagacccctggccagcaccgtgaacgacaagctggagctgcaggagtgcctggagcacggccggatcgccaagttcagcaaggtgagaaccatcaccacccgaagcaacagcatcaaacaaggcaaggaccagcactttcctgtgttcatgaacgagaaggaggacatcctgtggtgtaccgagatggagagagtgttcgggttcccagtccactacacagatgtcagcaacatgtctagactggccagacagagactgctgggaagaagctggtccgtccctgtgatcagacacctgttcgcccctctgaaggagtacttcgcctgcgtgagcagcggcaacagcaacgccaacagccggggccccagcttctctagcggcctggtgccactgtccctgagagggagccacatgggccccatggagatctacaaaaccgtgagcgcctggaagcggcagcctgtgcgcgtgctgagcctgtttcggaatatcgataaagtcctgaaaagcctgggattcctggagagcggctctggctccggcggtggcaccctgaagtacgtggaggatgtgacaaacgtggtcagacgggatgtggagaagtggggccccttcgatctggtgtacggcagcacccaacccctgggcagctcttgtgaccggtgccctggctggtacatgtttcagttccaccggatcctgcagtacgccctgccgagacaggagtcccagcggccattcttttggattttcatggacaacttgctgctgaccgaggatgaccaggaaactaccactcggttcctgcagaccgaagccgtgaccctgcaggacgtgagaggccgggactaccagaacgccatgcgggtgtggtccaacatccctggactgaaaagcaagcacgcacctctgacccctaaagaagaggagtacctgcaggcccaggtgcggagcagaagcaagctggacgcccctaaggtggatctgctggtgaagaattgcctcctgcccctgagagagtacttcaagtatttcagccagaatagtctgcccctgggaggcagcggcggcggcctgagcacccagctgaccgtggaggacgtggacatcaagttcacccccgaggagtgggagtgcctggaccccgcccagaggaccctgtacagggacgtgatggaggagacctacaggaacctgctgagcgtgggcatcggccccaggctgcccgactgcagcagctgcatccacatgaccaagaagctgcaggccaaggagaacagcggcaagggcgagatcctgcagagggtgatgtgcggcggcggcccaagcagcggcgcccctcctcccagcggcggcagcccagccggctccccaacctctaccgaggagggcacctctgagtccgccacccccgagagcggccctggcacctccaccgagcccagcgagggcagcgcacccggcagccctgccggcagccccacctccacagaggagggaaccagcaccgagcccagcgaaggcagcgccccaggcaccagcaccgagcctagtgagcaggagattaaacggatcaacaagatcagaagaagacttgtgaaagacagcaacaccaagaaggccggcaagacaggccccatgaaaaccctgctggttagagtgatgacacccgatctgagagagcggctggaaaacctgagaaagaagcctgaaaatatcccccagcccatcagcaatacatctagagccaacctgaataagctgctgaccgattacaccgaaatgaagaaggcgatcctgcatgtgtactgggaagagttccagaaggaccctgtgggcctgatgagccgggtggcccagcctgccagcaagaagatcgatcagaacaagctgaaacctgagatggacgagaagggcaacctgaccaccgccggctttgcctgctctcagtgtggccagcccctgttcgtgtacaagctggagcaggtgtctgagaagggcaaggcttacaccaactacttcggacggtgcaatgtggccgagcacgaaaagctgatcctgctggcccagctgaagcccgagaaggatagcgacgaagccgtgacatatagcctgggaaagtttgggcagagggccctggatttctacagcattcatgtgaccaaggagtccacccaccccgtgaagcccctggcccagatcgccggaaacagatacgcctccggacctgtgggaaaggccctgagcgacgcatgtatgggcacaatcgcctccttcctgtctaagtaccaggacatcatcatcgaacaccagaaggtggtgaagggcaaccagaagagactggagagcctgcgggagctggccggcaaggaaaacctggaataccctagcgtgaccctgccacctcagcctcacaccaaggagggcgttgatgcctacaacgaagtgatcgcccgggtgcgaatgtgggtgaacctgaacctgtggcagaagctgaagctaagcagagatgatgccaagcctctgctgagactgaagggattcccttcctttcctctggtcgagagacaggccaacgaagtggactggtgggacatggtgtgtaacgtgaagaagctgatcaacgagaaaaaggaggatggcaaggtgttttggcagaatctggctggctacaagagacaggaagccctgagaccatacctgagcagcgaggaagatcggaagaagggaaagaaattcgctcggtaccagctgggcgacctgctgctgcacctggaaaagaagcacggcgaggactggggaaaggtgtacgacgaggcctgggagcggattgacaagaaagtggaaggcctgagcaagcacatcaagctggaagaggaacggagaagcgaggacgcccagagcaaggccgccctgaccgactggctgcgggctaaggccagcttcgtgatcgagggcctgaaggaggccgacaaggacgagttctgcagatgcgagctgaagctgcagaagtggtacggggacctgcggggaaagcccttcgccatcgaagccgagaacagcatcctggacatcagcggcttcagcaagcagtacaactgtgccttcatctggcagaaggacggcgtgaagaagctgaacctgtacctgatcatcaactacttcaagggcggcaagctgcggttcaagaagatcaaacctgaagccttcgaagccaacagattctacaccgtgatcaacaaaaagagcggcgagatcgtgcccatggaggtgaacttcaacttcgacgaccccaacctgatcatcctgcctctggcctttggcaagagacagggcagagaattcatctggaacgacctgctgtccctggaaaccggcagcctgaagctggccaacggaagagtgatcgagaagacactgtacaacagaagaacccggcaggatgagcctgccctgttcgtggccctgaccttcgagcggcgggaggtcctggactcctccaatatcaaaccaatgaacctgatcggcgtggcaagaggcgaaaacatccccgccgtgatcgccctgaccgaccccgagggctgcccactgagccggtttaaggatagcctgggaaacccaacccacatcctgagaatcggcgagagctataaggagaagcagcggaccatccaggccaagaaggaggtggagcagcggagagccggcggctacagccggaagtacgccagcaaagccaagaatctggcagacgatatggtgagaaacaccgctagagatctgctgtactacgccgtgacccaggatgccatgctgatcttcgccaacctgagccggggcttcggccggcagggcaagcggaccttcatggccgagagacagtacacacggatggaggactggctgaccgccaagctggcctacgagggcctgagcaagacctacctgtccaagacactggcccagtacacctccaagacatgcagcaactgtgggtttaccatcaccagcgccgactacgacagggtgctggagaagctgaagaagacagcaacaggctggatgaccacaattaacggcaaggagctgaaggtggagggccagattacctactacaacagatacaagagacagaacgtagtcaaggacctgtccgtcgagctggatagactgagcgaagaatctgtgaacaacgacatctcctcctggacaaagggcagaagcggagaagctctgagcctcctgaagaaaagattctcccatagacccgtgcaggagaagttcgtgtgcctgaactgcggcttcgagacacacgcagccgagcaagccgccctgaacatcgccagatcctggctgttcctgcggagccaggagtacaagaaataccagacaaacaagacaaccggcaacaccgataagagagccttcgtcgagacctggcagtccttttaccggaagaagcttaaggaggtgtggaaacctgccgtgcggtctggcggatctggcggaggctccaccagccccaagaaaaagagaaaagtctaagctgccttctgcggggcttgccttctggccatgcccttcttctctcccttgcacctgtacctcttggtctttgaataaagcctgagtaggaaggctagcaaaaaaaaaaaaaaaaaaaaaaaaaaaaaaaaaaaaaaaaaaaaaaaaaaaaaaaaaaaaaaaaaaaaaaaaaaaaaaaa

SEQ ID NO: 12954 - RNA, 5785 nt, synthetic construct
  source 1..5785: mol_type = other RNA
aggaaataagagagaaaagaagagtaagaagaaatataagagccaccatggcccctaagaagaagcgtaaagtgagccggatggaacgcctcgtctacgaggtgcggcagaagtgcagaaacatcgaggacatctgcatctcctgcggatctctgaacgtgaccctggagcacccactgttcatcggcggcatgtgccagaactgtaaaaactgttttctggagtgtgcctatcaatacgacgatgacggctaccagagctactgcaccatctgttgcggcggaagagaggtgctgatgtgtggaaataacaactgctgccggtgcttctgcgtggaatgcgtggacctgctggtgggccccggcgccgcccaggccgctattaaggaagatccttggaactgctacatgtgcggccacaagggcacatacggcctgctgagacggagagaggactggcctagcagactgcagatgttcttcgccaataaccacgaccaggagttcgacccccctaaggtgtaccctcccgtccccgccgagaagagaaagcccatccgggtcctgagcctgttcgatggcatcgccaccggtctgctggtgctgaaggacctgggcatccaggtggataggtacattgcctccgaggtgtgcgaggactccatcaccgtgggaatggtgcgtcatcagggcaagatcatgtacgtgggcgacgtgcggagcgtgacacagaagcatatccaggagtggggccctttcgacctggtgatcggcggcagcccttgcaatgacctgagcatcgtgaacccagcccggaagggcctgtacgagggaaccggcagactgttcttcgagttttacagactgctgcacgacgcccggcctaaggaaggcgacgaccggcccttcttttggctgttcgagaatgtggtggccatgggagtcagcgacaagcgggatattagccggttcctggagagcaaccccgtgatgatcgatgccaaggaagtgagcgccgcccaccgggccagatacttctggggcaatctgcctggcatgaacagacccctggccagcaccgtgaacgacaagctggagctgcaggagtgcctggagcacggccggatcgccaagttcagcaaggtgagaaccatcaccacccgaagcaacagcatcaaacaaggcaaggaccagcactttcctgtgttcatgaacgagaaggaggacatcctgtggtgtaccgagatggagagagtgttcgggttcccagtccactacacagatgtcagcaacatgtctagactggccagacagagactgctgggaagaagctggtccgtccctgtgatcagacacctgttcgcccctctgaaggagtacttcgcctgcgtgagcagcggcaacagcaacgccaacagccggggccccagcttctctagcggcctggtgccactgtccctgagagggagccacatgggccccatggagatctacaaaaccgtgagcgcctggaagcggcagcctgtgcgcgtgctgagcctgtttcggaatatcgataaagtcctgaaaagcctgggattcctggagagcggctctggctccggcggtggcaccctgaagtacgtggaggatgtgacaaacgtggtcagacgggatgtggagaagtggggccccttcgatctggtgtacggcagcacccaacccctgggcagctcttgtgaccggtgccctggctggtacatgtttcagttccaccggatcctgcagtacgccctgccgagacaggagtcccagcggccattcttttggattttcatggacaacttgctgctgaccgaggatgaccaggaaactaccactcggttcctgcagaccgaagccgtgaccctgcaggacgtgagaggccgggactaccagaacgccatgcgggtgtggtccaacatccctggactgaaaagcaagcacgcacctctgacccctaaagaagaggagtacctgcaggcccaggtgcggagcagaagcaagctggacgcccctaaggtggatctgctggtgaagaattgcctcctgcccctgagagagtacttcaagtatttcagccagaatagtctgcccctgggaggcagcggcggcggcgcccaggaggtggtgaccttccaggacgtggccgtggacttcaccagggaggagtggaggctgctgagccccccccagaaggagctgtacaaggaggtgatgctggagaacgccaggaacctgctgagcgtgggcctgcccgccccccccgacgacgtggtgagctacctggagcagagggagggccccagcatgctggaccaggaggacctgaggacctgcggccccgagggcgagatcaggggcggcccaagcagcggcgcccctcctcccagcggcggcagcccagccggctccccaacctctaccgaggagggcacctctgagtccgccacccccgagagcggccctggcacctccaccgagcccagcgagggcagcgcacccggcagccctgccggcagccccacctccacagaggagggaaccagcaccgagcccagcgaaggcagcgccccaggcaccagcaccgagcctagtgagcaggagattaaacggatcaacaagatcagaagaagacttgtgaaagacagcaacaccaagaaggccggcaagacaggccccatgaaaaccctgctggttagagtgatgacacccgatctgagagagcggctggaaaacctgagaaagaagcctgaaaatatcccccagcccatcagcaatacatctagagccaacctgaataagctgctgaccgattacaccgaaatgaagaaggcgatcctgcatgtgtactgggaagagttccagaaggaccctgtgggcctgatgagccgggtggcccagcctgccagcaagaagatcgatcagaacaagctgaaacctgagatggacgagaagggcaacctgaccaccgccggctttgcctgctctcagtgtggccagcccctgttcgtgtacaagctggagcaggtgtctgagaagggcaaggcttacaccaactacttcggacggtgcaatgtggccgagcacgaaaagctgatcctgctggcccagctgaagcccgagaaggatagcgacgaagccgtgacatatagcctgggaaagtttgggcagagggccctggatttctacagcattcatgtgaccaaggagtccacccaccccgtgaagcccctggcccagatcgccggaaacagatacgcctccggacctgtgggaaaggccctgagcgacgcatgtatgggcacaatcgcctccttcctgtctaagtaccaggacatcatcatcgaacaccagaaggtggtgaagggcaaccagaagagactggagagcctgcgggagctggccggcaaggaaaacctggaataccctagcgtgaccctgccacctcagcctcacaccaaggagggcgttgatgcctacaacgaagtgatcgcccgggtgcgaatgtgggtgaacctgaacctgtggcagaagctgaagctaagcagagatgatgccaagcctctgctgagactgaagggattcccttcctttcctctggtcgagagacaggccaacgaagtggactggtgggacatggtgtgtaacgtgaagaagctgatcaacgagaaaaaggaggatggcaaggtgttttggcagaatctggctggctacaagagacaggaagccctgagaccatacctgagcagcgaggaagatcggaagaagggaaagaaattcgctcggtaccagctgggcgacctgctgctgcacctggaaaagaagcacggcgaggactggggaaaggtgtacgacgaggcctgggagcggattgacaagaaagtggaaggcctgagcaagcacatcaagctggaagaggaacggagaagcgaggacgcccagagcaaggccgccctgaccgactggctgcgggctaaggccagcttcgtgatcgagggcctgaaggaggccgacaaggacgagttctgcagatgcgagctgaagctgcagaagtggtacggggacctgcggggaaagcccttcgccatcgaagccgagaacagcatcctggacatcagcggcttcagcaagcagtacaactgtgccttcatctggcagaaggacggcgtgaagaagctgaacctgtacctgatcatcaactacttcaagggcggcaagctgcggttcaagaagatcaaacctgaagccttcgaagccaacagattctacaccgtgatcaacaaaaagagcggcgagatcgtgcccatggaggtgaacttcaacttcgacgaccccaacctgatcatcctgcctctggcctttggcaagagacagggcagagaattcatctggaacgacctgctgtccctggaaaccggcagcctgaagctggccaacggaagagtgatcgagaagacactgtacaacagaagaacccggcaggatgagcctgccctgttcgtggccctgaccttcgagcggcgggaggtcctggactcctccaatatcaaaccaatgaacctgatcggcgtggcaagaggcgaaaacatccccgccgtgatcgccctgaccgaccccgagggctgcccactgagccggtttaaggatagcctgggaaacccaacccacatcctgagaatcggcgagagctataaggagaagcagcggaccatccaggccaagaaggaggtggagcagcggagagccggcggctacagccggaagtacgccagcaaagccaagaatctggcagacgatatggtgagaaacaccgctagagatctgctgtactacgccgtgacccaggatgccatgctgatcttcgccaacctgagccggggcttcggccggcagggcaagcggaccttcatggccgagagacagtacacacggatggaggactggctgaccgccaagctggcctacgagggcctgagcaagacctacctgtccaagacactggcccagtacacctccaagacatgcagcaactgtgggtttaccatcaccagcgccgactacgacagggtgctggagaagctgaagaagacagcaacaggctggatgaccacaattaacggcaaggagctgaaggtggagggccagattacctactacaacagatacaagagacagaacgtagtcaaggacctgtccgtcgagctggatagactgagcgaagaatctgtgaacaacgacatctcctcctggacaaagggcagaagcggagaagctctgagcctcctgaagaaaagattctcccatagacccgtgcaggagaagttcgtgtgcctgaactgcggcttcgagacacacgcagccgagcaagccgccctgaacatcgccagatcctggctgttcctgcggagccaggagtacaagaaataccagacaaacaagacaaccggcaacaccgataagagagccttcgtcgagacctggcagtccttttaccggaagaagcttaaggaggtgtggaaacctgccgtgcggtctggcggatctggcggaggctccaccagccccaagaaaaagagaaaagtctaagctgccttctgcggggcttgccttctggccatgcccttcttctctcccttgcacctgtacctcttggtctttgaataaagcctgagtaggaaggctagcaaaaaaaaaaaaaaaaaaaaaaaaaaaaaaaaaaaaaaaaaaaaaaaaaaaaaaaaaaaaaaaaaaaaaaaaaaaaaaaa

SEQ ID NO: 12955 - RNA, 5785 nt, synthetic construct
  source 1..5785: mol_type = other RNA
aggaaataagagagaaaagaagagtaagaagaaatataagagccaccatggcccctaagaagaagcgtaaagtgagccggatggaacgcctcgtctacgaggtgcggcagaagtgcagaaacatcgaggacatctgcatctcctgcggatctctgaacgtgaccctggagcacccactgttcatcggcggcatgtgccagaactgtaaaaactgttttctggagtgtgcctatcaatacgacgatgacggctaccagagctactgcaccatctgttgcggcggaagagaggtgctgatgtgtggaaataacaactgctgccggtgcttctgcgtggaatgcgtggacctgctggtgggccccggcgccgcccaggccgctattaaggaagatccttggaactgctacatgtgcggccacaagggcacatacggcctgctgagacggagagaggactggcctagcagactgcagatgttcttcgccaataaccacgaccaggagttcgacccccctaaggtgtaccctcccgtccccgccgagaagagaaagcccatccgggtcctgagcctgttcgatggcatcgccaccggtctgctggtgctgaaggacctgggcatccaggtggataggtacattgcctccgaggtgtgcgaggactccatcaccgtgggaatggtgcgtcatcagggcaagatcatgtacgtgggcgacgtgcggagcgtgacacagaagcatatccaggagtggggccctttcgacctggtgatcggcggcagcccttgcaatgacctgagcatcgtgaacccagcccggaagggcctgtacgagggaaccggcagactgttcttcgagttttacagactgctgcacgacgcccggcctaaggaaggcgacgaccggcccttcttttggctgttcgagaatgtggtggccatgggagtcagcgacaagcgggatattagccggttcctggagagcaaccccgtgatgatcgatgccaaggaagtgagcgccgcccaccgggccagatacttctggggcaatctgcctggcatgaacagacccctggccagcaccgtgaacgacaagctggagctgcaggagtgcctggagcacggccggatcgccaagttcagcaaggtgagaaccatcaccacccgaagcaacagcatcaaacaaggcaaggaccagcactttcctgtgttcatgaacgagaaggaggacatcctgtggtgtaccgagatggagagagtgttcgggttcccagtccactacacagatgtcagcaacatgtctagactggccagacagagactgctgggaagaagctggtccgtccctgtgatcagacacctgttcgcccctctgaaggagtacttcgcctgcgtgagcagcggcaacagcaacgccaacagccggggccccagcttctctagcggcctggtgccactgtccctgagagggagccacatgggccccatggagatctacaaaaccgtgagcgcctggaagcggcagcctgtgcgcgtgctgagcctgtttcggaatatcgataaagtcctgaaaagcctgggattcctggagagcggctctggctccggcggtggcaccctgaagtacgtggaggatgtgacaaacgtggtcagacgggatgtggagaagtggggccccttcgatctggtgtacggcagcacccaacccctgggcagctcttgtgaccggtgccctggctggtacatgtttcagttccaccggatcctgcagtacgccctgccgagacaggagtcccagcggccattcttttggattttcatggacaacttgctgctgaccgaggatgaccaggaaactaccactcggttcctgcagaccgaagccgtgaccctgcaggacgtgagaggccgggactaccagaacgccatgcgggtgtggtccaacatccctggactgaaaagcaagcacgcacctctgacccctaaagaagaggagtacctgcaggcccaggtgcggagcagaagcaagctggacgcccctaaggtggatctgctggtgaagaattgcctcctgcccctgagagagtacttcaagtatttcagccagaatagtctgcccctgggaggcagcggcggcggcttccaggaggccgtgaccttcaaggacgtggccgtggtgttcagcgaggaggagctgggcctgctgggccccgcccagaggaagctgtacagggacgtgatgctggagaacttcaggaacctggtgagcgtgggccacagcagcagcaagcccgacgtgatcagccagctggagagggaggagaagctgtgcaccaaggagttccacacccagggcggcggcaggaaccagaaggagatggagggcggcccaagcagcggcgcccctcctcccagcggcggcagcccagccggctccccaacctctaccgaggagggcacctctgagtccgccacccccgagagcggccctggcacctccaccgagcccagcgagggcagcgcacccggcagccctgccggcagccccacctccacagaggagggaaccagcaccgagcccagcgaaggcagcgccccaggcaccagcaccgagcctagtgagcaggagattaaacggatcaacaagatcagaagaagacttgtgaaagacagcaacaccaagaaggccggcaagacaggccccatgaaaaccctgctggttagagtgatgacacccgatctgagagagcggctggaaaacctgagaaagaagcctgaaaatatcccccagcccatcagcaatacatctagagccaacctgaataagctgctgaccgattacaccgaaatgaagaaggcgatcctgcatgtgtactgggaagagttccagaaggaccctgtgggcctgatgagccgggtggcccagcctgccagcaagaagatcgatcagaacaagctgaaacctgagatggacgagaagggcaacctgaccaccgccggctttgcctgctctcagtgtggccagcccctgttcgtgtacaagctggagcaggtgtctgagaagggcaaggcttacaccaactacttcggacggtgcaatgtggccgagcacgaaaagctgatcctgctggcccagctgaagcccgagaaggatagcgacgaagccgtgacatatagcctgggaaagtttgggcagagggccctggatttctacagcattcatgtgaccaaggagtccacccaccccgtgaagcccctggcccagatcgccggaaacagatacgcctccggacctgtgggaaaggccctgagcgacgcatgtatgggcacaatcgcctccttcctgtctaagtaccaggacatcatcatcgaacaccagaaggtggtgaagggcaaccagaagagactggagagcctgcgggagctggccggcaaggaaaacctggaataccctagcgtgaccctgccacctcagcctcacaccaaggagggcgttgatgcctacaacgaagtgatcgcccgggtgcgaatgtgggtgaacctgaacctgtggcagaagctgaagctaagcagagatgatgccaagcctctgctgagactgaagggattcccttcctttcctctggtcgagagacaggccaacgaagtggactggtgggacatggtgtgtaacgtgaagaagctgatcaacgagaaaaaggaggatggcaaggtgttttggcagaatctggctggctacaagagacaggaagccctgagaccatacctgagcagcgaggaagatcggaagaagggaaagaaattcgctcggtaccagctgggcgacctgctgctgcacctggaaaagaagcacggcgaggactggggaaaggtgtacgacgaggcctgggagcggattgacaagaaagtggaaggcctgagcaagcacatcaagctggaagaggaacggagaagcgaggacgcccagagcaaggccgccctgaccgactggctgcgggctaaggccagcttcgtgatcgagggcctgaaggaggccgacaaggacgagttctgcagatgcgagctgaagctgcagaagtggtacggggacctgcggggaaagcccttcgccatcgaagccgagaacagcatcctggacatcagcggcttcagcaagcagtacaactgtgccttcatctggcagaaggacggcgtgaagaagctgaacctgtacctgatcatcaactacttcaagggcggcaagctgcggttcaagaagatcaaacctgaagccttcgaagccaacagattctacaccgtgatcaacaaaaagagcggcgagatcgtgcccatggaggtgaacttcaacttcgacgaccccaacctgatcatcctgcctctggcctttggcaagagacagggcagagaattcatctggaacgacctgctgtccctggaaaccggcagcctgaagctggccaacggaagagtgatcgagaagacactgtacaacagaagaacccggcaggatgagcctgccctgttcgtggccctgaccttcgagcggcgggaggtcctggactcctccaatatcaaaccaatgaacctgatcggcgtggcaagaggcgaaaacatccccgccgtgatcgccctgaccgaccccgagggctgcccactgagccggtttaaggatagcctgggaaacccaacccacatcctgagaatcggcgagagctataaggagaagcagcggaccatccaggccaagaaggaggtggagcagcggagagccggcggctacagccggaagtacgccagcaaagccaagaatctggcagacgatatggtgagaaacaccgctagagatctgctgtactacgccgtgacccaggatgccatgctgatcttcgccaacctgagccggggcttcggccggcagggcaagcggaccttcatggccgagagacagtacacacggatggaggactggctgaccgccaagctggcctacgagggcctgagcaagacctacctgtccaagacactggcccagtacacctccaagacatgcagcaactgtgggtttaccatcaccagcgccgactacgacagggtgctggagaagctgaagaagacagcaacaggctggatgaccacaattaacggcaaggagctgaaggtggagggccagattacctactacaacagatacaagagacagaacgtagtcaaggacctgtccgtcgagctggatagactgagcgaagaatctgtgaacaacgacatctcctcctggacaaagggcagaagcggagaagctctgagcctcctgaagaaaagattctcccatagacccgtgcaggagaagttcgtgtgcctgaactgcggcttcgagacacacgcagccgagcaagccgccctgaacatcgccagatcctggctgttcctgcggagccaggagtacaagaaataccagacaaacaagacaaccggcaacaccgataagagagccttcgtcgagacctggcagtccttttaccggaagaagcttaaggaggtgtggaaacctgccgtgcggtctggcggatctggcggaggctccaccagccccaagaaaaagagaaaagtctaagctgccttctgcggggcttgccttctggccatgcccttcttctctcccttgcacctgtacctcttggtctttgaataaagcctgagtaggaaggctagcaaaaaaaaaaaaaaaaaaaaaaaaaaaaaaaaaaaaaaaaaaaaaaaaaaaaaaaaaaaaaaaaaaaaaaaaaaaaaaaa

SEQ ID NO: 12956 - RNA, 5785 nt, synthetic construct
  source 1..5785: mol_type = other RNA
aggaaataagagagaaaagaagagtaagaagaaatataagagccaccatggcccctaagaagaagcgtaaagtgagccggatggaacgcctcgtctacgaggtgcggcagaagtgcagaaacatcgaggacatctgcatctcctgcggatctctgaacgtgaccctggagcacccactgttcatcggcggcatgtgccagaactgtaaaaactgttttctggagtgtgcctatcaatacgacgatgacggctaccagagctactgcaccatctgttgcggcggaagagaggtgctgatgtgtggaaataacaactgctgccggtgcttctgcgtggaatgcgtggacctgctggtgggccccggcgccgcccaggccgctattaaggaagatccttggaactgctacatgtgcggccacaagggcacatacggcctgctgagacggagagaggactggcctagcagactgcagatgttcttcgccaataaccacgaccaggagttcgacccccctaaggtgtaccctcccgtccccgccgagaagagaaagcccatccgggtcctgagcctgttcgatggcatcgccaccggtctgctggtgctgaaggacctgggcatccaggtggataggtacattgcctccgaggtgtgcgaggactccatcaccgtgggaatggtgcgtcatcagggcaagatcatgtacgtgggcgacgtgcggagcgtgacacagaagcatatccaggagtggggccctttcgacctggtgatcggcggcagcccttgcaatgacctgagcatcgtgaacccagcccggaagggcctgtacgagggaaccggcagactgttcttcgagttttacagactgctgcacgacgcccggcctaaggaaggcgacgaccggcccttcttttggctgttcgagaatgtggtggccatgggagtcagcgacaagcgggatattagccggttcctggagagcaaccccgtgatgatcgatgccaaggaagtgagcgccgcccaccgggccagatacttctggggcaatctgcctggcatgaacagacccctggccagcaccgtgaacgacaagctggagctgcaggagtgcctggagcacggccggatcgccaagttcagcaaggtgagaaccatcaccacccgaagcaacagcatcaaacaaggcaaggaccagcactttcctgtgttcatgaacgagaaggaggacatcctgtggtgtaccgagatggagagagtgttcgggttcccagtccactacacagatgtcagcaacatgtctagactggccagacagagactgctgggaagaagctggtccgtccctgtgatcagacacctgttcgcccctctgaaggagtacttcgcctgcgtgagcagcggcaacagcaacgccaacagccggggccccagcttctctagcggcctggtgccactgtccctgagagggagccacatgggccccatggagatctacaaaaccgtgagcgcctggaagcggcagcctgtgcgcgtgctgagcctgtttcggaatatcgataaagtcctgaaaagcctgggattcctggagagcggctctggctccggcggtggcaccctgaagtacgtggaggatgtgacaaacgtggtcagacgggatgtggagaagtggggccccttcgatctggtgtacggcagcacccaacccctgggcagctcttgtgaccggtgccctggctggtacatgtttcagttccaccggatcctgcagtacgccctgccgagacaggagtcccagcggccattcttttggattttcatggacaacttgctgctgaccgaggatgaccaggaaactaccactcggttcctgcagaccgaagccgtgaccctgcaggacgtgagaggccgggactaccagaacgccatgcgggtgtggtccaacatccctggactgaaaagcaagcacgcacctctgacccctaaagaagaggagtacctgcaggcccaggtgcggagcagaagcaagctggacgcccctaaggtggatctgctggtgaagaattgcctcctgcccctgagagagtacttcaagtatttcagccagaatagtctgcccctgggaggcagcggcggcggcatgatcaagttccagatggtgaccttcaaggacgtggccgtggtgttcaccgaggaggagctgggcctgctggacagcgtgcagaggaagctgtacagggacgtgatgctggagaacttcaggaacctgctgctggtggcccaccagcccttcaagcccgacctgatcagccagctggagagggaggagaagctgctgatggtggagaccgagacccccggcgacggctgcagcggcaggaagggcggcccaagcagcggcgcccctcctcccagcggcggcagcccagccggctccccaacctctaccgaggagggcacctctgagtccgccacccccgagagcggccctggcacctccaccgagcccagcgagggcagcgcacccggcagccctgccggcagccccacctccacagaggagggaaccagcaccgagcccagcgaaggcagcgccccaggcaccagcaccgagcctagtgagcaggagattaaacggatcaacaagatcagaagaagacttgtgaaagacagcaacaccaagaaggccggcaagacaggccccatgaaaaccctgctggttagagtgatgacacccgatctgagagagcggctggaaaacctgagaaagaagcctgaaaatatcccccagcccatcagcaatacatctagagccaacctgaataagctgctgaccgattacaccgaaatgaagaaggcgatcctgcatgtgtactgggaagagttccagaaggaccctgtgggcctgatgagccgggtggcccagcctgccagcaagaagatcgatcagaacaagctgaaacctgagatggacgagaagggcaacctgaccaccgccggctttgcctgctctcagtgtggccagcccctgttcgtgtacaagctggagcaggtgtctgagaagggcaaggcttacaccaactacttcggacggtgcaatgtggccgagcacgaaaagctgatcctgctggcccagctgaagcccgagaaggatagcgacgaagccgtgacatatagcctgggaaagtttgggcagagggccctggatttctacagcattcatgtgaccaaggagtccacccaccccgtgaagcccctggcccagatcgccggaaacagatacgcctccggacctgtgggaaaggccctgagcgacgcatgtatgggcacaatcgcctccttcctgtctaagtaccaggacatcatcatcgaacaccagaaggtggtgaagggcaaccagaagagactggagagcctgcgggagctggccggcaaggaaaacctggaataccctagcgtgaccctgccacctcagcctcacaccaaggagggcgttgatgcctacaacgaagtgatcgcccgggtgcgaatgtgggtgaacctgaacctgtggcagaagctgaagctaagcagagatgatgccaagcctctgctgagactgaagggattcccttcctttcctctggtcgagagacaggccaacgaagtggactggtgggacatggtgtgtaacgtgaagaagctgatcaacgagaaaaaggaggatggcaaggtgttttggcagaatctggctggctacaagagacaggaagccctgagaccatacctgagcagcgaggaagatcggaagaagggaaagaaattcgctcggtaccagctgggcgacctgctgctgcacctggaaaagaagcacggcgaggactggggaaaggtgtacgacgaggcctgggagcggattgacaagaaagtggaaggcctgagcaagcacatcaagctggaagaggaacggagaagcgaggacgcccagagcaaggccgccctgaccgactggctgcgggctaaggccagcttcgtgatcgagggcctgaaggaggccgacaaggacgagttctgcagatgcgagctgaagctgcagaagtggtacggggacctgcggggaaagcccttcgccatcgaagccgagaacagcatcctggacatcagcggcttcagcaagcagtacaactgtgccttcatctggcagaaggacggcgtgaagaagctgaacctgtacctgatcatcaactacttcaagggcggcaagctgcggttcaagaagatcaaacctgaagccttcgaagccaacagattctacaccgtgatcaacaaaaagagcggcgagatcgtgcccatggaggtgaacttcaacttcgacgaccccaacctgatcatcctgcctctggcctttggcaagagacagggcagagaattcatctggaacgacctgctgtccctggaaaccggcagcctgaagctggccaacggaagagtgatcgagaagacactgtacaacagaagaacccggcaggatgagcctgccctgttcgtggccctgaccttcgagcggcgggaggtcctggactcctccaatatcaaaccaatgaacctgatcggcgtggcaagaggcgaaaacatccccgccgtgatcgccctgaccgaccccgagggctgcccactgagccggtttaaggatagcctgggaaacccaacccacatcctgagaatcggcgagagctataaggagaagcagcggaccatccaggccaagaaggaggtggagcagcggagagccggcggctacagccggaagtacgccagcaaagccaagaatctggcagacgatatggtgagaaacaccgctagagatctgctgtactacgccgtgacccaggatgccatgctgatcttcgccaacctgagccggggcttcggccggcagggcaagcggaccttcatggccgagagacagtacacacggatggaggactggctgaccgccaagctggcctacgagggcctgagcaagacctacctgtccaagacactggcccagtacacctccaagacatgcagcaactgtgggtttaccatcaccagcgccgactacgacagggtgctggagaagctgaagaagacagcaacaggctggatgaccacaattaacggcaaggagctgaaggtggagggccagattacctactacaacagatacaagagacagaacgtagtcaaggacctgtccgtcgagctggatagactgagcgaagaatctgtgaacaacgacatctcctcctggacaaagggcagaagcggagaagctctgagcctcctgaagaaaagattctcccatagacccgtgcaggagaagttcgtgtgcctgaactgcggcttcgagacacacgcagccgagcaagccgccctgaacatcgccagatcctggctgttcctgcggagccaggagtacaagaaataccagacaaacaagacaaccggcaacaccgataagagagccttcgtcgagacctggcagtccttttaccggaagaagcttaaggaggtgtggaaacctgccgtgcggtctggcggatctggcggaggctccaccagccccaagaaaaagagaaaagtctaagctgccttctgcggggcttgccttctggccatgcccttcttctctcccttgcacctgtacctcttggtctttgaataaagcctgagtaggaaggctagcaaaaaaaaaaaaaaaaaaaaaaaaaaaaaaaaaaaaaaaaaaaaaaaaaaaaaaaaaaaaaaaaaaaaaaaaaaaaaaaa

SEQ ID NO: 12957 - RNA, 5785 nt, synthetic construct
  source 1..5785: mol_type = other RNA
aggaaataagagagaaaagaagagtaagaagaaatataagagccaccatggcccctaagaagaagcgtaaagtgagccggatggaacgcctcgtctacgaggtgcggcagaagtgcagaaacatcgaggacatctgcatctcctgcggatctctgaacgtgaccctggagcacccactgttcatcggcggcatgtgccagaactgtaaaaactgttttctggagtgtgcctatcaatacgacgatgacggctaccagagctactgcaccatctgttgcggcggaagagaggtgctgatgtgtggaaataacaactgctgccggtgcttctgcgtggaatgcgtggacctgctggtgggccccggcgccgcccaggccgctattaaggaagatccttggaactgctacatgtgcggccacaagggcacatacggcctgctgagacggagagaggactggcctagcagactgcagatgttcttcgccaataaccacgaccaggagttcgacccccctaaggtgtaccctcccgtccccgccgagaagagaaagcccatccgggtcctgagcctgttcgatggcatcgccaccggtctgctggtgctgaaggacctgggcatccaggtggataggtacattgcctccgaggtgtgcgaggactccatcaccgtgggaatggtgcgtcatcagggcaagatcatgtacgtgggcgacgtgcggagcgtgacacagaagcatatccaggagtggggccctttcgacctggtgatcggcggcagcccttgcaatgacctgagcatcgtgaacccagcccggaagggcctgtacgagggaaccggcagactgttcttcgagttttacagactgctgcacgacgcccggcctaaggaaggcgacgaccggcccttcttttggctgttcgagaatgtggtggccatgggagtcagcgacaagcgggatattagccggttcctggagagcaaccccgtgatgatcgatgccaaggaagtgagcgccgcccaccgggccagatacttctggggcaatctgcctggcatgaacagacccctggccagcaccgtgaacgacaagctggagctgcaggagtgcctggagcacggccggatcgccaagttcagcaaggtgagaaccatcaccacccgaagcaacagcatcaaacaaggcaaggaccagcactttcctgtgttcatgaacgagaaggaggacatcctgtggtgtaccgagatggagagagtgttcgggttcccagtccactacacagatgtcagcaacatgtctagactggccagacagagactgctgggaagaagctggtccgtccctgtgatcagacacctgttcgcccctctgaaggagtacttcgcctgcgtgagcagcggcaacagcaacgccaacagccggggccccagcttctctagcggcctggtgccactgtccctgagagggagccacatgggccccatggagatctacaaaaccgtgagcgcctggaagcggcagcctgtgcgcgtgctgagcctgtttcggaatatcgataaagtcctgaaaagcctgggattcctggagagcggctctggctccggcggtggcaccctgaagtacgtggaggatgtgacaaacgtggtcagacgggatgtggagaagtggggccccttcgatctggtgtacggcagcacccaacccctgggcagctcttgtgaccggtgccctggctggtacatgtttcagttccaccggatcctgcagtacgccctgccgagacaggagtcccagcggccattcttttggattttcatggacaacttgctgctgaccgaggatgaccaggaaactaccactcggttcctgcagaccgaagccgtgaccctgcaggacgtgagaggccgggactaccagaacgccatgcgggtgtggtccaacatccctggactgaaaagcaagcacgcacctctgacccctaaagaagaggagtacctgcaggcccaggtgcggagcagaagcaagctggacgcccctaaggtggatctgctggtgaagaattgcctcctgcccctgagagagtacttcaagtatttcagccagaatagtctgcccctgggaggcagcggcggcggcagccagggcctgctgaccttcaaggacatcagcgtggacttcacccaggaggagtggggccagctggcccccgcccacaggaacctgtacagggaggtgatgctggagaactacggcaacctggtgagcgtggccggctaccagctgagcaagcccagcgtgatcagccagctggagaagggccaggagccctggatgaccgagaaggagggccccggcgacagcagcagcgacctgaagaacggcggcccaagcagcggcgcccctcctcccagcggcggcagcccagccggctccccaacctctaccgaggagggcacctctgagtccgccacccccgagagcggccctggcacctccaccgagcccagcgagggcagcgcacccggcagccctgccggcagccccacctccacagaggagggaaccagcaccgagcccagcgaaggcagcgccccaggcaccagcaccgagcctagtgagcaggagattaaacggatcaacaagatcagaagaagacttgtgaaagacagcaacaccaagaaggccggcaagacaggccccatgaaaaccctgctggttagagtgatgacacccgatctgagagagcggctggaaaacctgagaaagaagcctgaaaatatcccccagcccatcagcaatacatctagagccaacctgaataagctgctgaccgattacaccgaaatgaagaaggcgatcctgcatgtgtactgggaagagttccagaaggaccctgtgggcctgatgagccgggtggcccagcctgccagcaagaagatcgatcagaacaagctgaaacctgagatggacgagaagggcaacctgaccaccgccggctttgcctgctctcagtgtggccagcccctgttcgtgtacaagctggagcaggtgtctgagaagggcaaggcttacaccaactacttcggacggtgcaatgtggccgagcacgaaaagctgatcctgctggcccagctgaagcccgagaaggatagcgacgaagccgtgacatatagcctgggaaagtttgggcagagggccctggatttctacagcattcatgtgaccaaggagtccacccaccccgtgaagcccctggcccagatcgccggaaacagatacgcctccggacctgtgggaaaggccctgagcgacgcatgtatgggcacaatcgcctccttcctgtctaagtaccaggacatcatcatcgaacaccagaaggtggtgaagggcaaccagaagagactggagagcctgcgggagctggccggcaaggaaaacctggaataccctagcgtgaccctgccacctcagcctcacaccaaggagggcgttgatgcctacaacgaagtgatcgcccgggtgcgaatgtgggtgaacctgaacctgtggcagaagctgaagctaagcagagatgatgccaagcctctgctgagactgaagggattcccttcctttcctctggtcgagagacaggccaacgaagtggactggtgggacatggtgtgtaacgtgaagaagctgatcaacgagaaaaaggaggatggcaaggtgttttggcagaatctggctggctacaagagacaggaagccctgagaccatacctgagcagcgaggaagatcggaagaagggaaagaaattcgctcggtaccagctgggcgacctgctgctgcacctggaaaagaagcacggcgaggactggggaaaggtgtacgacgaggcctgggagcggattgacaagaaagtggaaggcctgagcaagcacatcaagctggaagaggaacggagaagcgaggacgcccagagcaaggccgccctgaccgactggctgcgggctaaggccagcttcgtgatcgagggcctgaaggaggccgacaaggacgagttctgcagatgcgagctgaagctgcagaagtggtacggggacctgcggggaaagcccttcgccatcgaagccgagaacagcatcctggacatcagcggcttcagcaagcagtacaactgtgccttcatctggcagaaggacggcgtgaagaagctgaacctgtacctgatcatcaactacttcaagggcggcaagctgcggttcaagaagatcaaacctgaagccttcgaagccaacagattctacaccgtgatcaacaaaaagagcggcgagatcgtgcccatggaggtgaacttcaacttcgacgaccccaacctgatcatcctgcctctggcctttggcaagagacagggcagagaattcatctggaacgacctgctgtccctggaaaccggcagcctgaagctggccaacggaagagtgatcgagaagacactgtacaacagaagaacccggcaggatgagcctgccctgttcgtggccctgaccttcgagcggcgggaggtcctggactcctccaatatcaaaccaatgaacctgatcggcgtggcaagaggcgaaaacatccccgccgtgatcgccctgaccgaccccgagggctgcccactgagccggtttaaggatagcctgggaaacccaacccacatcctgagaatcggcgagagctataaggagaagcagcggaccatccaggccaagaaggaggtggagcagcggagagccggcggctacagccggaagtacgccagcaaagccaagaatctggcagacgatatggtgagaaacaccgctagagatctgctgtactacgccgtgacccaggatgccatgctgatcttcgccaacctgagccggggcttcggccggcagggcaagcggaccttcatggccgagagacagtacacacggatggaggactggctgaccgccaagctggcctacgagggcctgagcaagacctacctgtccaagacactggcccagtacacctccaagacatgcagcaactgtgggtttaccatcaccagcgccgactacgacagggtgctggagaagctgaagaagacagcaacaggctggatgaccacaattaacggcaaggagctgaaggtggagggccagattacctactacaacagatacaagagacagaacgtagtcaaggacctgtccgtcgagctggatagactgagcgaagaatctgtgaacaacgacatctcctcctggacaaagggcagaagcggagaagctctgagcctcctgaagaaaagattctcccatagacccgtgcaggagaagttcgtgtgcctgaactgcggcttcgagacacacgcagccgagcaagccgccctgaacatcgccagatcctggctgttcctgcggagccaggagtacaagaaataccagacaaacaagacaaccggcaacaccgataagagagccttcgtcgagacctggcagtccttttaccggaagaagcttaaggaggtgtggaaacctgccgtgcggtctggcggatctggcggaggctccaccagccccaagaaaaagagaaaagtctaagctgccttctgcggggcttgccttctggccatgcccttcttctctcccttgcacctgtacctcttggtctttgaataaagcctgagtaggaaggctagcaaaaaaaaaaaaaaaaaaaaaaaaaaaaaaaaaaaaaaaaaaaaaaaaaaaaaaaaaaaaaaaaaaaaaaaaaaaaaaaa

SEQ ID NO: 12958 - RNA, 5785 nt, synthetic construct
  source 1..5785: mol_type = other RNA
aggaaataagagagaaaagaagagtaagaagaaatataagagccaccatggcccctaagaagaagcgtaaagtgagccggatggaacgcctcgtctacgaggtgcggcagaagtgcagaaacatcgaggacatctgcatctcctgcggatctctgaacgtgaccctggagcacccactgttcatcggcggcatgtgccagaactgtaaaaactgttttctggagtgtgcctatcaatacgacgatgacggctaccagagctactgcaccatctgttgcggcggaagagaggtgctgatgtgtggaaataacaactgctgccggtgcttctgcgtggaatgcgtggacctgctggtgggccccggcgccgcccaggccgctattaaggaagatccttggaactgctacatgtgcggccacaagggcacatacggcctgctgagacggagagaggactggcctagcagactgcagatgttcttcgccaataaccacgaccaggagttcgacccccctaaggtgtaccctcccgtccccgccgagaagagaaagcccatccgggtcctgagcctgttcgatggcatcgccaccggtctgctggtgctgaaggacctgggcatccaggtggataggtacattgcctccgaggtgtgcgaggactccatcaccgtgggaatggtgcgtcatcagggcaagatcatgtacgtgggcgacgtgcggagcgtgacacagaagcatatccaggagtggggccctttcgacctggtgatcggcggcagcccttgcaatgacctgagcatcgtgaacccagcccggaagggcctgtacgagggaaccggcagactgttcttcgagttttacagactgctgcacgacgcccggcctaaggaaggcgacgaccggcccttcttttggctgttcgagaatgtggtggccatgggagtcagcgacaagcgggatattagccggttcctggagagcaaccccgtgatgatcgatgccaaggaagtgagcgccgcccaccgggccagatacttctggggcaatctgcctggcatgaacagacccctggccagcaccgtgaacgacaagctggagctgcaggagtgcctggagcacggccggatcgccaagttcagcaaggtgagaaccatcaccacccgaagcaacagcatcaaacaaggcaaggaccagcactttcctgtgttcatgaacgagaaggaggacatcctgtggtgtaccgagatggagagagtgttcgggttcccagtccactacacagatgtcagcaacatgtctagactggccagacagagactgctgggaagaagctggtccgtccctgtgatcagacacctgttcgcccctctgaaggagtacttcgcctgcgtgagcagcggcaacagcaacgccaacagccggggccccagcttctctagcggcctggtgccactgtccctgagagggagccacatgggccccatggagatctacaaaaccgtgagcgcctggaagcggcagcctgtgcgcgtgctgagcctgtttcggaatatcgataaagtcctgaaaagcctgggattcctggagagcggctctggctccggcggtggcaccctgaagtacgtggaggatgtgacaaacgtggtcagacgggatgtggagaagtggggccccttcgatctggtgtacggcagcacccaacccctgggcagctcttgtgaccggtgccctggctggtacatgtttcagttccaccggatcctgcagtacgccctgccgagacaggagtcccagcggccattcttttggattttcatggacaacttgctgctgaccgaggatgaccaggaaactaccactcggttcctgcagaccgaagccgtgaccctgcaggacgtgagaggccgggactaccagaacgccatgcgggtgtggtccaacatccctggactgaaaagcaagcacgcacctctgacccctaaagaagaggagtacctgcaggcccaggtgcggagcagaagcaagctggacgcccctaaggtggatctgctggtgaagaattgcctcctgcccctgagagagtacttcaagtatttcagccagaatagtctgcccctgggaggcagcggcggcggcatgctgttccaggagctggtgaccttcaaggacgtggccgtggacttcacccaggaggagtggaagtgcctggcccccagccagaaggagctgtacagggaggtgatgctggagaactacaggaacctggtgagcctgggcagggccgtgagcaagcccgagctgatccaccagctggagaggggcgagaccccctggaggcccaagggcgacggctggaggaacagcctgaggcccggcgagggcggcccaagcagcggcgcccctcctcccagcggcggcagcccagccggctccccaacctctaccgaggagggcacctctgagtccgccacccccgagagcggccctggcacctccaccgagcccagcgagggcagcgcacccggcagccctgccggcagccccacctccacagaggagggaaccagcaccgagcccagcgaaggcagcgccccaggcaccagcaccgagcctagtgagcaggagattaaacggatcaacaagatcagaagaagacttgtgaaagacagcaacaccaagaaggccggcaagacaggccccatgaaaaccctgctggttagagtgatgacacccgatctgagagagcggctggaaaacctgagaaagaagcctgaaaatatcccccagcccatcagcaatacatctagagccaacctgaataagctgctgaccgattacaccgaaatgaagaaggcgatcctgcatgtgtactgggaagagttccagaaggaccctgtgggcctgatgagccgggtggcccagcctgccagcaagaagatcgatcagaacaagctgaaacctgagatggacgagaagggcaacctgaccaccgccggctttgcctgctctcagtgtggccagcccctgttcgtgtacaagctggagcaggtgtctgagaagggcaaggcttacaccaactacttcggacggtgcaatgtggccgagcacgaaaagctgatcctgctggcccagctgaagcccgagaaggatagcgacgaagccgtgacatatagcctgggaaagtttgggcagagggccctggatttctacagcattcatgtgaccaaggagtccacccaccccgtgaagcccctggcccagatcgccggaaacagatacgcctccggacctgtgggaaaggccctgagcgacgcatgtatgggcacaatcgcctccttcctgtctaagtaccaggacatcatcatcgaacaccagaaggtggtgaagggcaaccagaagagactggagagcctgcgggagctggccggcaaggaaaacctggaataccctagcgtgaccctgccacctcagcctcacaccaaggagggcgttgatgcctacaacgaagtgatcgcccgggtgcgaatgtgggtgaacctgaacctgtggcagaagctgaagctaagcagagatgatgccaagcctctgctgagactgaagggattcccttcctttcctctggtcgagagacaggccaacgaagtggactggtgggacatggtgtgtaacgtgaagaagctgatcaacgagaaaaaggaggatggcaaggtgttttggcagaatctggctggctacaagagacaggaagccctgagaccatacctgagcagcgaggaagatcggaagaagggaaagaaattcgctcggtaccagctgggcgacctgctgctgcacctggaaaagaagcacggcgaggactggggaaaggtgtacgacgaggcctgggagcggattgacaagaaagtggaaggcctgagcaagcacatcaagctggaagaggaacggagaagcgaggacgcccagagcaaggccgccctgaccgactggctgcgggctaaggccagcttcgtgatcgagggcctgaaggaggccgacaaggacgagttctgcagatgcgagctgaagctgcagaagtggtacggggacctgcggggaaagcccttcgccatcgaagccgagaacagcatcctggacatcagcggcttcagcaagcagtacaactgtgccttcatctggcagaaggacggcgtgaagaagctgaacctgtacctgatcatcaactacttcaagggcggcaagctgcggttcaagaagatcaaacctgaagccttcgaagccaacagattctacaccgtgatcaacaaaaagagcggcgagatcgtgcccatggaggtgaacttcaacttcgacgaccccaacctgatcatcctgcctctggcctttggcaagagacagggcagagaattcatctggaacgacctgctgtccctggaaaccggcagcctgaagctggccaacggaagagtgatcgagaagacactgtacaacagaagaacccggcaggatgagcctgccctgttcgtggccctgaccttcgagcggcgggaggtcctggactcctccaatatcaaaccaatgaacctgatcggcgtggcaagaggcgaaaacatccccgccgtgatcgccctgaccgaccccgagggctgcccactgagccggtttaaggatagcctgggaaacccaacccacatcctgagaatcggcgagagctataaggagaagcagcggaccatccaggccaagaaggaggtggagcagcggagagccggcggctacagccggaagtacgccagcaaagccaagaatctggcagacgatatggtgagaaacaccgctagagatctgctgtactacgccgtgacccaggatgccatgctgatcttcgccaacctgagccggggcttcggccggcagggcaagcggaccttcatggccgagagacagtacacacggatggaggactggctgaccgccaagctggcctacgagggcctgagcaagacctacctgtccaagacactggcccagtacacctccaagacatgcagcaactgtgggtttaccatcaccagcgccgactacgacagggtgctggagaagctgaagaagacagcaacaggctggatgaccacaattaacggcaaggagctgaaggtggagggccagattacctactacaacagatacaagagacagaacgtagtcaaggacctgtccgtcgagctggatagactgagcgaagaatctgtgaacaacgacatctcctcctggacaaagggcagaagcggagaagctctgagcctcctgaagaaaagattctcccatagacccgtgcaggagaagttcgtgtgcctgaactgcggcttcgagacacacgcagccgagcaagccgccctgaacatcgccagatcctggctgttcctgcggagccaggagtacaagaaataccagacaaacaagacaaccggcaacaccgataagagagccttcgtcgagacctggcagtccttttaccggaagaagcttaaggaggtgtggaaacctgccgtgcggtctggcggatctggcggaggctccaccagccccaagaaaaagagaaaagtctaagctgccttctgcggggcttgccttctggccatgcccttcttctctcccttgcacctgtacctcttggtctttgaataaagcctgagtaggaaggctagcaaaaaaaaaaaaaaaaaaaaaaaaaaaaaaaaaaaaaaaaaaaaaaaaaaaaaaaaaaaaaaaaaaaaaaaaaaaaaaaa

SEQ ID NO: 12959 - RNA, 5785 nt, synthetic construct
  source 1..5785: mol_type = other RNA
aggaaataagagagaaaagaagagtaagaagaaatataagagccaccatggcccctaagaagaagcgtaaagtgagccggatggaacgcctcgtctacgaggtgcggcagaagtgcagaaacatcgaggacatctgcatctcctgcggatctctgaacgtgaccctggagcacccactgttcatcggcggcatgtgccagaactgtaaaaactgttttctggagtgtgcctatcaatacgacgatgacggctaccagagctactgcaccatctgttgcggcggaagagaggtgctgatgtgtggaaataacaactgctgccggtgcttctgcgtggaatgcgtggacctgctggtgggccccggcgccgcccaggccgctattaaggaagatccttggaactgctacatgtgcggccacaagggcacatacggcctgctgagacggagagaggactggcctagcagactgcagatgttcttcgccaataaccacgaccaggagttcgacccccctaaggtgtaccctcccgtccccgccgagaagagaaagcccatccgggtcctgagcctgttcgatggcatcgccaccggtctgctggtgctgaaggacctgggcatccaggtggataggtacattgcctccgaggtgtgcgaggactccatcaccgtgggaatggtgcgtcatcagggcaagatcatgtacgtgggcgacgtgcggagcgtgacacagaagcatatccaggagtggggccctttcgacctggtgatcggcggcagcccttgcaatgacctgagcatcgtgaacccagcccggaagggcctgtacgagggaaccggcagactgttcttcgagttttacagactgctgcacgacgcccggcctaaggaaggcgacgaccggcccttcttttggctgttcgagaatgtggtggccatgggagtcagcgacaagcgggatattagccggttcctggagagcaaccccgtgatgatcgatgccaaggaagtgagcgccgcccaccgggccagatacttctggggcaatctgcctggcatgaacagacccctggccagcaccgtgaacgacaagctggagctgcaggagtgcctggagcacggccggatcgccaagttcagcaaggtgagaaccatcaccacccgaagcaacagcatcaaacaaggcaaggaccagcactttcctgtgttcatgaacgagaaggaggacatcctgtggtgtaccgagatggagagagtgttcgggttcccagtccactacacagatgtcagcaacatgtctagactggccagacagagactgctgggaagaagctggtccgtccctgtgatcagacacctgttcgcccctctgaaggagtacttcgcctgcgtgagcagcggcaacagcaacgccaacagccggggccccagcttctctagcggcctggtgccactgtccctgagagggagccacatgggccccatggagatctacaaaaccgtgagcgcctggaagcggcagcctgtgcgcgtgctgagcctgtttcggaatatcgataaagtcctgaaaagcctgggattcctggagagcggctctggctccggcggtggcaccctgaagtacgtggaggatgtgacaaacgtggtcagacgggatgtggagaagtggggccccttcgatctggtgtacggcagcacccaacccctgggcagctcttgtgaccggtgccctggctggtacatgtttcagttccaccggatcctgcagtacgccctgccgagacaggagtcccagcggccattcttttggattttcatggacaacttgctgctgaccgaggatgaccaggaaactaccactcggttcctgcagaccgaagccgtgaccctgcaggacgtgagaggccgggactaccagaacgccatgcgggtgtggtccaacatccctggactgaaaagcaagcacgcacctctgacccctaaagaagaggagtacctgcaggcccaggtgcggagcagaagcaagctggacgcccctaaggtggatctgctggtgaagaattgcctcctgcccctgagagagtacttcaagtatttcagccagaatagtctgcccctgggaggcagcggcggcggcatggagcccagggacgccttcgaggacgtggccgtgtacttcaccagggaggagtgggccctgctggacgacggcgacaagggcctgtacagggaccagatgctgaggaactaccaggccctggtgagcctgggctacaggggccccacccccgacctgatctgctgcatccagaggggcaaggtggagctgtgggtgagggacggcgaggaccacggcgagatcagcggcagcgaggacctgggcggcccaagcagcggcgcccctcctcccagcggcggcagcccagccggctccccaacctctaccgaggagggcacctctgagtccgccacccccgagagcggccctggcacctccaccgagcccagcgagggcagcgcacccggcagccctgccggcagccccacctccacagaggagggaaccagcaccgagcccagcgaaggcagcgccccaggcaccagcaccgagcctagtgagcaggagattaaacggatcaacaagatcagaagaagacttgtgaaagacagcaacaccaagaaggccggcaagacaggccccatgaaaaccctgctggttagagtgatgacacccgatctgagagagcggctggaaaacctgagaaagaagcctgaaaatatcccccagcccatcagcaatacatctagagccaacctgaataagctgctgaccgattacaccgaaatgaagaaggcgatcctgcatgtgtactgggaagagttccagaaggaccctgtgggcctgatgagccgggtggcccagcctgccagcaagaagatcgatcagaacaagctgaaacctgagatggacgagaagggcaacctgaccaccgccggctttgcctgctctcagtgtggccagcccctgttcgtgtacaagctggagcaggtgtctgagaagggcaaggcttacaccaactacttcggacggtgcaatgtggccgagcacgaaaagctgatcctgctggcccagctgaagcccgagaaggatagcgacgaagccgtgacatatagcctgggaaagtttgggcagagggccctggatttctacagcattcatgtgaccaaggagtccacccaccccgtgaagcccctggcccagatcgccggaaacagatacgcctccggacctgtgggaaaggccctgagcgacgcatgtatgggcacaatcgcctccttcctgtctaagtaccaggacatcatcatcgaacaccagaaggtggtgaagggcaaccagaagagactggagagcctgcgggagctggccggcaaggaaaacctggaataccctagcgtgaccctgccacctcagcctcacaccaaggagggcgttgatgcctacaacgaagtgatcgcccgggtgcgaatgtgggtgaacctgaacctgtggcagaagctgaagctaagcagagatgatgccaagcctctgctgagactgaagggattcccttcctttcctctggtcgagagacaggccaacgaagtggactggtgggacatggtgtgtaacgtgaagaagctgatcaacgagaaaaaggaggatggcaaggtgttttggcagaatctggctggctacaagagacaggaagccctgagaccatacctgagcagcgaggaagatcggaagaagggaaagaaattcgctcggtaccagctgggcgacctgctgctgcacctggaaaagaagcacggcgaggactggggaaaggtgtacgacgaggcctgggagcggattgacaagaaagtggaaggcctgagcaagcacatcaagctggaagaggaacggagaagcgaggacgcccagagcaaggccgccctgaccgactggctgcgggctaaggccagcttcgtgatcgagggcctgaaggaggccgacaaggacgagttctgcagatgcgagctgaagctgcagaagtggtacggggacctgcggggaaagcccttcgccatcgaagccgagaacagcatcctggacatcagcggcttcagcaagcagtacaactgtgccttcatctggcagaaggacggcgtgaagaagctgaacctgtacctgatcatcaactacttcaagggcggcaagctgcggttcaagaagatcaaacctgaagccttcgaagccaacagattctacaccgtgatcaacaaaaagagcggcgagatcgtgcccatggaggtgaacttcaacttcgacgaccccaacctgatcatcctgcctctggcctttggcaagagacagggcagagaattcatctggaacgacctgctgtccctggaaaccggcagcctgaagctggccaacggaagagtgatcgagaagacactgtacaacagaagaacccggcaggatgagcctgccctgttcgtggccctgaccttcgagcggcgggaggtcctggactcctccaatatcaaaccaatgaacctgatcggcgtggcaagaggcgaaaacatccccgccgtgatcgccctgaccgaccccgagggctgcccactgagccggtttaaggatagcctgggaaacccaacccacatcctgagaatcggcgagagctataaggagaagcagcggaccatccaggccaagaaggaggtggagcagcggagagccggcggctacagccggaagtacgccagcaaagccaagaatctggcagacgatatggtgagaaacaccgctagagatctgctgtactacgccgtgacccaggatgccatgctgatcttcgccaacctgagccggggcttcggccggcagggcaagcggaccttcatggccgagagacagtacacacggatggaggactggctgaccgccaagctggcctacgagggcctgagcaagacctacctgtccaagacactggcccagtacacctccaagacatgcagcaactgtgggtttaccatcaccagcgccgactacgacagggtgctggagaagctgaagaagacagcaacaggctggatgaccacaattaacggcaaggagctgaaggtggagggccagattacctactacaacagatacaagagacagaacgtagtcaaggacctgtccgtcgagctggatagactgagcgaagaatctgtgaacaacgacatctcctcctggacaaagggcagaagcggagaagctctgagcctcctgaagaaaagattctcccatagacccgtgcaggagaagttcgtgtgcctgaactgcggcttcgagacacacgcagccgagcaagccgccctgaacatcgccagatcctggctgttcctgcggagccaggagtacaagaaataccagacaaacaagacaaccggcaacaccgataagagagccttcgtcgagacctggcagtccttttaccggaagaagcttaaggaggtgtggaaacctgccgtgcggtctggcggatctggcggaggctccaccagccccaagaaaaagagaaaagtctaagctgccttctgcggggcttgccttctggccatgcccttcttctctcccttgcacctgtacctcttggtctttgaataaagcctgagtaggaaggctagcaaaaaaaaaaaaaaaaaaaaaaaaaaaaaaaaaaaaaaaaaaaaaaaaaaaaaaaaaaaaaaaaaaaaaaaaaaaaaaaa

SEQ ID NO: 12960 - RNA, 5785 nt, synthetic construct
  source 1..5785: mol_type = other RNA
aggaaataagagagaaaagaagagtaagaagaaatataagagccaccatggcccctaagaagaagcgtaaagtgagccggatggaacgcctcgtctacgaggtgcggcagaagtgcagaaacatcgaggacatctgcatctcctgcggatctctgaacgtgaccctggagcacccactgttcatcggcggcatgtgccagaactgtaaaaactgttttctggagtgtgcctatcaatacgacgatgacggctaccagagctactgcaccatctgttgcggcggaagagaggtgctgatgtgtggaaataacaactgctgccggtgcttctgcgtggaatgcgtggacctgctggtgggccccggcgccgcccaggccgctattaaggaagatccttggaactgctacatgtgcggccacaagggcacatacggcctgctgagacggagagaggactggcctagcagactgcagatgttcttcgccaataaccacgaccaggagttcgacccccctaaggtgtaccctcccgtccccgccgagaagagaaagcccatccgggtcctgagcctgttcgatggcatcgccaccggtctgctggtgctgaaggacctgggcatccaggtggataggtacattgcctccgaggtgtgcgaggactccatcaccgtgggaatggtgcgtcatcagggcaagatcatgtacgtgggcgacgtgcggagcgtgacacagaagcatatccaggagtggggccctttcgacctggtgatcggcggcagcccttgcaatgacctgagcatcgtgaacccagcccggaagggcctgtacgagggaaccggcagactgttcttcgagttttacagactgctgcacgacgcccggcctaaggaaggcgacgaccggcccttcttttggctgttcgagaatgtggtggccatgggagtcagcgacaagcgggatattagccggttcctggagagcaaccccgtgatgatcgatgccaaggaagtgagcgccgcccaccgggccagatacttctggggcaatctgcctggcatgaacagacccctggccagcaccgtgaacgacaagctggagctgcaggagtgcctggagcacggccggatcgccaagttcagcaaggtgagaaccatcaccacccgaagcaacagcatcaaacaaggcaaggaccagcactttcctgtgttcatgaacgagaaggaggacatcctgtggtgtaccgagatggagagagtgttcgggttcccagtccactacacagatgtcagcaacatgtctagactggccagacagagactgctgggaagaagctggtccgtccctgtgatcagacacctgttcgcccctctgaaggagtacttcgcctgcgtgagcagcggcaacagcaacgccaacagccggggccccagcttctctagcggcctggtgccactgtccctgagagggagccacatgggccccatggagatctacaaaaccgtgagcgcctggaagcggcagcctgtgcgcgtgctgagcctgtttcggaatatcgataaagtcctgaaaagcctgggattcctggagagcggctctggctccggcggtggcaccctgaagtacgtggaggatgtgacaaacgtggtcagacgggatgtggagaagtggggccccttcgatctggtgtacggcagcacccaacccctgggcagctcttgtgaccggtgccctggctggtacatgtttcagttccaccggatcctgcagtacgccctgccgagacaggagtcccagcggccattcttttggattttcatggacaacttgctgctgaccgaggatgaccaggaaactaccactcggttcctgcagaccgaagccgtgaccctgcaggacgtgagaggccgggactaccagaacgccatgcgggtgtggtccaacatccctggactgaaaagcaagcacgcacctctgacccctaaagaagaggagtacctgcaggcccaggtgcggagcagaagcaagctggacgcccctaaggtggatctgctggtgaagaattgcctcctgcccctgagagagtacttcaagtatttcagccagaatagtctgcccctgggaggcagcggcggcggcgcccaggcccccctgagcttcgaggacgtggccgtgagcttcagcagggaggagtggaggctgctggtgcccgcccagaaggacctgtacagggacgtgatgctggagaactacaggaacctggtgagcgtgggctaccaggccagcgagcccgacagcctgttcaggctggagcacggcggccccctgtgggtggtggagggcgccgcccccaggcccccctgccccggcgagtacgtggccggcggcccaagcagcggcgcccctcctcccagcggcggcagcccagccggctccccaacctctaccgaggagggcacctctgagtccgccacccccgagagcggccctggcacctccaccgagcccagcgagggcagcgcacccggcagccctgccggcagccccacctccacagaggagggaaccagcaccgagcccagcgaaggcagcgccccaggcaccagcaccgagcctagtgagcaggagattaaacggatcaacaagatcagaagaagacttgtgaaagacagcaacaccaagaaggccggcaagacaggccccatgaaaaccctgctggttagagtgatgacacccgatctgagagagcggctggaaaacctgagaaagaagcctgaaaatatcccccagcccatcagcaatacatctagagccaacctgaataagctgctgaccgattacaccgaaatgaagaaggcgatcctgcatgtgtactgggaagagttccagaaggaccctgtgggcctgatgagccgggtggcccagcctgccagcaagaagatcgatcagaacaagctgaaacctgagatggacgagaagggcaacctgaccaccgccggctttgcctgctctcagtgtggccagcccctgttcgtgtacaagctggagcaggtgtctgagaagggcaaggcttacaccaactacttcggacggtgcaatgtggccgagcacgaaaagctgatcctgctggcccagctgaagcccgagaaggatagcgacgaagccgtgacatatagcctgggaaagtttgggcagagggccctggatttctacagcattcatgtgaccaaggagtccacccaccccgtgaagcccctggcccagatcgccggaaacagatacgcctccggacctgtgggaaaggccctgagcgacgcatgtatgggcacaatcgcctccttcctgtctaagtaccaggacatcatcatcgaacaccagaaggtggtgaagggcaaccagaagagactggagagcctgcgggagctggccggcaaggaaaacctggaataccctagcgtgaccctgccacctcagcctcacaccaaggagggcgttgatgcctacaacgaagtgatcgcccgggtgcgaatgtgggtgaacctgaacctgtggcagaagctgaagctaagcagagatgatgccaagcctctgctgagactgaagggattcccttcctttcctctggtcgagagacaggccaacgaagtggactggtgggacatggtgtgtaacgtgaagaagctgatcaacgagaaaaaggaggatggcaaggtgttttggcagaatctggctggctacaagagacaggaagccctgagaccatacctgagcagcgaggaagatcggaagaagggaaagaaattcgctcggtaccagctgggcgacctgctgctgcacctggaaaagaagcacggcgaggactggggaaaggtgtacgacgaggcctgggagcggattgacaagaaagtggaaggcctgagcaagcacatcaagctggaagaggaacggagaagcgaggacgcccagagcaaggccgccctgaccgactggctgcgggctaaggccagcttcgtgatcgagggcctgaaggaggccgacaaggacgagttctgcagatgcgagctgaagctgcagaagtggtacggggacctgcggggaaagcccttcgccatcgaagccgagaacagcatcctggacatcagcggcttcagcaagcagtacaactgtgccttcatctggcagaaggacggcgtgaagaagctgaacctgtacctgatcatcaactacttcaagggcggcaagctgcggttcaagaagatcaaacctgaagccttcgaagccaacagattctacaccgtgatcaacaaaaagagcggcgagatcgtgcccatggaggtgaacttcaacttcgacgaccccaacctgatcatcctgcctctggcctttggcaagagacagggcagagaattcatctggaacgacctgctgtccctggaaaccggcagcctgaagctggccaacggaagagtgatcgagaagacactgtacaacagaagaacccggcaggatgagcctgccctgttcgtggccctgaccttcgagcggcgggaggtcctggactcctccaatatcaaaccaatgaacctgatcggcgtggcaagaggcgaaaacatccccgccgtgatcgccctgaccgaccccgagggctgcccactgagccggtttaaggatagcctgggaaacccaacccacatcctgagaatcggcgagagctataaggagaagcagcggaccatccaggccaagaaggaggtggagcagcggagagccggcggctacagccggaagtacgccagcaaagccaagaatctggcagacgatatggtgagaaacaccgctagagatctgctgtactacgccgtgacccaggatgccatgctgatcttcgccaacctgagccggggcttcggccggcagggcaagcggaccttcatggccgagagacagtacacacggatggaggactggctgaccgccaagctggcctacgagggcctgagcaagacctacctgtccaagacactggcccagtacacctccaagacatgcagcaactgtgggtttaccatcaccagcgccgactacgacagggtgctggagaagctgaagaagacagcaacaggctggatgaccacaattaacggcaaggagctgaaggtggagggccagattacctactacaacagatacaagagacagaacgtagtcaaggacctgtccgtcgagctggatagactgagcgaagaatctgtgaacaacgacatctcctcctggacaaagggcagaagcggagaagctctgagcctcctgaagaaaagattctcccatagacccgtgcaggagaagttcgtgtgcctgaactgcggcttcgagacacacgcagccgagcaagccgccctgaacatcgccagatcctggctgttcctgcggagccaggagtacaagaaataccagacaaacaagacaaccggcaacaccgataagagagccttcgtcgagacctggcagtccttttaccggaagaagcttaaggaggtgtggaaacctgccgtgcggtctggcggatctggcggaggctccaccagccccaagaaaaagagaaaagtctaagctgccttctgcggggcttgccttctggccatgcccttcttctctcccttgcacctgtacctcttggtctttgaataaagcctgagtaggaaggctagcaaaaaaaaaaaaaaaaaaaaaaaaaaaaaaaaaaaaaaaaaaaaaaaaaaaaaaaaaaaaaaaaaaaaaaaaaaaaaaaa

SEQ ID NO: 12961 - RNA, 5785 nt, synthetic construct
  source 1..5785: mol_type = other RNA
aggaaataagagagaaaagaagagtaagaagaaatataagagccaccatggcccctaagaagaagcgtaaagtgagccggatggaacgcctcgtctacgaggtgcggcagaagtgcagaaacatcgaggacatctgcatctcctgcggatctctgaacgtgaccctggagcacccactgttcatcggcggcatgtgccagaactgtaaaaactgttttctggagtgtgcctatcaatacgacgatgacggctaccagagctactgcaccatctgttgcggcggaagagaggtgctgatgtgtggaaataacaactgctgccggtgcttctgcgtggaatgcgtggacctgctggtgggccccggcgccgcccaggccgctattaaggaagatccttggaactgctacatgtgcggccacaagggcacatacggcctgctgagacggagagaggactggcctagcagactgcagatgttcttcgccaataaccacgaccaggagttcgacccccctaaggtgtaccctcccgtccccgccgagaagagaaagcccatccgggtcctgagcctgttcgatggcatcgccaccggtctgctggtgctgaaggacctgggcatccaggtggataggtacattgcctccgaggtgtgcgaggactccatcaccgtgggaatggtgcgtcatcagggcaagatcatgtacgtgggcgacgtgcggagcgtgacacagaagcatatccaggagtggggccctttcgacctggtgatcggcggcagcccttgcaatgacctgagcatcgtgaacccagcccggaagggcctgtacgagggaaccggcagactgttcttcgagttttacagactgctgcacgacgcccggcctaaggaaggcgacgaccggcccttcttttggctgttcgagaatgtggtggccatgggagtcagcgacaagcgggatattagccggttcctggagagcaaccccgtgatgatcgatgccaaggaagtgagcgccgcccaccgggccagatacttctggggcaatctgcctggcatgaacagacccctggccagcaccgtgaacgacaagctggagctgcaggagtgcctggagcacggccggatcgccaagttcagcaaggtgagaaccatcaccacccgaagcaacagcatcaaacaaggcaaggaccagcactttcctgtgttcatgaacgagaaggaggacatcctgtggtgtaccgagatggagagagtgttcgggttcccagtccactacacagatgtcagcaacatgtctagactggccagacagagactgctgggaagaagctggtccgtccctgtgatcagacacctgttcgcccctctgaaggagtacttcgcctgcgtgagcagcggcaacagcaacgccaacagccggggccccagcttctctagcggcctggtgccactgtccctgagagggagccacatgggccccatggagatctacaaaaccgtgagcgcctggaagcggcagcctgtgcgcgtgctgagcctgtttcggaatatcgataaagtcctgaaaagcctgggattcctggagagcggctctggctccggcggtggcaccctgaagtacgtggaggatgtgacaaacgtggtcagacgggatgtggagaagtggggccccttcgatctggtgtacggcagcacccaacccctgggcagctcttgtgaccggtgccctggctggtacatgtttcagttccaccggatcctgcagtacgccctgccgagacaggagtcccagcggccattcttttggattttcatggacaacttgctgctgaccgaggatgaccaggaaactaccactcggttcctgcagaccgaagccgtgaccctgcaggacgtgagaggccgggactaccagaacgccatgcgggtgtggtccaacatccctggactgaaaagcaagcacgcacctctgacccctaaagaagaggagtacctgcaggcccaggtgcggagcagaagcaagctggacgcccctaaggtggatctgctggtgaagaattgcctcctgcccctgagagagtacttcaagtatttcagccagaatagtctgcccctgggaggcagcggcggcggccaccagggcagcgtgaccttcggcgacgtggccgtggacttcagccaggacgagtggggccacctggaccccgcccagaaggagctgtacagggaggtgatgctggagaactacggcaacctggtgtgcctgggcctggccgtgagcaggccccacgtgatcgagcagctggagaggggcgaggccccctggctgcccaggggcgccgtgcccaggagctgcgacctggactggatgaccaggggcggcccaagcagcggcgcccctcctcccagcggcggcagcccagccggctccccaacctctaccgaggagggcacctctgagtccgccacccccgagagcggccctggcacctccaccgagcccagcgagggcagcgcacccggcagccctgccggcagccccacctccacagaggagggaaccagcaccgagcccagcgaaggcagcgccccaggcaccagcaccgagcctagtgagcaggagattaaacggatcaacaagatcagaagaagacttgtgaaagacagcaacaccaagaaggccggcaagacaggccccatgaaaaccctgctggttagagtgatgacacccgatctgagagagcggctggaaaacctgagaaagaagcctgaaaatatcccccagcccatcagcaatacatctagagccaacctgaataagctgctgaccgattacaccgaaatgaagaaggcgatcctgcatgtgtactgggaagagttccagaaggaccctgtgggcctgatgagccgggtggcccagcctgccagcaagaagatcgatcagaacaagctgaaacctgagatggacgagaagggcaacctgaccaccgccggctttgcctgctctcagtgtggccagcccctgttcgtgtacaagctggagcaggtgtctgagaagggcaaggcttacaccaactacttcggacggtgcaatgtggccgagcacgaaaagctgatcctgctggcccagctgaagcccgagaaggatagcgacgaagccgtgacatatagcctgggaaagtttgggcagagggccctggatttctacagcattcatgtgaccaaggagtccacccaccccgtgaagcccctggcccagatcgccggaaacagatacgcctccggacctgtgggaaaggccctgagcgacgcatgtatgggcacaatcgcctccttcctgtctaagtaccaggacatcatcatcgaacaccagaaggtggtgaagggcaaccagaagagactggagagcctgcgggagctggccggcaaggaaaacctggaataccctagcgtgaccctgccacctcagcctcacaccaaggagggcgttgatgcctacaacgaagtgatcgcccgggtgcgaatgtgggtgaacctgaacctgtggcagaagctgaagctaagcagagatgatgccaagcctctgctgagactgaagggattcccttcctttcctctggtcgagagacaggccaacgaagtggactggtgggacatggtgtgtaacgtgaagaagctgatcaacgagaaaaaggaggatggcaaggtgttttggcagaatctggctggctacaagagacaggaagccctgagaccatacctgagcagcgaggaagatcggaagaagggaaagaaattcgctcggtaccagctgggcgacctgctgctgcacctggaaaagaagcacggcgaggactggggaaaggtgtacgacgaggcctgggagcggattgacaagaaagtggaaggcctgagcaagcacatcaagctggaagaggaacggagaagcgaggacgcccagagcaaggccgccctgaccgactggctgcgggctaaggccagcttcgtgatcgagggcctgaaggaggccgacaaggacgagttctgcagatgcgagctgaagctgcagaagtggtacggggacctgcggggaaagcccttcgccatcgaagccgagaacagcatcctggacatcagcggcttcagcaagcagtacaactgtgccttcatctggcagaaggacggcgtgaagaagctgaacctgtacctgatcatcaactacttcaagggcggcaagctgcggttcaagaagatcaaacctgaagccttcgaagccaacagattctacaccgtgatcaacaaaaagagcggcgagatcgtgcccatggaggtgaacttcaacttcgacgaccccaacctgatcatcctgcctctggcctttggcaagagacagggcagagaattcatctggaacgacctgctgtccctggaaaccggcagcctgaagctggccaacggaagagtgatcgagaagacactgtacaacagaagaacccggcaggatgagcctgccctgttcgtggccctgaccttcgagcggcgggaggtcctggactcctccaatatcaaaccaatgaacctgatcggcgtggcaagaggcgaaaacatccccgccgtgatcgccctgaccgaccccgagggctgcccactgagccggtttaaggatagcctgggaaacccaacccacatcctgagaatcggcgagagctataaggagaagcagcggaccatccaggccaagaaggaggtggagcagcggagagccggcggctacagccggaagtacgccagcaaagccaagaatctggcagacgatatggtgagaaacaccgctagagatctgctgtactacgccgtgacccaggatgccatgctgatcttcgccaacctgagccggggcttcggccggcagggcaagcggaccttcatggccgagagacagtacacacggatggaggactggctgaccgccaagctggcctacgagggcctgagcaagacctacctgtccaagacactggcccagtacacctccaagacatgcagcaactgtgggtttaccatcaccagcgccgactacgacagggtgctggagaagctgaagaagacagcaacaggctggatgaccacaattaacggcaaggagctgaaggtggagggccagattacctactacaacagatacaagagacagaacgtagtcaaggacctgtccgtcgagctggatagactgagcgaagaatctgtgaacaacgacatctcctcctggacaaagggcagaagcggagaagctctgagcctcctgaagaaaagattctcccatagacccgtgcaggagaagttcgtgtgcctgaactgcggcttcgagacacacgcagccgagcaagccgccctgaacatcgccagatcctggctgttcctgcggagccaggagtacaagaaataccagacaaacaagacaaccggcaacaccgataagagagccttcgtcgagacctggcagtccttttaccggaagaagcttaaggaggtgtggaaacctgccgtgcggtctggcggatctggcggaggctccaccagccccaagaaaaagagaaaagtctaagctgccttctgcggggcttgccttctggccatgcccttcttctctcccttgcacctgtacctcttggtctttgaataaagcctgagtaggaaggctagcaaaaaaaaaaaaaaaaaaaaaaaaaaaaaaaaaaaaaaaaaaaaaaaaaaaaaaaaaaaaaaaaaaaaaaaaaaaaaaaa

SEQ ID NO: 12962 - RNA, 5785 nt, synthetic construct
  source 1..5785: mol_type = other RNA
aggaaataagagagaaaagaagagtaagaagaaatataagagccaccatggcccctaagaagaagcgtaaagtgagccggatggaacgcctcgtctacgaggtgcggcagaagtgcagaaacatcgaggacatctgcatctcctgcggatctctgaacgtgaccctggagcacccactgttcatcggcggcatgtgccagaactgtaaaaactgttttctggagtgtgcctatcaatacgacgatgacggctaccagagctactgcaccatctgttgcggcggaagagaggtgctgatgtgtggaaataacaactgctgccggtgcttctgcgtggaatgcgtggacctgctggtgggccccggcgccgcccaggccgctattaaggaagatccttggaactgctacatgtgcggccacaagggcacatacggcctgctgagacggagagaggactggcctagcagactgcagatgttcttcgccaataaccacgaccaggagttcgacccccctaaggtgtaccctcccgtccccgccgagaagagaaagcccatccgggtcctgagcctgttcgatggcatcgccaccggtctgctggtgctgaaggacctgggcatccaggtggataggtacattgcctccgaggtgtgcgaggactccatcaccgtgggaatggtgcgtcatcagggcaagatcatgtacgtgggcgacgtgcggagcgtgacacagaagcatatccaggagtggggccctttcgacctggtgatcggcggcagcccttgcaatgacctgagcatcgtgaacccagcccggaagggcctgtacgagggaaccggcagactgttcttcgagttttacagactgctgcacgacgcccggcctaaggaaggcgacgaccggcccttcttttggctgttcgagaatgtggtggccatgggagtcagcgacaagcgggatattagccggttcctggagagcaaccccgtgatgatcgatgccaaggaagtgagcgccgcccaccgggccagatacttctggggcaatctgcctggcatgaacagacccctggccagcaccgtgaacgacaagctggagctgcaggagtgcctggagcacggccggatcgccaagttcagcaaggtgagaaccatcaccacccgaagcaacagcatcaaacaaggcaaggaccagcactttcctgtgttcatgaacgagaaggaggacatcctgtggtgtaccgagatggagagagtgttcgggttcccagtccactacacagatgtcagcaacatgtctagactggccagacagagactgctgggaagaagctggtccgtccctgtgatcagacacctgttcgcccctctgaaggagtacttcgcctgcgtgagcagcggcaacagcaacgccaacagccggggccccagcttctctagcggcctggtgccactgtccctgagagggagccacatgggccccatggagatctacaaaaccgtgagcgcctggaagcggcagcctgtgcgcgtgctgagcctgtttcggaatatcgataaagtcctgaaaagcctgggattcctggagagcggctctggctccggcggtggcaccctgaagtacgtggaggatgtgacaaacgtggtcagacgggatgtggagaagtggggccccttcgatctggtgtacggcagcacccaacccctgggcagctcttgtgaccggtgccctggctggtacatgtttcagttccaccggatcctgcagtacgccctgccgagacaggagtcccagcggccattcttttggattttcatggacaacttgctgctgaccgaggatgaccaggaaactaccactcggttcctgcagaccgaagccgtgaccctgcaggacgtgagaggccgggactaccagaacgccatgcgggtgtggtccaacatccctggactgaaaagcaagcacgcacctctgacccctaaagaagaggagtacctgcaggcccaggtgcggagcagaagcaagctggacgcccctaaggtggatctgctggtgaagaattgcctcctgcccctgagagagtacttcaagtatttcagccagaatagtctgcccctgggaggcagcggcggcggcagccaggtgaccgtgaccttcgaggacgtggccgtgctgttcagcagggacgagtggaggaagctgggccccagccagaagaacctgtaccaggacgtgatgctggagaactacagcaacctggtgagcctgggcctgcccttcagcaagcccaaggtgatcagcctgctgcagcagggcgaggacccctggaaggtggagaaggagagccccggcagcttcagccccggctggaagagcagcggcggcccaagcagcggcgcccctcctcccagcggcggcagcccagccggctccccaacctctaccgaggagggcacctctgagtccgccacccccgagagcggccctggcacctccaccgagcccagcgagggcagcgcacccggcagccctgccggcagccccacctccacagaggagggaaccagcaccgagcccagcgaaggcagcgccccaggcaccagcaccgagcctagtgagcaggagattaaacggatcaacaagatcagaagaagacttgtgaaagacagcaacaccaagaaggccggcaagacaggccccatgaaaaccctgctggttagagtgatgacacccgatctgagagagcggctggaaaacctgagaaagaagcctgaaaatatcccccagcccatcagcaatacatctagagccaacctgaataagctgctgaccgattacaccgaaatgaagaaggcgatcctgcatgtgtactgggaagagttccagaaggaccctgtgggcctgatgagccgggtggcccagcctgccagcaagaagatcgatcagaacaagctgaaacctgagatggacgagaagggcaacctgaccaccgccggctttgcctgctctcagtgtggccagcccctgttcgtgtacaagctggagcaggtgtctgagaagggcaaggcttacaccaactacttcggacggtgcaatgtggccgagcacgaaaagctgatcctgctggcccagctgaagcccgagaaggatagcgacgaagccgtgacatatagcctgggaaagtttgggcagagggccctggatttctacagcattcatgtgaccaaggagtccacccaccccgtgaagcccctggcccagatcgccggaaacagatacgcctccggacctgtgggaaaggccctgagcgacgcatgtatgggcacaatcgcctccttcctgtctaagtaccaggacatcatcatcgaacaccagaaggtggtgaagggcaaccagaagagactggagagcctgcgggagctggccggcaaggaaaacctggaataccctagcgtgaccctgccacctcagcctcacaccaaggagggcgttgatgcctacaacgaagtgatcgcccgggtgcgaatgtgggtgaacctgaacctgtggcagaagctgaagctaagcagagatgatgccaagcctctgctgagactgaagggattcccttcctttcctctggtcgagagacaggccaacgaagtggactggtgggacatggtgtgtaacgtgaagaagctgatcaacgagaaaaaggaggatggcaaggtgttttggcagaatctggctggctacaagagacaggaagccctgagaccatacctgagcagcgaggaagatcggaagaagggaaagaaattcgctcggtaccagctgggcgacctgctgctgcacctggaaaagaagcacggcgaggactggggaaaggtgtacgacgaggcctgggagcggattgacaagaaagtggaaggcctgagcaagcacatcaagctggaagaggaacggagaagcgaggacgcccagagcaaggccgccctgaccgactggctgcgggctaaggccagcttcgtgatcgagggcctgaaggaggccgacaaggacgagttctgcagatgcgagctgaagctgcagaagtggtacggggacctgcggggaaagcccttcgccatcgaagccgagaacagcatcctggacatcagcggcttcagcaagcagtacaactgtgccttcatctggcagaaggacggcgtgaagaagctgaacctgtacctgatcatcaactacttcaagggcggcaagctgcggttcaagaagatcaaacctgaagccttcgaagccaacagattctacaccgtgatcaacaaaaagagcggcgagatcgtgcccatggaggtgaacttcaacttcgacgaccccaacctgatcatcctgcctctggcctttggcaagagacagggcagagaattcatctggaacgacctgctgtccctggaaaccggcagcctgaagctggccaacggaagagtgatcgagaagacactgtacaacagaagaacccggcaggatgagcctgccctgttcgtggccctgaccttcgagcggcgggaggtcctggactcctccaatatcaaaccaatgaacctgatcggcgtggcaagaggcgaaaacatccccgccgtgatcgccctgaccgaccccgagggctgcccactgagccggtttaaggatagcctgggaaacccaacccacatcctgagaatcggcgagagctataaggagaagcagcggaccatccaggccaagaaggaggtggagcagcggagagccggcggctacagccggaagtacgccagcaaagccaagaatctggcagacgatatggtgagaaacaccgctagagatctgctgtactacgccgtgacccaggatgccatgctgatcttcgccaacctgagccggggcttcggccggcagggcaagcggaccttcatggccgagagacagtacacacggatggaggactggctgaccgccaagctggcctacgagggcctgagcaagacctacctgtccaagacactggcccagtacacctccaagacatgcagcaactgtgggtttaccatcaccagcgccgactacgacagggtgctggagaagctgaagaagacagcaacaggctggatgaccacaattaacggcaaggagctgaaggtggagggccagattacctactacaacagatacaagagacagaacgtagtcaaggacctgtccgtcgagctggatagactgagcgaagaatctgtgaacaacgacatctcctcctggacaaagggcagaagcggagaagctctgagcctcctgaagaaaagattctcccatagacccgtgcaggagaagttcgtgtgcctgaactgcggcttcgagacacacgcagccgagcaagccgccctgaacatcgccagatcctggctgttcctgcggagccaggagtacaagaaataccagacaaacaagacaaccggcaacaccgataagagagccttcgtcgagacctggcagtccttttaccggaagaagcttaaggaggtgtggaaacctgccgtgcggtctggcggatctggcggaggctccaccagccccaagaaaaagagaaaagtctaagctgccttctgcggggcttgccttctggccatgcccttcttctctcccttgcacctgtacctcttggtctttgaataaagcctgagtaggaaggctagcaaaaaaaaaaaaaaaaaaaaaaaaaaaaaaaaaaaaaaaaaaaaaaaaaaaaaaaaaaaaaaaaaaaaaaaaaaaaaaaa

SEQ ID NO: 12963 - RNA, 5785 nt, synthetic construct
  source 1..5785: mol_type = other RNA
aggaaataagagagaaaagaagagtaagaagaaatataagagccaccatggcccctaagaagaagcgtaaagtgagccggatggaacgcctcgtctacgaggtgcggcagaagtgcagaaacatcgaggacatctgcatctcctgcggatctctgaacgtgaccctggagcacccactgttcatcggcggcatgtgccagaactgtaaaaactgttttctggagtgtgcctatcaatacgacgatgacggctaccagagctactgcaccatctgttgcggcggaagagaggtgctgatgtgtggaaataacaactgctgccggtgcttctgcgtggaatgcgtggacctgctggtgggccccggcgccgcccaggccgctattaaggaagatccttggaactgctacatgtgcggccacaagggcacatacggcctgctgagacggagagaggactggcctagcagactgcagatgttcttcgccaataaccacgaccaggagttcgacccccctaaggtgtaccctcccgtccccgccgagaagagaaagcccatccgggtcctgagcctgttcgatggcatcgccaccggtctgctggtgctgaaggacctgggcatccaggtggataggtacattgcctccgaggtgtgcgaggactccatcaccgtgggaatggtgcgtcatcagggcaagatcatgtacgtgggcgacgtgcggagcgtgacacagaagcatatccaggagtggggccctttcgacctggtgatcggcggcagcccttgcaatgacctgagcatcgtgaacccagcccggaagggcctgtacgagggaaccggcagactgttcttcgagttttacagactgctgcacgacgcccggcctaaggaaggcgacgaccggcccttcttttggctgttcgagaatgtggtggccatgggagtcagcgacaagcgggatattagccggttcctggagagcaaccccgtgatgatcgatgccaaggaagtgagcgccgcccaccgggccagatacttctggggcaatctgcctggcatgaacagacccctggccagcaccgtgaacgacaagctggagctgcaggagtgcctggagcacggccggatcgccaagttcagcaaggtgagaaccatcaccacccgaagcaacagcatcaaacaaggcaaggaccagcactttcctgtgttcatgaacgagaaggaggacatcctgtggtgtaccgagatggagagagtgttcgggttcccagtccactacacagatgtcagcaacatgtctagactggccagacagagactgctgggaagaagctggtccgtccctgtgatcagacacctgttcgcccctctgaaggagtacttcgcctgcgtgagcagcggcaacagcaacgccaacagccggggccccagcttctctagcggcctggtgccactgtccctgagagggagccacatgggccccatggagatctacaaaaccgtgagcgcctggaagcggcagcctgtgcgcgtgctgagcctgtttcggaatatcgataaagtcctgaaaagcctgggattcctggagagcggctctggctccggcggtggcaccctgaagtacgtggaggatgtgacaaacgtggtcagacgggatgtggagaagtggggccccttcgatctggtgtacggcagcacccaacccctgggcagctcttgtgaccggtgccctggctggtacatgtttcagttccaccggatcctgcagtacgccctgccgagacaggagtcccagcggccattcttttggattttcatggacaacttgctgctgaccgaggatgaccaggaaactaccactcggttcctgcagaccgaagccgtgaccctgcaggacgtgagaggccgggactaccagaacgccatgcgggtgtggtccaacatccctggactgaaaagcaagcacgcacctctgacccctaaagaagaggagtacctgcaggcccaggtgcggagcagaagcaagctggacgcccctaaggtggatctgctggtgaagaattgcctcctgcccctgagagagtacttcaagtatttcagccagaatagtctgcccctgggaggcagcggcggcggctgcaaggagagcgtgaccttcaaggacgtggccgtggagttcacctgggaggagtgggtgcacctgaacagcagccagaagaccctgtacagggacgtgatgctggagaactacaggaacctggtgagcctgggcttcgccgtgagcaagcccgacgtgatctaccagctggagaggaaggaggccagctggatccccggcgccgacatccccaggagcagctgccccgagagcaaggagttcggcggcccaagcagcggcgcccctcctcccagcggcggcagcccagccggctccccaacctctaccgaggagggcacctctgagtccgccacccccgagagcggccctggcacctccaccgagcccagcgagggcagcgcacccggcagccctgccggcagccccacctccacagaggagggaaccagcaccgagcccagcgaaggcagcgccccaggcaccagcaccgagcctagtgagcaggagattaaacggatcaacaagatcagaagaagacttgtgaaagacagcaacaccaagaaggccggcaagacaggccccatgaaaaccctgctggttagagtgatgacacccgatctgagagagcggctggaaaacctgagaaagaagcctgaaaatatcccccagcccatcagcaatacatctagagccaacctgaataagctgctgaccgattacaccgaaatgaagaaggcgatcctgcatgtgtactgggaagagttccagaaggaccctgtgggcctgatgagccgggtggcccagcctgccagcaagaagatcgatcagaacaagctgaaacctgagatggacgagaagggcaacctgaccaccgccggctttgcctgctctcagtgtggccagcccctgttcgtgtacaagctggagcaggtgtctgagaagggcaaggcttacaccaactacttcggacggtgcaatgtggccgagcacgaaaagctgatcctgctggcccagctgaagcccgagaaggatagcgacgaagccgtgacatatagcctgggaaagtttgggcagagggccctggatttctacagcattcatgtgaccaaggagtccacccaccccgtgaagcccctggcccagatcgccggaaacagatacgcctccggacctgtgggaaaggccctgagcgacgcatgtatgggcacaatcgcctccttcctgtctaagtaccaggacatcatcatcgaacaccagaaggtggtgaagggcaaccagaagagactggagagcctgcgggagctggccggcaaggaaaacctggaataccctagcgtgaccctgccacctcagcctcacaccaaggagggcgttgatgcctacaacgaagtgatcgcccgggtgcgaatgtgggtgaacctgaacctgtggcagaagctgaagctaagcagagatgatgccaagcctctgctgagactgaagggattcccttcctttcctctggtcgagagacaggccaacgaagtggactggtgggacatggtgtgtaacgtgaagaagctgatcaacgagaaaaaggaggatggcaaggtgttttggcagaatctggctggctacaagagacaggaagccctgagaccatacctgagcagcgaggaagatcggaagaagggaaagaaattcgctcggtaccagctgggcgacctgctgctgcacctggaaaagaagcacggcgaggactggggaaaggtgtacgacgaggcctgggagcggattgacaagaaagtggaaggcctgagcaagcacatcaagctggaagaggaacggagaagcgaggacgcccagagcaaggccgccctgaccgactggctgcgggctaaggccagcttcgtgatcgagggcctgaaggaggccgacaaggacgagttctgcagatgcgagctgaagctgcagaagtggtacggggacctgcggggaaagcccttcgccatcgaagccgagaacagcatcctggacatcagcggcttcagcaagcagtacaactgtgccttcatctggcagaaggacggcgtgaagaagctgaacctgtacctgatcatcaactacttcaagggcggcaagctgcggttcaagaagatcaaacctgaagccttcgaagccaacagattctacaccgtgatcaacaaaaagagcggcgagatcgtgcccatggaggtgaacttcaacttcgacgaccccaacctgatcatcctgcctctggcctttggcaagagacagggcagagaattcatctggaacgacctgctgtccctggaaaccggcagcctgaagctggccaacggaagagtgatcgagaagacactgtacaacagaagaacccggcaggatgagcctgccctgttcgtggccctgaccttcgagcggcgggaggtcctggactcctccaatatcaaaccaatgaacctgatcggcgtggcaagaggcgaaaacatccccgccgtgatcgccctgaccgaccccgagggctgcccactgagccggtttaaggatagcctgggaaacccaacccacatcctgagaatcggcgagagctataaggagaagcagcggaccatccaggccaagaaggaggtggagcagcggagagccggcggctacagccggaagtacgccagcaaagccaagaatctggcagacgatatggtgagaaacaccgctagagatctgctgtactacgccgtgacccaggatgccatgctgatcttcgccaacctgagccggggcttcggccggcagggcaagcggaccttcatggccgagagacagtacacacggatggaggactggctgaccgccaagctggcctacgagggcctgagcaagacctacctgtccaagacactggcccagtacacctccaagacatgcagcaactgtgggtttaccatcaccagcgccgactacgacagggtgctggagaagctgaagaagacagcaacaggctggatgaccacaattaacggcaaggagctgaaggtggagggccagattacctactacaacagatacaagagacagaacgtagtcaaggacctgtccgtcgagctggatagactgagcgaagaatctgtgaacaacgacatctcctcctggacaaagggcagaagcggagaagctctgagcctcctgaagaaaagattctcccatagacccgtgcaggagaagttcgtgtgcctgaactgcggcttcgagacacacgcagccgagcaagccgccctgaacatcgccagatcctggctgttcctgcggagccaggagtacaagaaataccagacaaacaagacaaccggcaacaccgataagagagccttcgtcgagacctggcagtccttttaccggaagaagcttaaggaggtgtggaaacctgccgtgcggtctggcggatctggcggaggctccaccagccccaagaaaaagagaaaagtctaagctgccttctgcggggcttgccttctggccatgcccttcttctctcccttgcacctgtacctcttggtctttgaataaagcctgagtaggaaggctagcaaaaaaaaaaaaaaaaaaaaaaaaaaaaaaaaaaaaaaaaaaaaaaaaaaaaaaaaaaaaaaaaaaaaaaaaaaaaaaaa

SEQ ID NO: 12964 - RNA, 5785 nt, synthetic construct
  source 1..5785: mol_type = other RNA
aggaaataagagagaaaagaagagtaagaagaaatataagagccaccatggcccctaagaagaagcgtaaagtgagccggatggaacgcctcgtctacgaggtgcggcagaagtgcagaaacatcgaggacatctgcatctcctgcggatctctgaacgtgaccctggagcacccactgttcatcggcggcatgtgccagaactgtaaaaactgttttctggagtgtgcctatcaatacgacgatgacggctaccagagctactgcaccatctgttgcggcggaagagaggtgctgatgtgtggaaataacaactgctgccggtgcttctgcgtggaatgcgtggacctgctggtgggccccggcgccgcccaggccgctattaaggaagatccttggaactgctacatgtgcggccacaagggcacatacggcctgctgagacggagagaggactggcctagcagactgcagatgttcttcgccaataaccacgaccaggagttcgacccccctaaggtgtaccctcccgtccccgccgagaagagaaagcccatccgggtcctgagcctgttcgatggcatcgccaccggtctgctggtgctgaaggacctgggcatccaggtggataggtacattgcctccgaggtgtgcgaggactccatcaccgtgggaatggtgcgtcatcagggcaagatcatgtacgtgggcgacgtgcggagcgtgacacagaagcatatccaggagtggggccctttcgacctggtgatcggcggcagcccttgcaatgacctgagcatcgtgaacccagcccggaagggcctgtacgagggaaccggcagactgttcttcgagttttacagactgctgcacgacgcccggcctaaggaaggcgacgaccggcccttcttttggctgttcgagaatgtggtggccatgggagtcagcgacaagcgggatattagccggttcctggagagcaaccccgtgatgatcgatgccaaggaagtgagcgccgcccaccgggccagatacttctggggcaatctgcctggcatgaacagacccctggccagcaccgtgaacgacaagctggagctgcaggagtgcctggagcacggccggatcgccaagttcagcaaggtgagaaccatcaccacccgaagcaacagcatcaaacaaggcaaggaccagcactttcctgtgttcatgaacgagaaggaggacatcctgtggtgtaccgagatggagagagtgttcgggttcccagtccactacacagatgtcagcaacatgtctagactggccagacagagactgctgggaagaagctggtccgtccctgtgatcagacacctgttcgcccctctgaaggagtacttcgcctgcgtgagcagcggcaacagcaacgccaacagccggggccccagcttctctagcggcctggtgccactgtccctgagagggagccacatgggccccatggagatctacaaaaccgtgagcgcctggaagcggcagcctgtgcgcgtgctgagcctgtttcggaatatcgataaagtcctgaaaagcctgggattcctggagagcggctctggctccggcggtggcaccctgaagtacgtggaggatgtgacaaacgtggtcagacgggatgtggagaagtggggccccttcgatctggtgtacggcagcacccaacccctgggcagctcttgtgaccggtgccctggctggtacatgtttcagttccaccggatcctgcagtacgccctgccgagacaggagtcccagcggccattcttttggattttcatggacaacttgctgctgaccgaggatgaccaggaaactaccactcggttcctgcagaccgaagccgtgaccctgcaggacgtgagaggccgggactaccagaacgccatgcgggtgtggtccaacatccctggactgaaaagcaagcacgcacctctgacccctaaagaagaggagtacctgcaggcccaggtgcggagcagaagcaagctggacgcccctaaggtggatctgctggtgaagaattgcctcctgcccctgagagagtacttcaagtatttcagccagaatagtctgcccctgggaggcagcggcggcggccaccaggaggtggtgaccttcgaggacgtggccgtgtacttcaccaggaccgagtgggccggcctgagccccgcccagagggccctgtacaggagcgtgatgctggagatctacggcagcctgaccagcctgggctaccccgtgcccaagcccgccctgatcagcctgctggagaggggcgacctgcccgtgggcctggagacccaggacaacccccccgcccagggcaccagggacatctacggcggcccaagcagcggcgcccctcctcccagcggcggcagcccagccggctccccaacctctaccgaggagggcacctctgagtccgccacccccgagagcggccctggcacctccaccgagcccagcgagggcagcgcacccggcagccctgccggcagccccacctccacagaggagggaaccagcaccgagcccagcgaaggcagcgccccaggcaccagcaccgagcctagtgagcaggagattaaacggatcaacaagatcagaagaagacttgtgaaagacagcaacaccaagaaggccggcaagacaggccccatgaaaaccctgctggttagagtgatgacacccgatctgagagagcggctggaaaacctgagaaagaagcctgaaaatatcccccagcccatcagcaatacatctagagccaacctgaataagctgctgaccgattacaccgaaatgaagaaggcgatcctgcatgtgtactgggaagagttccagaaggaccctgtgggcctgatgagccgggtggcccagcctgccagcaagaagatcgatcagaacaagctgaaacctgagatggacgagaagggcaacctgaccaccgccggctttgcctgctctcagtgtggccagcccctgttcgtgtacaagctggagcaggtgtctgagaagggcaaggcttacaccaactacttcggacggtgcaatgtggccgagcacgaaaagctgatcctgctggcccagctgaagcccgagaaggatagcgacgaagccgtgacatatagcctgggaaagtttgggcagagggccctggatttctacagcattcatgtgaccaaggagtccacccaccccgtgaagcccctggcccagatcgccggaaacagatacgcctccggacctgtgggaaaggccctgagcgacgcatgtatgggcacaatcgcctccttcctgtctaagtaccaggacatcatcatcgaacaccagaaggtggtgaagggcaaccagaagagactggagagcctgcgggagctggccggcaaggaaaacctggaataccctagcgtgaccctgccacctcagcctcacaccaaggagggcgttgatgcctacaacgaagtgatcgcccgggtgcgaatgtgggtgaacctgaacctgtggcagaagctgaagctaagcagagatgatgccaagcctctgctgagactgaagggattcccttcctttcctctggtcgagagacaggccaacgaagtggactggtgggacatggtgtgtaacgtgaagaagctgatcaacgagaaaaaggaggatggcaaggtgttttggcagaatctggctggctacaagagacaggaagccctgagaccatacctgagcagcgaggaagatcggaagaagggaaagaaattcgctcggtaccagctgggcgacctgctgctgcacctggaaaagaagcacggcgaggactggggaaaggtgtacgacgaggcctgggagcggattgacaagaaagtggaaggcctgagcaagcacatcaagctggaagaggaacggagaagcgaggacgcccagagcaaggccgccctgaccgactggctgcgggctaaggccagcttcgtgatcgagggcctgaaggaggccgacaaggacgagttctgcagatgcgagctgaagctgcagaagtggtacggggacctgcggggaaagcccttcgccatcgaagccgagaacagcatcctggacatcagcggcttcagcaagcagtacaactgtgccttcatctggcagaaggacggcgtgaagaagctgaacctgtacctgatcatcaactacttcaagggcggcaagctgcggttcaagaagatcaaacctgaagccttcgaagccaacagattctacaccgtgatcaacaaaaagagcggcgagatcgtgcccatggaggtgaacttcaacttcgacgaccccaacctgatcatcctgcctctggcctttggcaagagacagggcagagaattcatctggaacgacctgctgtccctggaaaccggcagcctgaagctggccaacggaagagtgatcgagaagacactgtacaacagaagaacccggcaggatgagcctgccctgttcgtggccctgaccttcgagcggcgggaggtcctggactcctccaatatcaaaccaatgaacctgatcggcgtggcaagaggcgaaaacatccccgccgtgatcgccctgaccgaccccgagggctgcccactgagccggtttaaggatagcctgggaaacccaacccacatcctgagaatcggcgagagctataaggagaagcagcggaccatccaggccaagaaggaggtggagcagcggagagccggcggctacagccggaagtacgccagcaaagccaagaatctggcagacgatatggtgagaaacaccgctagagatctgctgtactacgccgtgacccaggatgccatgctgatcttcgccaacctgagccggggcttcggccggcagggcaagcggaccttcatggccgagagacagtacacacggatggaggactggctgaccgccaagctggcctacgagggcctgagcaagacctacctgtccaagacactggcccagtacacctccaagacatgcagcaactgtgggtttaccatcaccagcgccgactacgacagggtgctggagaagctgaagaagacagcaacaggctggatgaccacaattaacggcaaggagctgaaggtggagggccagattacctactacaacagatacaagagacagaacgtagtcaaggacctgtccgtcgagctggatagactgagcgaagaatctgtgaacaacgacatctcctcctggacaaagggcagaagcggagaagctctgagcctcctgaagaaaagattctcccatagacccgtgcaggagaagttcgtgtgcctgaactgcggcttcgagacacacgcagccgagcaagccgccctgaacatcgccagatcctggctgttcctgcggagccaggagtacaagaaataccagacaaacaagacaaccggcaacaccgataagagagccttcgtcgagacctggcagtccttttaccggaagaagcttaaggaggtgtggaaacctgccgtgcggtctggcggatctggcggaggctccaccagccccaagaaaaagagaaaagtctaagctgccttctgcggggcttgccttctggccatgcccttcttctctcccttgcacctgtacctcttggtctttgaataaagcctgagtaggaaggctagcaaaaaaaaaaaaaaaaaaaaaaaaaaaaaaaaaaaaaaaaaaaaaaaaaaaaaaaaaaaaaaaaaaaaaaaaaaaaaaaa

SEQ ID NO: 12965 - RNA, 5785 nt, synthetic construct
  source 1..5785: mol_type = other RNA
aggaaataagagagaaaagaagagtaagaagaaatataagagccaccatggcccctaagaagaagcgtaaagtgagccggatggaacgcctcgtctacgaggtgcggcagaagtgcagaaacatcgaggacatctgcatctcctgcggatctctgaacgtgaccctggagcacccactgttcatcggcggcatgtgccagaactgtaaaaactgttttctggagtgtgcctatcaatacgacgatgacggctaccagagctactgcaccatctgttgcggcggaagagaggtgctgatgtgtggaaataacaactgctgccggtgcttctgcgtggaatgcgtggacctgctggtgggccccggcgccgcccaggccgctattaaggaagatccttggaactgctacatgtgcggccacaagggcacatacggcctgctgagacggagagaggactggcctagcagactgcagatgttcttcgccaataaccacgaccaggagttcgacccccctaaggtgtaccctcccgtccccgccgagaagagaaagcccatccgggtcctgagcctgttcgatggcatcgccaccggtctgctggtgctgaaggacctgggcatccaggtggataggtacattgcctccgaggtgtgcgaggactccatcaccgtgggaatggtgcgtcatcagggcaagatcatgtacgtgggcgacgtgcggagcgtgacacagaagcatatccaggagtggggccctttcgacctggtgatcggcggcagcccttgcaatgacctgagcatcgtgaacccagcccggaagggcctgtacgagggaaccggcagactgttcttcgagttttacagactgctgcacgacgcccggcctaaggaaggcgacgaccggcccttcttttggctgttcgagaatgtggtggccatgggagtcagcgacaagcgggatattagccggttcctggagagcaaccccgtgatgatcgatgccaaggaagtgagcgccgcccaccgggccagatacttctggggcaatctgcctggcatgaacagacccctggccagcaccgtgaacgacaagctggagctgcaggagtgcctggagcacggccggatcgccaagttcagcaaggtgagaaccatcaccacccgaagcaacagcatcaaacaaggcaaggaccagcactttcctgtgttcatgaacgagaaggaggacatcctgtggtgtaccgagatggagagagtgttcgggttcccagtccactacacagatgtcagcaacatgtctagactggccagacagagactgctgggaagaagctggtccgtccctgtgatcagacacctgttcgcccctctgaaggagtacttcgcctgcgtgagcagcggcaacagcaacgccaacagccggggccccagcttctctagcggcctggtgccactgtccctgagagggagccacatgggccccatggagatctacaaaaccgtgagcgcctggaagcggcagcctgtgcgcgtgctgagcctgtttcggaatatcgataaagtcctgaaaagcctgggattcctggagagcggctctggctccggcggtggcaccctgaagtacgtggaggatgtgacaaacgtggtcagacgggatgtggagaagtggggccccttcgatctggtgtacggcagcacccaacccctgggcagctcttgtgaccggtgccctggctggtacatgtttcagttccaccggatcctgcagtacgccctgccgagacaggagtcccagcggccattcttttggattttcatggacaacttgctgctgaccgaggatgaccaggaaactaccactcggttcctgcagaccgaagccgtgaccctgcaggacgtgagaggccgggactaccagaacgccatgcgggtgtggtccaacatccctggactgaaaagcaagcacgcacctctgacccctaaagaagaggagtacctgcaggcccaggtgcggagcagaagcaagctggacgcccctaaggtggatctgctggtgaagaattgcctcctgcccctgagagagtacttcaagtatttcagccagaatagtctgcccctgggaggcagcggcggcggcccccaggagcccgtgaccttcgaggacgtggccgtgtacttcacccagaaccagtgggccagcctggaccccatgcagagggccctgtacagggaggtgatgctggagaactacaccaacatggccagcctggccttccccttccccaagcccgtgctggtgagccacctggagaggggcgaggccccctggggccccgacccctgggaggccgaggtgctgaggggcatctgccccggcggcggcggcccaagcagcggcgcccctcctcccagcggcggcagcccagccggctccccaacctctaccgaggagggcacctctgagtccgccacccccgagagcggccctggcacctccaccgagcccagcgagggcagcgcacccggcagccctgccggcagccccacctccacagaggagggaaccagcaccgagcccagcgaaggcagcgccccaggcaccagcaccgagcctagtgagcaggagattaaacggatcaacaagatcagaagaagacttgtgaaagacagcaacaccaagaaggccggcaagacaggccccatgaaaaccctgctggttagagtgatgacacccgatctgagagagcggctggaaaacctgagaaagaagcctgaaaatatcccccagcccatcagcaatacatctagagccaacctgaataagctgctgaccgattacaccgaaatgaagaaggcgatcctgcatgtgtactgggaagagttccagaaggaccctgtgggcctgatgagccgggtggcccagcctgccagcaagaagatcgatcagaacaagctgaaacctgagatggacgagaagggcaacctgaccaccgccggctttgcctgctctcagtgtggccagcccctgttcgtgtacaagctggagcaggtgtctgagaagggcaaggcttacaccaactacttcggacggtgcaatgtggccgagcacgaaaagctgatcctgctggcccagctgaagcccgagaaggatagcgacgaagccgtgacatatagcctgggaaagtttgggcagagggccctggatttctacagcattcatgtgaccaaggagtccacccaccccgtgaagcccctggcccagatcgccggaaacagatacgcctccggacctgtgggaaaggccctgagcgacgcatgtatgggcacaatcgcctccttcctgtctaagtaccaggacatcatcatcgaacaccagaaggtggtgaagggcaaccagaagagactggagagcctgcgggagctggccggcaaggaaaacctggaataccctagcgtgaccctgccacctcagcctcacaccaaggagggcgttgatgcctacaacgaagtgatcgcccgggtgcgaatgtgggtgaacctgaacctgtggcagaagctgaagctaagcagagatgatgccaagcctctgctgagactgaagggattcccttcctttcctctggtcgagagacaggccaacgaagtggactggtgggacatggtgtgtaacgtgaagaagctgatcaacgagaaaaaggaggatggcaaggtgttttggcagaatctggctggctacaagagacaggaagccctgagaccatacctgagcagcgaggaagatcggaagaagggaaagaaattcgctcggtaccagctgggcgacctgctgctgcacctggaaaagaagcacggcgaggactggggaaaggtgtacgacgaggcctgggagcggattgacaagaaagtggaaggcctgagcaagcacatcaagctggaagaggaacggagaagcgaggacgcccagagcaaggccgccctgaccgactggctgcgggctaaggccagcttcgtgatcgagggcctgaaggaggccgacaaggacgagttctgcagatgcgagctgaagctgcagaagtggtacggggacctgcggggaaagcccttcgccatcgaagccgagaacagcatcctggacatcagcggcttcagcaagcagtacaactgtgccttcatctggcagaaggacggcgtgaagaagctgaacctgtacctgatcatcaactacttcaagggcggcaagctgcggttcaagaagatcaaacctgaagccttcgaagccaacagattctacaccgtgatcaacaaaaagagcggcgagatcgtgcccatggaggtgaacttcaacttcgacgaccccaacctgatcatcctgcctctggcctttggcaagagacagggcagagaattcatctggaacgacctgctgtccctggaaaccggcagcctgaagctggccaacggaagagtgatcgagaagacactgtacaacagaagaacccggcaggatgagcctgccctgttcgtggccctgaccttcgagcggcgggaggtcctggactcctccaatatcaaaccaatgaacctgatcggcgtggcaagaggcgaaaacatccccgccgtgatcgccctgaccgaccccgagggctgcccactgagccggtttaaggatagcctgggaaacccaacccacatcctgagaatcggcgagagctataaggagaagcagcggaccatccaggccaagaaggaggtggagcagcggagagccggcggctacagccggaagtacgccagcaaagccaagaatctggcagacgatatggtgagaaacaccgctagagatctgctgtactacgccgtgacccaggatgccatgctgatcttcgccaacctgagccggggcttcggccggcagggcaagcggaccttcatggccgagagacagtacacacggatggaggactggctgaccgccaagctggcctacgagggcctgagcaagacctacctgtccaagacactggcccagtacacctccaagacatgcagcaactgtgggtttaccatcaccagcgccgactacgacagggtgctggagaagctgaagaagacagcaacaggctggatgaccacaattaacggcaaggagctgaaggtggagggccagattacctactacaacagatacaagagacagaacgtagtcaaggacctgtccgtcgagctggatagactgagcgaagaatctgtgaacaacgacatctcctcctggacaaagggcagaagcggagaagctctgagcctcctgaagaaaagattctcccatagacccgtgcaggagaagttcgtgtgcctgaactgcggcttcgagacacacgcagccgagcaagccgccctgaacatcgccagatcctggctgttcctgcggagccaggagtacaagaaataccagacaaacaagacaaccggcaacaccgataagagagccttcgtcgagacctggcagtccttttaccggaagaagcttaaggaggtgtggaaacctgccgtgcggtctggcggatctggcggaggctccaccagccccaagaaaaagagaaaagtctaagctgccttctgcggggcttgccttctggccatgcccttcttctctcccttgcacctgtacctcttggtctttgaataaagcctgagtaggaaggctagcaaaaaaaaaaaaaaaaaaaaaaaaaaaaaaaaaaaaaaaaaaaaaaaaaaaaaaaaaaaaaaaaaaaaaaaaaaaaaaaa

SEQ ID NO: 12966 - RNA, 5785 nt, synthetic construct
  source 1..5785: mol_type = other RNA
aggaaataagagagaaaagaagagtaagaagaaatataagagccaccatggcccctaagaagaagcgtaaagtgagccggatggaacgcctcgtctacgaggtgcggcagaagtgcagaaacatcgaggacatctgcatctcctgcggatctctgaacgtgaccctggagcacccactgttcatcggcggcatgtgccagaactgtaaaaactgttttctggagtgtgcctatcaatacgacgatgacggctaccagagctactgcaccatctgttgcggcggaagagaggtgctgatgtgtggaaataacaactgctgccggtgcttctgcgtggaatgcgtggacctgctggtgggccccggcgccgcccaggccgctattaaggaagatccttggaactgctacatgtgcggccacaagggcacatacggcctgctgagacggagagaggactggcctagcagactgcagatgttcttcgccaataaccacgaccaggagttcgacccccctaaggtgtaccctcccgtccccgccgagaagagaaagcccatccgggtcctgagcctgttcgatggcatcgccaccggtctgctggtgctgaaggacctgggcatccaggtggataggtacattgcctccgaggtgtgcgaggactccatcaccgtgggaatggtgcgtcatcagggcaagatcatgtacgtgggcgacgtgcggagcgtgacacagaagcatatccaggagtggggccctttcgacctggtgatcggcggcagcccttgcaatgacctgagcatcgtgaacccagcccggaagggcctgtacgagggaaccggcagactgttcttcgagttttacagactgctgcacgacgcccggcctaaggaaggcgacgaccggcccttcttttggctgttcgagaatgtggtggccatgggagtcagcgacaagcgggatattagccggttcctggagagcaaccccgtgatgatcgatgccaaggaagtgagcgccgcccaccgggccagatacttctggggcaatctgcctggcatgaacagacccctggccagcaccgtgaacgacaagctggagctgcaggagtgcctggagcacggccggatcgccaagttcagcaaggtgagaaccatcaccacccgaagcaacagcatcaaacaaggcaaggaccagcactttcctgtgttcatgaacgagaaggaggacatcctgtggtgtaccgagatggagagagtgttcgggttcccagtccactacacagatgtcagcaacatgtctagactggccagacagagactgctgggaagaagctggtccgtccctgtgatcagacacctgttcgcccctctgaaggagtacttcgcctgcgtgagcagcggcaacagcaacgccaacagccggggccccagcttctctagcggcctggtgccactgtccctgagagggagccacatgggccccatggagatctacaaaaccgtgagcgcctggaagcggcagcctgtgcgcgtgctgagcctgtttcggaatatcgataaagtcctgaaaagcctgggattcctggagagcggctctggctccggcggtggcaccctgaagtacgtggaggatgtgacaaacgtggtcagacgggatgtggagaagtggggccccttcgatctggtgtacggcagcacccaacccctgggcagctcttgtgaccggtgccctggctggtacatgtttcagttccaccggatcctgcagtacgccctgccgagacaggagtcccagcggccattcttttggattttcatggacaacttgctgctgaccgaggatgaccaggaaactaccactcggttcctgcagaccgaagccgtgaccctgcaggacgtgagaggccgggactaccagaacgccatgcgggtgtggtccaacatccctggactgaaaagcaagcacgcacctctgacccctaaagaagaggagtacctgcaggcccaggtgcggagcagaagcaagctggacgcccctaaggtggatctgctggtgaagaattgcctcctgcccctgagagagtacttcaagtatttcagccagaatagtctgcccctgggaggcagcggcggcggcagcaagctgagcgaggccttcgaggacgtggccgtgtacttcacctggaaggagtgggccctgctggaggccgccgacaagatgctgtacagggaccagatgctgaagaactaccaggccctgttcagcctgggctacaggggccccacccccgacctgatctgcaggatccagaggggcgagatggagctgtgggtgagcgacctggaggaggccggcgagagcagcctgagcgaggacagcggcggcccaagcagcggcgcccctcctcccagcggcggcagcccagccggctccccaacctctaccgaggagggcacctctgagtccgccacccccgagagcggccctggcacctccaccgagcccagcgagggcagcgcacccggcagccctgccggcagccccacctccacagaggagggaaccagcaccgagcccagcgaaggcagcgccccaggcaccagcaccgagcctagtgagcaggagattaaacggatcaacaagatcagaagaagacttgtgaaagacagcaacaccaagaaggccggcaagacaggccccatgaaaaccctgctggttagagtgatgacacccgatctgagagagcggctggaaaacctgagaaagaagcctgaaaatatcccccagcccatcagcaatacatctagagccaacctgaataagctgctgaccgattacaccgaaatgaagaaggcgatcctgcatgtgtactgggaagagttccagaaggaccctgtgggcctgatgagccgggtggcccagcctgccagcaagaagatcgatcagaacaagctgaaacctgagatggacgagaagggcaacctgaccaccgccggctttgcctgctctcagtgtggccagcccctgttcgtgtacaagctggagcaggtgtctgagaagggcaaggcttacaccaactacttcggacggtgcaatgtggccgagcacgaaaagctgatcctgctggcccagctgaagcccgagaaggatagcgacgaagccgtgacatatagcctgggaaagtttgggcagagggccctggatttctacagcattcatgtgaccaaggagtccacccaccccgtgaagcccctggcccagatcgccggaaacagatacgcctccggacctgtgggaaaggccctgagcgacgcatgtatgggcacaatcgcctccttcctgtctaagtaccaggacatcatcatcgaacaccagaaggtggtgaagggcaaccagaagagactggagagcctgcgggagctggccggcaaggaaaacctggaataccctagcgtgaccctgccacctcagcctcacaccaaggagggcgttgatgcctacaacgaagtgatcgcccgggtgcgaatgtgggtgaacctgaacctgtggcagaagctgaagctaagcagagatgatgccaagcctctgctgagactgaagggattcccttcctttcctctggtcgagagacaggccaacgaagtggactggtgggacatggtgtgtaacgtgaagaagctgatcaacgagaaaaaggaggatggcaaggtgttttggcagaatctggctggctacaagagacaggaagccctgagaccatacctgagcagcgaggaagatcggaagaagggaaagaaattcgctcggtaccagctgggcgacctgctgctgcacctggaaaagaagcacggcgaggactggggaaaggtgtacgacgaggcctgggagcggattgacaagaaagtggaaggcctgagcaagcacatcaagctggaagaggaacggagaagcgaggacgcccagagcaaggccgccctgaccgactggctgcgggctaaggccagcttcgtgatcgagggcctgaaggaggccgacaaggacgagttctgcagatgcgagctgaagctgcagaagtggtacggggacctgcggggaaagcccttcgccatcgaagccgagaacagcatcctggacatcagcggcttcagcaagcagtacaactgtgccttcatctggcagaaggacggcgtgaagaagctgaacctgtacctgatcatcaactacttcaagggcggcaagctgcggttcaagaagatcaaacctgaagccttcgaagccaacagattctacaccgtgatcaacaaaaagagcggcgagatcgtgcccatggaggtgaacttcaacttcgacgaccccaacctgatcatcctgcctctggcctttggcaagagacagggcagagaattcatctggaacgacctgctgtccctggaaaccggcagcctgaagctggccaacggaagagtgatcgagaagacactgtacaacagaagaacccggcaggatgagcctgccctgttcgtggccctgaccttcgagcggcgggaggtcctggactcctccaatatcaaaccaatgaacctgatcggcgtggcaagaggcgaaaacatccccgccgtgatcgccctgaccgaccccgagggctgcccactgagccggtttaaggatagcctgggaaacccaacccacatcctgagaatcggcgagagctataaggagaagcagcggaccatccaggccaagaaggaggtggagcagcggagagccggcggctacagccggaagtacgccagcaaagccaagaatctggcagacgatatggtgagaaacaccgctagagatctgctgtactacgccgtgacccaggatgccatgctgatcttcgccaacctgagccggggcttcggccggcagggcaagcggaccttcatggccgagagacagtacacacggatggaggactggctgaccgccaagctggcctacgagggcctgagcaagacctacctgtccaagacactggcccagtacacctccaagacatgcagcaactgtgggtttaccatcaccagcgccgactacgacagggtgctggagaagctgaagaagacagcaacaggctggatgaccacaattaacggcaaggagctgaaggtggagggccagattacctactacaacagatacaagagacagaacgtagtcaaggacctgtccgtcgagctggatagactgagcgaagaatctgtgaacaacgacatctcctcctggacaaagggcagaagcggagaagctctgagcctcctgaagaaaagattctcccatagacccgtgcaggagaagttcgtgtgcctgaactgcggcttcgagacacacgcagccgagcaagccgccctgaacatcgccagatcctggctgttcctgcggagccaggagtacaagaaataccagacaaacaagacaaccggcaacaccgataagagagccttcgtcgagacctggcagtccttttaccggaagaagcttaaggaggtgtggaaacctgccgtgcggtctggcggatctggcggaggctccaccagccccaagaaaaagagaaaagtctaagctgccttctgcggggcttgccttctggccatgcccttcttctctcccttgcacctgtacctcttggtctttgaataaagcctgagtaggaaggctagcaaaaaaaaaaaaaaaaaaaaaaaaaaaaaaaaaaaaaaaaaaaaaaaaaaaaaaaaaaaaaaaaaaaaaaaaaaaaaaaa

SEQ ID NO: 12967 - RNA, 5785 nt, synthetic construct
  source 1..5785: mol_type = other RNA
aggaaataagagagaaaagaagagtaagaagaaatataagagccaccatggcccctaagaagaagcgtaaagtgagccggatggaacgcctcgtctacgaggtgcggcagaagtgcagaaacatcgaggacatctgcatctcctgcggatctctgaacgtgaccctggagcacccactgttcatcggcggcatgtgccagaactgtaaaaactgttttctggagtgtgcctatcaatacgacgatgacggctaccagagctactgcaccatctgttgcggcggaagagaggtgctgatgtgtggaaataacaactgctgccggtgcttctgcgtggaatgcgtggacctgctggtgggccccggcgccgcccaggccgctattaaggaagatccttggaactgctacatgtgcggccacaagggcacatacggcctgctgagacggagagaggactggcctagcagactgcagatgttcttcgccaataaccacgaccaggagttcgacccccctaaggtgtaccctcccgtccccgccgagaagagaaagcccatccgggtcctgagcctgttcgatggcatcgccaccggtctgctggtgctgaaggacctgggcatccaggtggataggtacattgcctccgaggtgtgcgaggactccatcaccgtgggaatggtgcgtcatcagggcaagatcatgtacgtgggcgacgtgcggagcgtgacacagaagcatatccaggagtggggccctttcgacctggtgatcggcggcagcccttgcaatgacctgagcatcgtgaacccagcccggaagggcctgtacgagggaaccggcagactgttcttcgagttttacagactgctgcacgacgcccggcctaaggaaggcgacgaccggcccttcttttggctgttcgagaatgtggtggccatgggagtcagcgacaagcgggatattagccggttcctggagagcaaccccgtgatgatcgatgccaaggaagtgagcgccgcccaccgggccagatacttctggggcaatctgcctggcatgaacagacccctggccagcaccgtgaacgacaagctggagctgcaggagtgcctggagcacggccggatcgccaagttcagcaaggtgagaaccatcaccacccgaagcaacagcatcaaacaaggcaaggaccagcactttcctgtgttcatgaacgagaaggaggacatcctgtggtgtaccgagatggagagagtgttcgggttcccagtccactacacagatgtcagcaacatgtctagactggccagacagagactgctgggaagaagctggtccgtccctgtgatcagacacctgttcgcccctctgaaggagtacttcgcctgcgtgagcagcggcaacagcaacgccaacagccggggccccagcttctctagcggcctggtgccactgtccctgagagggagccacatgggccccatggagatctacaaaaccgtgagcgcctggaagcggcagcctgtgcgcgtgctgagcctgtttcggaatatcgataaagtcctgaaaagcctgggattcctggagagcggctctggctccggcggtggcaccctgaagtacgtggaggatgtgacaaacgtggtcagacgggatgtggagaagtggggccccttcgatctggtgtacggcagcacccaacccctgggcagctcttgtgaccggtgccctggctggtacatgtttcagttccaccggatcctgcagtacgccctgccgagacaggagtcccagcggccattcttttggattttcatggacaacttgctgctgaccgaggatgaccaggaaactaccactcggttcctgcagaccgaagccgtgaccctgcaggacgtgagaggccgggactaccagaacgccatgcgggtgtggtccaacatccctggactgaaaagcaagcacgcacctctgacccctaaagaagaggagtacctgcaggcccaggtgcggagcagaagcaagctggacgcccctaaggtggatctgctggtgaagaattgcctcctgcccctgagagagtacttcaagtatttcagccagaatagtctgcccctgggaggcagcggcggcggcgtgaccttcgaggacgtggccgtgtacttcagctgggaggagtggggcctgctggacgaggcccagaggtgcctgtaccaggacgtgatgctggagaacctggccctgatcaacagcctgggcctgaggcacggcgccgaggacgaggacgcccccgagcacagggtgagcgtgcaggccgccagccaggtgggcaccaggaaggccgtggtgagcccccagaaggcccaccccagggaggtgggcggcccaagcagcggcgcccctcctcccagcggcggcagcccagccggctccccaacctctaccgaggagggcacctctgagtccgccacccccgagagcggccctggcacctccaccgagcccagcgagggcagcgcacccggcagccctgccggcagccccacctccacagaggagggaaccagcaccgagcccagcgaaggcagcgccccaggcaccagcaccgagcctagtgagcaggagattaaacggatcaacaagatcagaagaagacttgtgaaagacagcaacaccaagaaggccggcaagacaggccccatgaaaaccctgctggttagagtgatgacacccgatctgagagagcggctggaaaacctgagaaagaagcctgaaaatatcccccagcccatcagcaatacatctagagccaacctgaataagctgctgaccgattacaccgaaatgaagaaggcgatcctgcatgtgtactgggaagagttccagaaggaccctgtgggcctgatgagccgggtggcccagcctgccagcaagaagatcgatcagaacaagctgaaacctgagatggacgagaagggcaacctgaccaccgccggctttgcctgctctcagtgtggccagcccctgttcgtgtacaagctggagcaggtgtctgagaagggcaaggcttacaccaactacttcggacggtgcaatgtggccgagcacgaaaagctgatcctgctggcccagctgaagcccgagaaggatagcgacgaagccgtgacatatagcctgggaaagtttgggcagagggccctggatttctacagcattcatgtgaccaaggagtccacccaccccgtgaagcccctggcccagatcgccggaaacagatacgcctccggacctgtgggaaaggccctgagcgacgcatgtatgggcacaatcgcctccttcctgtctaagtaccaggacatcatcatcgaacaccagaaggtggtgaagggcaaccagaagagactggagagcctgcgggagctggccggcaaggaaaacctggaataccctagcgtgaccctgccacctcagcctcacaccaaggagggcgttgatgcctacaacgaagtgatcgcccgggtgcgaatgtgggtgaacctgaacctgtggcagaagctgaagctaagcagagatgatgccaagcctctgctgagactgaagggattcccttcctttcctctggtcgagagacaggccaacgaagtggactggtgggacatggtgtgtaacgtgaagaagctgatcaacgagaaaaaggaggatggcaaggtgttttggcagaatctggctggctacaagagacaggaagccctgagaccatacctgagcagcgaggaagatcggaagaagggaaagaaattcgctcggtaccagctgggcgacctgctgctgcacctggaaaagaagcacggcgaggactggggaaaggtgtacgacgaggcctgggagcggattgacaagaaagtggaaggcctgagcaagcacatcaagctggaagaggaacggagaagcgaggacgcccagagcaaggccgccctgaccgactggctgcgggctaaggccagcttcgtgatcgagggcctgaaggaggccgacaaggacgagttctgcagatgcgagctgaagctgcagaagtggtacggggacctgcggggaaagcccttcgccatcgaagccgagaacagcatcctggacatcagcggcttcagcaagcagtacaactgtgccttcatctggcagaaggacggcgtgaagaagctgaacctgtacctgatcatcaactacttcaagggcggcaagctgcggttcaagaagatcaaacctgaagccttcgaagccaacagattctacaccgtgatcaacaaaaagagcggcgagatcgtgcccatggaggtgaacttcaacttcgacgaccccaacctgatcatcctgcctctggcctttggcaagagacagggcagagaattcatctggaacgacctgctgtccctggaaaccggcagcctgaagctggccaacggaagagtgatcgagaagacactgtacaacagaagaacccggcaggatgagcctgccctgttcgtggccctgaccttcgagcggcgggaggtcctggactcctccaatatcaaaccaatgaacctgatcggcgtggcaagaggcgaaaacatccccgccgtgatcgccctgaccgaccccgagggctgcccactgagccggtttaaggatagcctgggaaacccaacccacatcctgagaatcggcgagagctataaggagaagcagcggaccatccaggccaagaaggaggtggagcagcggagagccggcggctacagccggaagtacgccagcaaagccaagaatctggcagacgatatggtgagaaacaccgctagagatctgctgtactacgccgtgacccaggatgccatgctgatcttcgccaacctgagccggggcttcggccggcagggcaagcggaccttcatggccgagagacagtacacacggatggaggactggctgaccgccaagctggcctacgagggcctgagcaagacctacctgtccaagacactggcccagtacacctccaagacatgcagcaactgtgggtttaccatcaccagcgccgactacgacagggtgctggagaagctgaagaagacagcaacaggctggatgaccacaattaacggcaaggagctgaaggtggagggccagattacctactacaacagatacaagagacagaacgtagtcaaggacctgtccgtcgagctggatagactgagcgaagaatctgtgaacaacgacatctcctcctggacaaagggcagaagcggagaagctctgagcctcctgaagaaaagattctcccatagacccgtgcaggagaagttcgtgtgcctgaactgcggcttcgagacacacgcagccgagcaagccgccctgaacatcgccagatcctggctgttcctgcggagccaggagtacaagaaataccagacaaacaagacaaccggcaacaccgataagagagccttcgtcgagacctggcagtccttttaccggaagaagcttaaggaggtgtggaaacctgccgtgcggtctggcggatctggcggaggctccaccagccccaagaaaaagagaaaagtctaagctgccttctgcggggcttgccttctggccatgcccttcttctctcccttgcacctgtacctcttggtctttgaataaagcctgagtaggaaggctagcaaaaaaaaaaaaaaaaaaaaaaaaaaaaaaaaaaaaaaaaaaaaaaaaaaaaaaaaaaaaaaaaaaaaaaaaaaaaaaaa

SEQ ID NO: 12968 - RNA, 5785 nt, synthetic construct
  source 1..5785: mol_type = other RNA
aggaaataagagagaaaagaagagtaagaagaaatataagagccaccatggcccctaagaagaagcgtaaagtgagccggatggaacgcctcgtctacgaggtgcggcagaagtgcagaaacatcgaggacatctgcatctcctgcggatctctgaacgtgaccctggagcacccactgttcatcggcggcatgtgccagaactgtaaaaactgttttctggagtgtgcctatcaatacgacgatgacggctaccagagctactgcaccatctgttgcggcggaagagaggtgctgatgtgtggaaataacaactgctgccggtgcttctgcgtggaatgcgtggacctgctggtgggccccggcgccgcccaggccgctattaaggaagatccttggaactgctacatgtgcggccacaagggcacatacggcctgctgagacggagagaggactggcctagcagactgcagatgttcttcgccaataaccacgaccaggagttcgacccccctaaggtgtaccctcccgtccccgccgagaagagaaagcccatccgggtcctgagcctgttcgatggcatcgccaccggtctgctggtgctgaaggacctgggcatccaggtggataggtacattgcctccgaggtgtgcgaggactccatcaccgtgggaatggtgcgtcatcagggcaagatcatgtacgtgggcgacgtgcggagcgtgacacagaagcatatccaggagtggggccctttcgacctggtgatcggcggcagcccttgcaatgacctgagcatcgtgaacccagcccggaagggcctgtacgagggaaccggcagactgttcttcgagttttacagactgctgcacgacgcccggcctaaggaaggcgacgaccggcccttcttttggctgttcgagaatgtggtggccatgggagtcagcgacaagcgggatattagccggttcctggagagcaaccccgtgatgatcgatgccaaggaagtgagcgccgcccaccgggccagatacttctggggcaatctgcctggcatgaacagacccctggccagcaccgtgaacgacaagctggagctgcaggagtgcctggagcacggccggatcgccaagttcagcaaggtgagaaccatcaccacccgaagcaacagcatcaaacaaggcaaggaccagcactttcctgtgttcatgaacgagaaggaggacatcctgtggtgtaccgagatggagagagtgttcgggttcccagtccactacacagatgtcagcaacatgtctagactggccagacagagactgctgggaagaagctggtccgtccctgtgatcagacacctgttcgcccctctgaaggagtacttcgcctgcgtgagcagcggcaacagcaacgccaacagccggggccccagcttctctagcggcctggtgccactgtccctgagagggagccacatgggccccatggagatctacaaaaccgtgagcgcctggaagcggcagcctgtgcgcgtgctgagcctgtttcggaatatcgataaagtcctgaaaagcctgggattcctggagagcggctctggctccggcggtggcaccctgaagtacgtggaggatgtgacaaacgtggtcagacgggatgtggagaagtggggccccttcgatctggtgtacggcagcacccaacccctgggcagctcttgtgaccggtgccctggctggtacatgtttcagttccaccggatcctgcagtacgccctgccgagacaggagtcccagcggccattcttttggattttcatggacaacttgctgctgaccgaggatgaccaggaaactaccactcggttcctgcagaccgaagccgtgaccctgcaggacgtgagaggccgggactaccagaacgccatgcgggtgtggtccaacatccctggactgaaaagcaagcacgcacctctgacccctaaagaagaggagtacctgcaggcccaggtgcggagcagaagcaagctggacgcccctaaggtggatctgctggtgaagaattgcctcctgcccctgagagagtacttcaagtatttcagccagaatagtctgcccctgggaggcagcggcggcggcaagcccggcaccgtgagcttcgccgacgtggccgtgtacttcagccccgaggagtggggctgcctgaggcccgcccagagggccctgtacagggacgtgatgcaggagacctacggccacctgggcgccctgggcttccccggccccaagcccgccctgatcagctggatggagcaggagagcgaggcctggagccccgccgcccaggaccccgagaagggcgagaggctgggcggcgccaggggcggcccaagcagcggcgcccctcctcccagcggcggcagcccagccggctccccaacctctaccgaggagggcacctctgagtccgccacccccgagagcggccctggcacctccaccgagcccagcgagggcagcgcacccggcagccctgccggcagccccacctccacagaggagggaaccagcaccgagcccagcgaaggcagcgccccaggcaccagcaccgagcctagtgagcaggagattaaacggatcaacaagatcagaagaagacttgtgaaagacagcaacaccaagaaggccggcaagacaggccccatgaaaaccctgctggttagagtgatgacacccgatctgagagagcggctggaaaacctgagaaagaagcctgaaaatatcccccagcccatcagcaatacatctagagccaacctgaataagctgctgaccgattacaccgaaatgaagaaggcgatcctgcatgtgtactgggaagagttccagaaggaccctgtgggcctgatgagccgggtggcccagcctgccagcaagaagatcgatcagaacaagctgaaacctgagatggacgagaagggcaacctgaccaccgccggctttgcctgctctcagtgtggccagcccctgttcgtgtacaagctggagcaggtgtctgagaagggcaaggcttacaccaactacttcggacggtgcaatgtggccgagcacgaaaagctgatcctgctggcccagctgaagcccgagaaggatagcgacgaagccgtgacatatagcctgggaaagtttgggcagagggccctggatttctacagcattcatgtgaccaaggagtccacccaccccgtgaagcccctggcccagatcgccggaaacagatacgcctccggacctgtgggaaaggccctgagcgacgcatgtatgggcacaatcgcctccttcctgtctaagtaccaggacatcatcatcgaacaccagaaggtggtgaagggcaaccagaagagactggagagcctgcgggagctggccggcaaggaaaacctggaataccctagcgtgaccctgccacctcagcctcacaccaaggagggcgttgatgcctacaacgaagtgatcgcccgggtgcgaatgtgggtgaacctgaacctgtggcagaagctgaagctaagcagagatgatgccaagcctctgctgagactgaagggattcccttcctttcctctggtcgagagacaggccaacgaagtggactggtgggacatggtgtgtaacgtgaagaagctgatcaacgagaaaaaggaggatggcaaggtgttttggcagaatctggctggctacaagagacaggaagccctgagaccatacctgagcagcgaggaagatcggaagaagggaaagaaattcgctcggtaccagctgggcgacctgctgctgcacctggaaaagaagcacggcgaggactggggaaaggtgtacgacgaggcctgggagcggattgacaagaaagtggaaggcctgagcaagcacatcaagctggaagaggaacggagaagcgaggacgcccagagcaaggccgccctgaccgactggctgcgggctaaggccagcttcgtgatcgagggcctgaaggaggccgacaaggacgagttctgcagatgcgagctgaagctgcagaagtggtacggggacctgcggggaaagcccttcgccatcgaagccgagaacagcatcctggacatcagcggcttcagcaagcagtacaactgtgccttcatctggcagaaggacggcgtgaagaagctgaacctgtacctgatcatcaactacttcaagggcggcaagctgcggttcaagaagatcaaacctgaagccttcgaagccaacagattctacaccgtgatcaacaaaaagagcggcgagatcgtgcccatggaggtgaacttcaacttcgacgaccccaacctgatcatcctgcctctggcctttggcaagagacagggcagagaattcatctggaacgacctgctgtccctggaaaccggcagcctgaagctggccaacggaagagtgatcgagaagacactgtacaacagaagaacccggcaggatgagcctgccctgttcgtggccctgaccttcgagcggcgggaggtcctggactcctccaatatcaaaccaatgaacctgatcggcgtggcaagaggcgaaaacatccccgccgtgatcgccctgaccgaccccgagggctgcccactgagccggtttaaggatagcctgggaaacccaacccacatcctgagaatcggcgagagctataaggagaagcagcggaccatccaggccaagaaggaggtggagcagcggagagccggcggctacagccggaagtacgccagcaaagccaagaatctggcagacgatatggtgagaaacaccgctagagatctgctgtactacgccgtgacccaggatgccatgctgatcttcgccaacctgagccggggcttcggccggcagggcaagcggaccttcatggccgagagacagtacacacggatggaggactggctgaccgccaagctggcctacgagggcctgagcaagacctacctgtccaagacactggcccagtacacctccaagacatgcagcaactgtgggtttaccatcaccagcgccgactacgacagggtgctggagaagctgaagaagacagcaacaggctggatgaccacaattaacggcaaggagctgaaggtggagggccagattacctactacaacagatacaagagacagaacgtagtcaaggacctgtccgtcgagctggatagactgagcgaagaatctgtgaacaacgacatctcctcctggacaaagggcagaagcggagaagctctgagcctcctgaagaaaagattctcccatagacccgtgcaggagaagttcgtgtgcctgaactgcggcttcgagacacacgcagccgagcaagccgccctgaacatcgccagatcctggctgttcctgcggagccaggagtacaagaaataccagacaaacaagacaaccggcaacaccgataagagagccttcgtcgagacctggcagtccttttaccggaagaagcttaaggaggtgtggaaacctgccgtgcggtctggcggatctggcggaggctccaccagccccaagaaaaagagaaaagtctaagctgccttctgcggggcttgccttctggccatgcccttcttctctcccttgcacctgtacctcttggtctttgaataaagcctgagtaggaaggctagcaaaaaaaaaaaaaaaaaaaaaaaaaaaaaaaaaaaaaaaaaaaaaaaaaaaaaaaaaaaaaaaaaaaaaaaaaaaaaaaa

SEQ ID NO: 12969 - RNA, 5785 nt, synthetic construct
  source 1..5785: mol_type = other RNA
aggaaataagagagaaaagaagagtaagaagaaatataagagccaccatggcccctaagaagaagcgtaaagtgagccggatggaacgcctcgtctacgaggtgcggcagaagtgcagaaacatcgaggacatctgcatctcctgcggatctctgaacgtgaccctggagcacccactgttcatcggcggcatgtgccagaactgtaaaaactgttttctggagtgtgcctatcaatacgacgatgacggctaccagagctactgcaccatctgttgcggcggaagagaggtgctgatgtgtggaaataacaactgctgccggtgcttctgcgtggaatgcgtggacctgctggtgggccccggcgccgcccaggccgctattaaggaagatccttggaactgctacatgtgcggccacaagggcacatacggcctgctgagacggagagaggactggcctagcagactgcagatgttcttcgccaataaccacgaccaggagttcgacccccctaaggtgtaccctcccgtccccgccgagaagagaaagcccatccgggtcctgagcctgttcgatggcatcgccaccggtctgctggtgctgaaggacctgggcatccaggtggataggtacattgcctccgaggtgtgcgaggactccatcaccgtgggaatggtgcgtcatcagggcaagatcatgtacgtgggcgacgtgcggagcgtgacacagaagcatatccaggagtggggccctttcgacctggtgatcggcggcagcccttgcaatgacctgagcatcgtgaacccagcccggaagggcctgtacgagggaaccggcagactgttcttcgagttttacagactgctgcacgacgcccggcctaaggaaggcgacgaccggcccttcttttggctgttcgagaatgtggtggccatgggagtcagcgacaagcgggatattagccggttcctggagagcaaccccgtgatgatcgatgccaaggaagtgagcgccgcccaccgggccagatacttctggggcaatctgcctggcatgaacagacccctggccagcaccgtgaacgacaagctggagctgcaggagtgcctggagcacggccggatcgccaagttcagcaaggtgagaaccatcaccacccgaagcaacagcatcaaacaaggcaaggaccagcactttcctgtgttcatgaacgagaaggaggacatcctgtggtgtaccgagatggagagagtgttcgggttcccagtccactacacagatgtcagcaacatgtctagactggccagacagagactgctgggaagaagctggtccgtccctgtgatcagacacctgttcgcccctctgaaggagtacttcgcctgcgtgagcagcggcaacagcaacgccaacagccggggccccagcttctctagcggcctggtgccactgtccctgagagggagccacatgggccccatggagatctacaaaaccgtgagcgcctggaagcggcagcctgtgcgcgtgctgagcctgtttcggaatatcgataaagtcctgaaaagcctgggattcctggagagcggctctggctccggcggtggcaccctgaagtacgtggaggatgtgacaaacgtggtcagacgggatgtggagaagtggggccccttcgatctggtgtacggcagcacccaacccctgggcagctcttgtgaccggtgccctggctggtacatgtttcagttccaccggatcctgcagtacgccctgccgagacaggagtcccagcggccattcttttggattttcatggacaacttgctgctgaccgaggatgaccaggaaactaccactcggttcctgcagaccgaagccgtgaccctgcaggacgtgagaggccgggactaccagaacgccatgcgggtgtggtccaacatccctggactgaaaagcaagcacgcacctctgacccctaaagaagaggagtacctgcaggcccaggtgcggagcagaagcaagctggacgcccctaaggtggatctgctggtgaagaattgcctcctgcccctgagagagtacttcaagtatttcagccagaatagtctgcccctgggaggcagcggcggcggcacccccgacgtggtgaccttcgaggacgtggccgtgtgcttcagcagcggcgagtggcagtgcctgaccagggcccagaggcacctgtacaccgacgtgatgctggagaactacggcaacatgctgagcgccggcctggcctgccccaagccccccctgatcagccacctggagcagggcgccgtgccctgcgccgaggacctgcaggactggggcttcctgacctgcagcttccccgtgagcggcggcccaagcagcggcgcccctcctcccagcggcggcagcccagccggctccccaacctctaccgaggagggcacctctgagtccgccacccccgagagcggccctggcacctccaccgagcccagcgagggcagcgcacccggcagccctgccggcagccccacctccacagaggagggaaccagcaccgagcccagcgaaggcagcgccccaggcaccagcaccgagcctagtgagcaggagattaaacggatcaacaagatcagaagaagacttgtgaaagacagcaacaccaagaaggccggcaagacaggccccatgaaaaccctgctggttagagtgatgacacccgatctgagagagcggctggaaaacctgagaaagaagcctgaaaatatcccccagcccatcagcaatacatctagagccaacctgaataagctgctgaccgattacaccgaaatgaagaaggcgatcctgcatgtgtactgggaagagttccagaaggaccctgtgggcctgatgagccgggtggcccagcctgccagcaagaagatcgatcagaacaagctgaaacctgagatggacgagaagggcaacctgaccaccgccggctttgcctgctctcagtgtggccagcccctgttcgtgtacaagctggagcaggtgtctgagaagggcaaggcttacaccaactacttcggacggtgcaatgtggccgagcacgaaaagctgatcctgctggcccagctgaagcccgagaaggatagcgacgaagccgtgacatatagcctgggaaagtttgggcagagggccctggatttctacagcattcatgtgaccaaggagtccacccaccccgtgaagcccctggcccagatcgccggaaacagatacgcctccggacctgtgggaaaggccctgagcgacgcatgtatgggcacaatcgcctccttcctgtctaagtaccaggacatcatcatcgaacaccagaaggtggtgaagggcaaccagaagagactggagagcctgcgggagctggccggcaaggaaaacctggaataccctagcgtgaccctgccacctcagcctcacaccaaggagggcgttgatgcctacaacgaagtgatcgcccgggtgcgaatgtgggtgaacctgaacctgtggcagaagctgaagctaagcagagatgatgccaagcctctgctgagactgaagggattcccttcctttcctctggtcgagagacaggccaacgaagtggactggtgggacatggtgtgtaacgtgaagaagctgatcaacgagaaaaaggaggatggcaaggtgttttggcagaatctggctggctacaagagacaggaagccctgagaccatacctgagcagcgaggaagatcggaagaagggaaagaaattcgctcggtaccagctgggcgacctgctgctgcacctggaaaagaagcacggcgaggactggggaaaggtgtacgacgaggcctgggagcggattgacaagaaagtggaaggcctgagcaagcacatcaagctggaagaggaacggagaagcgaggacgcccagagcaaggccgccctgaccgactggctgcgggctaaggccagcttcgtgatcgagggcctgaaggaggccgacaaggacgagttctgcagatgcgagctgaagctgcagaagtggtacggggacctgcggggaaagcccttcgccatcgaagccgagaacagcatcctggacatcagcggcttcagcaagcagtacaactgtgccttcatctggcagaaggacggcgtgaagaagctgaacctgtacctgatcatcaactacttcaagggcggcaagctgcggttcaagaagatcaaacctgaagccttcgaagccaacagattctacaccgtgatcaacaaaaagagcggcgagatcgtgcccatggaggtgaacttcaacttcgacgaccccaacctgatcatcctgcctctggcctttggcaagagacagggcagagaattcatctggaacgacctgctgtccctggaaaccggcagcctgaagctggccaacggaagagtgatcgagaagacactgtacaacagaagaacccggcaggatgagcctgccctgttcgtggccctgaccttcgagcggcgggaggtcctggactcctccaatatcaaaccaatgaacctgatcggcgtggcaagaggcgaaaacatccccgccgtgatcgccctgaccgaccccgagggctgcccactgagccggtttaaggatagcctgggaaacccaacccacatcctgagaatcggcgagagctataaggagaagcagcggaccatccaggccaagaaggaggtggagcagcggagagccggcggctacagccggaagtacgccagcaaagccaagaatctggcagacgatatggtgagaaacaccgctagagatctgctgtactacgccgtgacccaggatgccatgctgatcttcgccaacctgagccggggcttcggccggcagggcaagcggaccttcatggccgagagacagtacacacggatggaggactggctgaccgccaagctggcctacgagggcctgagcaagacctacctgtccaagacactggcccagtacacctccaagacatgcagcaactgtgggtttaccatcaccagcgccgactacgacagggtgctggagaagctgaagaagacagcaacaggctggatgaccacaattaacggcaaggagctgaaggtggagggccagattacctactacaacagatacaagagacagaacgtagtcaaggacctgtccgtcgagctggatagactgagcgaagaatctgtgaacaacgacatctcctcctggacaaagggcagaagcggagaagctctgagcctcctgaagaaaagattctcccatagacccgtgcaggagaagttcgtgtgcctgaactgcggcttcgagacacacgcagccgagcaagccgccctgaacatcgccagatcctggctgttcctgcggagccaggagtacaagaaataccagacaaacaagacaaccggcaacaccgataagagagccttcgtcgagacctggcagtccttttaccggaagaagcttaaggaggtgtggaaacctgccgtgcggtctggcggatctggcggaggctccaccagccccaagaaaaagagaaaagtctaagctgccttctgcggggcttgccttctggccatgcccttcttctctcccttgcacctgtacctcttggtctttgaataaagcctgagtaggaaggctagcaaaaaaaaaaaaaaaaaaaaaaaaaaaaaaaaaaaaaaaaaaaaaaaaaaaaaaaaaaaaaaaaaaaaaaaaaaaaaaaa

SEQ ID NO: 12970 - RNA, 5785 nt, synthetic construct
  source 1..5785: mol_type = other RNA
aggaaataagagagaaaagaagagtaagaagaaatataagagccaccatggcccctaagaagaagcgtaaagtgagccggatggaacgcctcgtctacgaggtgcggcagaagtgcagaaacatcgaggacatctgcatctcctgcggatctctgaacgtgaccctggagcacccactgttcatcggcggcatgtgccagaactgtaaaaactgttttctggagtgtgcctatcaatacgacgatgacggctaccagagctactgcaccatctgttgcggcggaagagaggtgctgatgtgtggaaataacaactgctgccggtgcttctgcgtggaatgcgtggacctgctggtgggccccggcgccgcccaggccgctattaaggaagatccttggaactgctacatgtgcggccacaagggcacatacggcctgctgagacggagagaggactggcctagcagactgcagatgttcttcgccaataaccacgaccaggagttcgacccccctaaggtgtaccctcccgtccccgccgagaagagaaagcccatccgggtcctgagcctgttcgatggcatcgccaccggtctgctggtgctgaaggacctgggcatccaggtggataggtacattgcctccgaggtgtgcgaggactccatcaccgtgggaatggtgcgtcatcagggcaagatcatgtacgtgggcgacgtgcggagcgtgacacagaagcatatccaggagtggggccctttcgacctggtgatcggcggcagcccttgcaatgacctgagcatcgtgaacccagcccggaagggcctgtacgagggaaccggcagactgttcttcgagttttacagactgctgcacgacgcccggcctaaggaaggcgacgaccggcccttcttttggctgttcgagaatgtggtggccatgggagtcagcgacaagcgggatattagccggttcctggagagcaaccccgtgatgatcgatgccaaggaagtgagcgccgcccaccgggccagatacttctggggcaatctgcctggcatgaacagacccctggccagcaccgtgaacgacaagctggagctgcaggagtgcctggagcacggccggatcgccaagttcagcaaggtgagaaccatcaccacccgaagcaacagcatcaaacaaggcaaggaccagcactttcctgtgttcatgaacgagaaggaggacatcctgtggtgtaccgagatggagagagtgttcgggttcccagtccactacacagatgtcagcaacatgtctagactggccagacagagactgctgggaagaagctggtccgtccctgtgatcagacacctgttcgcccctctgaaggagtacttcgcctgcgtgagcagcggcaacagcaacgccaacagccggggccccagcttctctagcggcctggtgccactgtccctgagagggagccacatgggccccatggagatctacaaaaccgtgagcgcctggaagcggcagcctgtgcgcgtgctgagcctgtttcggaatatcgataaagtcctgaaaagcctgggattcctggagagcggctctggctccggcggtggcaccctgaagtacgtggaggatgtgacaaacgtggtcagacgggatgtggagaagtggggccccttcgatctggtgtacggcagcacccaacccctgggcagctcttgtgaccggtgccctggctggtacatgtttcagttccaccggatcctgcagtacgccctgccgagacaggagtcccagcggccattcttttggattttcatggacaacttgctgctgaccgaggatgaccaggaaactaccactcggttcctgcagaccgaagccgtgaccctgcaggacgtgagaggccgggactaccagaacgccatgcgggtgtggtccaacatccctggactgaaaagcaagcacgcacctctgacccctaaagaagaggagtacctgcaggcccaggtgcggagcagaagcaagctggacgcccctaaggtggatctgctggtgaagaattgcctcctgcccctgagagagtacttcaagtatttcagccagaatagtctgcccctgggaggcagcggcggcggcctgctgaccttcgaggacgtggccgtgagcttcagcgaggaggagtggaagctgctggaccccacccagaagatcctgtacaacgacgtgatgcaggagaactacgagaccgtgatcagcctgggcctgaagctgaagaacgacaccggcaacgaccagcccatcagcctgagcgccctggagatccaggccagcggctgcaaggtgctgaggaaggccaggatgaaggtggcccagaagaccggcggcccaagcagcggcgcccctcctcccagcggcggcagcccagccggctccccaacctctaccgaggagggcacctctgagtccgccacccccgagagcggccctggcacctccaccgagcccagcgagggcagcgcacccggcagccctgccggcagccccacctccacagaggagggaaccagcaccgagcccagcgaaggcagcgccccaggcaccagcaccgagcctagtgagcaggagattaaacggatcaacaagatcagaagaagacttgtgaaagacagcaacaccaagaaggccggcaagacaggccccatgaaaaccctgctggttagagtgatgacacccgatctgagagagcggctggaaaacctgagaaagaagcctgaaaatatcccccagcccatcagcaatacatctagagccaacctgaataagctgctgaccgattacaccgaaatgaagaaggcgatcctgcatgtgtactgggaagagttccagaaggaccctgtgggcctgatgagccgggtggcccagcctgccagcaagaagatcgatcagaacaagctgaaacctgagatggacgagaagggcaacctgaccaccgccggctttgcctgctctcagtgtggccagcccctgttcgtgtacaagctggagcaggtgtctgagaagggcaaggcttacaccaactacttcggacggtgcaatgtggccgagcacgaaaagctgatcctgctggcccagctgaagcccgagaaggatagcgacgaagccgtgacatatagcctgggaaagtttgggcagagggccctggatttctacagcattcatgtgaccaaggagtccacccaccccgtgaagcccctggcccagatcgccggaaacagatacgcctccggacctgtgggaaaggccctgagcgacgcatgtatgggcacaatcgcctccttcctgtctaagtaccaggacatcatcatcgaacaccagaaggtggtgaagggcaaccagaagagactggagagcctgcgggagctggccggcaaggaaaacctggaataccctagcgtgaccctgccacctcagcctcacaccaaggagggcgttgatgcctacaacgaagtgatcgcccgggtgcgaatgtgggtgaacctgaacctgtggcagaagctgaagctaagcagagatgatgccaagcctctgctgagactgaagggattcccttcctttcctctggtcgagagacaggccaacgaagtggactggtgggacatggtgtgtaacgtgaagaagctgatcaacgagaaaaaggaggatggcaaggtgttttggcagaatctggctggctacaagagacaggaagccctgagaccatacctgagcagcgaggaagatcggaagaagggaaagaaattcgctcggtaccagctgggcgacctgctgctgcacctggaaaagaagcacggcgaggactggggaaaggtgtacgacgaggcctgggagcggattgacaagaaagtggaaggcctgagcaagcacatcaagctggaagaggaacggagaagcgaggacgcccagagcaaggccgccctgaccgactggctgcgggctaaggccagcttcgtgatcgagggcctgaaggaggccgacaaggacgagttctgcagatgcgagctgaagctgcagaagtggtacggggacctgcggggaaagcccttcgccatcgaagccgagaacagcatcctggacatcagcggcttcagcaagcagtacaactgtgccttcatctggcagaaggacggcgtgaagaagctgaacctgtacctgatcatcaactacttcaagggcggcaagctgcggttcaagaagatcaaacctgaagccttcgaagccaacagattctacaccgtgatcaacaaaaagagcggcgagatcgtgcccatggaggtgaacttcaacttcgacgaccccaacctgatcatcctgcctctggcctttggcaagagacagggcagagaattcatctggaacgacctgctgtccctggaaaccggcagcctgaagctggccaacggaagagtgatcgagaagacactgtacaacagaagaacccggcaggatgagcctgccctgttcgtggccctgaccttcgagcggcgggaggtcctggactcctccaatatcaaaccaatgaacctgatcggcgtggcaagaggcgaaaacatccccgccgtgatcgccctgaccgaccccgagggctgcccactgagccggtttaaggatagcctgggaaacccaacccacatcctgagaatcggcgagagctataaggagaagcagcggaccatccaggccaagaaggaggtggagcagcggagagccggcggctacagccggaagtacgccagcaaagccaagaatctggcagacgatatggtgagaaacaccgctagagatctgctgtactacgccgtgacccaggatgccatgctgatcttcgccaacctgagccggggcttcggccggcagggcaagcggaccttcatggccgagagacagtacacacggatggaggactggctgaccgccaagctggcctacgagggcctgagcaagacctacctgtccaagacactggcccagtacacctccaagacatgcagcaactgtgggtttaccatcaccagcgccgactacgacagggtgctggagaagctgaagaagacagcaacaggctggatgaccacaattaacggcaaggagctgaaggtggagggccagattacctactacaacagatacaagagacagaacgtagtcaaggacctgtccgtcgagctggatagactgagcgaagaatctgtgaacaacgacatctcctcctggacaaagggcagaagcggagaagctctgagcctcctgaagaaaagattctcccatagacccgtgcaggagaagttcgtgtgcctgaactgcggcttcgagacacacgcagccgagcaagccgccctgaacatcgccagatcctggctgttcctgcggagccaggagtacaagaaataccagacaaacaagacaaccggcaacaccgataagagagccttcgtcgagacctggcagtccttttaccggaagaagcttaaggaggtgtggaaacctgccgtgcggtctggcggatctggcggaggctccaccagccccaagaaaaagagaaaagtctaagctgccttctgcggggcttgccttctggccatgcccttcttctctcccttgcacctgtacctcttggtctttgaataaagcctgagtaggaaggctagcaaaaaaaaaaaaaaaaaaaaaaaaaaaaaaaaaaaaaaaaaaaaaaaaaaaaaaaaaaaaaaaaaaaaaaaaaaaaaaaa

SEQ ID NO: 12971 - RNA, 5785 nt, synthetic construct
  source 1..5785: mol_type = other RNA
aggaaataagagagaaaagaagagtaagaagaaatataagagccaccatggcccctaagaagaagcgtaaagtgagccggatggaacgcctcgtctacgaggtgcggcagaagtgcagaaacatcgaggacatctgcatctcctgcggatctctgaacgtgaccctggagcacccactgttcatcggcggcatgtgccagaactgtaaaaactgttttctggagtgtgcctatcaatacgacgatgacggctaccagagctactgcaccatctgttgcggcggaagagaggtgctgatgtgtggaaataacaactgctgccggtgcttctgcgtggaatgcgtggacctgctggtgggccccggcgccgcccaggccgctattaaggaagatccttggaactgctacatgtgcggccacaagggcacatacggcctgctgagacggagagaggactggcctagcagactgcagatgttcttcgccaataaccacgaccaggagttcgacccccctaaggtgtaccctcccgtccccgccgagaagagaaagcccatccgggtcctgagcctgttcgatggcatcgccaccggtctgctggtgctgaaggacctgggcatccaggtggataggtacattgcctccgaggtgtgcgaggactccatcaccgtgggaatggtgcgtcatcagggcaagatcatgtacgtgggcgacgtgcggagcgtgacacagaagcatatccaggagtggggccctttcgacctggtgatcggcggcagcccttgcaatgacctgagcatcgtgaacccagcccggaagggcctgtacgagggaaccggcagactgttcttcgagttttacagactgctgcacgacgcccggcctaaggaaggcgacgaccggcccttcttttggctgttcgagaatgtggtggccatgggagtcagcgacaagcgggatattagccggttcctggagagcaaccccgtgatgatcgatgccaaggaagtgagcgccgcccaccgggccagatacttctggggcaatctgcctggcatgaacagacccctggccagcaccgtgaacgacaagctggagctgcaggagtgcctggagcacggccggatcgccaagttcagcaaggtgagaaccatcaccacccgaagcaacagcatcaaacaaggcaaggaccagcactttcctgtgttcatgaacgagaaggaggacatcctgtggtgtaccgagatggagagagtgttcgggttcccagtccactacacagatgtcagcaacatgtctagactggccagacagagactgctgggaagaagctggtccgtccctgtgatcagacacctgttcgcccctctgaaggagtacttcgcctgcgtgagcagcggcaacagcaacgccaacagccggggccccagcttctctagcggcctggtgccactgtccctgagagggagccacatgggccccatggagatctacaaaaccgtgagcgcctggaagcggcagcctgtgcgcgtgctgagcctgtttcggaatatcgataaagtcctgaaaagcctgggattcctggagagcggctctggctccggcggtggcaccctgaagtacgtggaggatgtgacaaacgtggtcagacgggatgtggagaagtggggccccttcgatctggtgtacggcagcacccaacccctgggcagctcttgtgaccggtgccctggctggtacatgtttcagttccaccggatcctgcagtacgccctgccgagacaggagtcccagcggccattcttttggattttcatggacaacttgctgctgaccgaggatgaccaggaaactaccactcggttcctgcagaccgaagccgtgaccctgcaggacgtgagaggccgggactaccagaacgccatgcgggtgtggtccaacatccctggactgaaaagcaagcacgcacctctgacccctaaagaagaggagtacctgcaggcccaggtgcggagcagaagcaagctggacgcccctaaggtggatctgctggtgaagaattgcctcctgcccctgagagagtacttcaagtatttcagccagaatagtctgcccctgggaggcagcggcggcggccaggccagcgtgaccttcagggacgtggccgtggacttcaccggcgaggagtggaggtgcctggagcccgcccagagggccctgtacagggacgtgatgctggagacctacgagaacctggtgttcctgggcctgagcgtgcccatcagcaagctggacctgatcttcctgctggagaggggcggcgccctgagcaggcccatgggcagggtgcccagcgacagctgccccgacagcttcatcggcggcccaagcagcggcgcccctcctcccagcggcggcagcccagccggctccccaacctctaccgaggagggcacctctgagtccgccacccccgagagcggccctggcacctccaccgagcccagcgagggcagcgcacccggcagccctgccggcagccccacctccacagaggagggaaccagcaccgagcccagcgaaggcagcgccccaggcaccagcaccgagcctagtgagcaggagattaaacggatcaacaagatcagaagaagacttgtgaaagacagcaacaccaagaaggccggcaagacaggccccatgaaaaccctgctggttagagtgatgacacccgatctgagagagcggctggaaaacctgagaaagaagcctgaaaatatcccccagcccatcagcaatacatctagagccaacctgaataagctgctgaccgattacaccgaaatgaagaaggcgatcctgcatgtgtactgggaagagttccagaaggaccctgtgggcctgatgagccgggtggcccagcctgccagcaagaagatcgatcagaacaagctgaaacctgagatggacgagaagggcaacctgaccaccgccggctttgcctgctctcagtgtggccagcccctgttcgtgtacaagctggagcaggtgtctgagaagggcaaggcttacaccaactacttcggacggtgcaatgtggccgagcacgaaaagctgatcctgctggcccagctgaagcccgagaaggatagcgacgaagccgtgacatatagcctgggaaagtttgggcagagggccctggatttctacagcattcatgtgaccaaggagtccacccaccccgtgaagcccctggcccagatcgccggaaacagatacgcctccggacctgtgggaaaggccctgagcgacgcatgtatgggcacaatcgcctccttcctgtctaagtaccaggacatcatcatcgaacaccagaaggtggtgaagggcaaccagaagagactggagagcctgcgggagctggccggcaaggaaaacctggaataccctagcgtgaccctgccacctcagcctcacaccaaggagggcgttgatgcctacaacgaagtgatcgcccgggtgcgaatgtgggtgaacctgaacctgtggcagaagctgaagctaagcagagatgatgccaagcctctgctgagactgaagggattcccttcctttcctctggtcgagagacaggccaacgaagtggactggtgggacatggtgtgtaacgtgaagaagctgatcaacgagaaaaaggaggatggcaaggtgttttggcagaatctggctggctacaagagacaggaagccctgagaccatacctgagcagcgaggaagatcggaagaagggaaagaaattcgctcggtaccagctgggcgacctgctgctgcacctggaaaagaagcacggcgaggactggggaaaggtgtacgacgaggcctgggagcggattgacaagaaagtggaaggcctgagcaagcacatcaagctggaagaggaacggagaagcgaggacgcccagagcaaggccgccctgaccgactggctgcgggctaaggccagcttcgtgatcgagggcctgaaggaggccgacaaggacgagttctgcagatgcgagctgaagctgcagaagtggtacggggacctgcggggaaagcccttcgccatcgaagccgagaacagcatcctggacatcagcggcttcagcaagcagtacaactgtgccttcatctggcagaaggacggcgtgaagaagctgaacctgtacctgatcatcaactacttcaagggcggcaagctgcggttcaagaagatcaaacctgaagccttcgaagccaacagattctacaccgtgatcaacaaaaagagcggcgagatcgtgcccatggaggtgaacttcaacttcgacgaccccaacctgatcatcctgcctctggcctttggcaagagacagggcagagaattcatctggaacgacctgctgtccctggaaaccggcagcctgaagctggccaacggaagagtgatcgagaagacactgtacaacagaagaacccggcaggatgagcctgccctgttcgtggccctgaccttcgagcggcgggaggtcctggactcctccaatatcaaaccaatgaacctgatcggcgtggcaagaggcgaaaacatccccgccgtgatcgccctgaccgaccccgagggctgcccactgagccggtttaaggatagcctgggaaacccaacccacatcctgagaatcggcgagagctataaggagaagcagcggaccatccaggccaagaaggaggtggagcagcggagagccggcggctacagccggaagtacgccagcaaagccaagaatctggcagacgatatggtgagaaacaccgctagagatctgctgtactacgccgtgacccaggatgccatgctgatcttcgccaacctgagccggggcttcggccggcagggcaagcggaccttcatggccgagagacagtacacacggatggaggactggctgaccgccaagctggcctacgagggcctgagcaagacctacctgtccaagacactggcccagtacacctccaagacatgcagcaactgtgggtttaccatcaccagcgccgactacgacagggtgctggagaagctgaagaagacagcaacaggctggatgaccacaattaacggcaaggagctgaaggtggagggccagattacctactacaacagatacaagagacagaacgtagtcaaggacctgtccgtcgagctggatagactgagcgaagaatctgtgaacaacgacatctcctcctggacaaagggcagaagcggagaagctctgagcctcctgaagaaaagattctcccatagacccgtgcaggagaagttcgtgtgcctgaactgcggcttcgagacacacgcagccgagcaagccgccctgaacatcgccagatcctggctgttcctgcggagccaggagtacaagaaataccagacaaacaagacaaccggcaacaccgataagagagccttcgtcgagacctggcagtccttttaccggaagaagcttaaggaggtgtggaaacctgccgtgcggtctggcggatctggcggaggctccaccagccccaagaaaaagagaaaagtctaagctgccttctgcggggcttgccttctggccatgcccttcttctctcccttgcacctgtacctcttggtctttgaataaagcctgagtaggaaggctagcaaaaaaaaaaaaaaaaaaaaaaaaaaaaaaaaaaaaaaaaaaaaaaaaaaaaaaaaaaaaaaaaaaaaaaaaaaaaaaaa

SEQ ID NO: 12972 - RNA, 5785 nt, synthetic construct
  source 1..5785: mol_type = other RNA
aggaaataagagagaaaagaagagtaagaagaaatataagagccaccatggcccctaagaagaagcgtaaagtgagccggatggaacgcctcgtctacgaggtgcggcagaagtgcagaaacatcgaggacatctgcatctcctgcggatctctgaacgtgaccctggagcacccactgttcatcggcggcatgtgccagaactgtaaaaactgttttctggagtgtgcctatcaatacgacgatgacggctaccagagctactgcaccatctgttgcggcggaagagaggtgctgatgtgtggaaataacaactgctgccggtgcttctgcgtggaatgcgtggacctgctggtgggccccggcgccgcccaggccgctattaaggaagatccttggaactgctacatgtgcggccacaagggcacatacggcctgctgagacggagagaggactggcctagcagactgcagatgttcttcgccaataaccacgaccaggagttcgacccccctaaggtgtaccctcccgtccccgccgagaagagaaagcccatccgggtcctgagcctgttcgatggcatcgccaccggtctgctggtgctgaaggacctgggcatccaggtggataggtacattgcctccgaggtgtgcgaggactccatcaccgtgggaatggtgcgtcatcagggcaagatcatgtacgtgggcgacgtgcggagcgtgacacagaagcatatccaggagtggggccctttcgacctggtgatcggcggcagcccttgcaatgacctgagcatcgtgaacccagcccggaagggcctgtacgagggaaccggcagactgttcttcgagttttacagactgctgcacgacgcccggcctaaggaaggcgacgaccggcccttcttttggctgttcgagaatgtggtggccatgggagtcagcgacaagcgggatattagccggttcctggagagcaaccccgtgatgatcgatgccaaggaagtgagcgccgcccaccgggccagatacttctggggcaatctgcctggcatgaacagacccctggccagcaccgtgaacgacaagctggagctgcaggagtgcctggagcacggccggatcgccaagttcagcaaggtgagaaccatcaccacccgaagcaacagcatcaaacaaggcaaggaccagcactttcctgtgttcatgaacgagaaggaggacatcctgtggtgtaccgagatggagagagtgttcgggttcccagtccactacacagatgtcagcaacatgtctagactggccagacagagactgctgggaagaagctggtccgtccctgtgatcagacacctgttcgcccctctgaaggagtacttcgcctgcgtgagcagcggcaacagcaacgccaacagccggggccccagcttctctagcggcctggtgccactgtccctgagagggagccacatgggccccatggagatctacaaaaccgtgagcgcctggaagcggcagcctgtgcgcgtgctgagcctgtttcggaatatcgataaagtcctgaaaagcctgggattcctggagagcggctctggctccggcggtggcaccctgaagtacgtggaggatgtgacaaacgtggtcagacgggatgtggagaagtggggccccttcgatctggtgtacggcagcacccaacccctgggcagctcttgtgaccggtgccctggctggtacatgtttcagttccaccggatcctgcagtacgccctgccgagacaggagtcccagcggccattcttttggattttcatggacaacttgctgctgaccgaggatgaccaggaaactaccactcggttcctgcagaccgaagccgtgaccctgcaggacgtgagaggccgggactaccagaacgccatgcgggtgtggtccaacatccctggactgaaaagcaagcacgcacctctgacccctaaagaagaggagtacctgcaggcccaggtgcggagcagaagcaagctggacgcccctaaggtggatctgctggtgaagaattgcctcctgcccctgagagagtacttcaagtatttcagccagaatagtctgcccctgggaggcagcggcggcggcatgagcggcccccccggcagcctggagatggagcccctgcagttcagggacgtggccgtggagttcagcctggaggagtggcactgcctggacaccgcccagcagaacctgtacagggacgtgatgctggagaactacaggcacctggtgttcctgggcatcgtggtgagcaagcccgacctgatcacctgcctggagcagggcaagaagcccctgaccatgaagaggcacgagatgatcgccggcggcccaagcagcggcgcccctcctcccagcggcggcagcccagccggctccccaacctctaccgaggagggcacctctgagtccgccacccccgagagcggccctggcacctccaccgagcccagcgagggcagcgcacccggcagccctgccggcagccccacctccacagaggagggaaccagcaccgagcccagcgaaggcagcgccccaggcaccagcaccgagcctagtgagcaggagattaaacggatcaacaagatcagaagaagacttgtgaaagacagcaacaccaagaaggccggcaagacaggccccatgaaaaccctgctggttagagtgatgacacccgatctgagagagcggctggaaaacctgagaaagaagcctgaaaatatcccccagcccatcagcaatacatctagagccaacctgaataagctgctgaccgattacaccgaaatgaagaaggcgatcctgcatgtgtactgggaagagttccagaaggaccctgtgggcctgatgagccgggtggcccagcctgccagcaagaagatcgatcagaacaagctgaaacctgagatggacgagaagggcaacctgaccaccgccggctttgcctgctctcagtgtggccagcccctgttcgtgtacaagctggagcaggtgtctgagaagggcaaggcttacaccaactacttcggacggtgcaatgtggccgagcacgaaaagctgatcctgctggcccagctgaagcccgagaaggatagcgacgaagccgtgacatatagcctgggaaagtttgggcagagggccctggatttctacagcattcatgtgaccaaggagtccacccaccccgtgaagcccctggcccagatcgccggaaacagatacgcctccggacctgtgggaaaggccctgagcgacgcatgtatgggcacaatcgcctccttcctgtctaagtaccaggacatcatcatcgaacaccagaaggtggtgaagggcaaccagaagagactggagagcctgcgggagctggccggcaaggaaaacctggaataccctagcgtgaccctgccacctcagcctcacaccaaggagggcgttgatgcctacaacgaagtgatcgcccgggtgcgaatgtgggtgaacctgaacctgtggcagaagctgaagctaagcagagatgatgccaagcctctgctgagactgaagggattcccttcctttcctctggtcgagagacaggccaacgaagtggactggtgggacatggtgtgtaacgtgaagaagctgatcaacgagaaaaaggaggatggcaaggtgttttggcagaatctggctggctacaagagacaggaagccctgagaccatacctgagcagcgaggaagatcggaagaagggaaagaaattcgctcggtaccagctgggcgacctgctgctgcacctggaaaagaagcacggcgaggactggggaaaggtgtacgacgaggcctgggagcggattgacaagaaagtggaaggcctgagcaagcacatcaagctggaagaggaacggagaagcgaggacgcccagagcaaggccgccctgaccgactggctgcgggctaaggccagcttcgtgatcgagggcctgaaggaggccgacaaggacgagttctgcagatgcgagctgaagctgcagaagtggtacggggacctgcggggaaagcccttcgccatcgaagccgagaacagcatcctggacatcagcggcttcagcaagcagtacaactgtgccttcatctggcagaaggacggcgtgaagaagctgaacctgtacctgatcatcaactacttcaagggcggcaagctgcggttcaagaagatcaaacctgaagccttcgaagccaacagattctacaccgtgatcaacaaaaagagcggcgagatcgtgcccatggaggtgaacttcaacttcgacgaccccaacctgatcatcctgcctctggcctttggcaagagacagggcagagaattcatctggaacgacctgctgtccctggaaaccggcagcctgaagctggccaacggaagagtgatcgagaagacactgtacaacagaagaacccggcaggatgagcctgccctgttcgtggccctgaccttcgagcggcgggaggtcctggactcctccaatatcaaaccaatgaacctgatcggcgtggcaagaggcgaaaacatccccgccgtgatcgccctgaccgaccccgagggctgcccactgagccggtttaaggatagcctgggaaacccaacccacatcctgagaatcggcgagagctataaggagaagcagcggaccatccaggccaagaaggaggtggagcagcggagagccggcggctacagccggaagtacgccagcaaagccaagaatctggcagacgatatggtgagaaacaccgctagagatctgctgtactacgccgtgacccaggatgccatgctgatcttcgccaacctgagccggggcttcggccggcagggcaagcggaccttcatggccgagagacagtacacacggatggaggactggctgaccgccaagctggcctacgagggcctgagcaagacctacctgtccaagacactggcccagtacacctccaagacatgcagcaactgtgggtttaccatcaccagcgccgactacgacagggtgctggagaagctgaagaagacagcaacaggctggatgaccacaattaacggcaaggagctgaaggtggagggccagattacctactacaacagatacaagagacagaacgtagtcaaggacctgtccgtcgagctggatagactgagcgaagaatctgtgaacaacgacatctcctcctggacaaagggcagaagcggagaagctctgagcctcctgaagaaaagattctcccatagacccgtgcaggagaagttcgtgtgcctgaactgcggcttcgagacacacgcagccgagcaagccgccctgaacatcgccagatcctggctgttcctgcggagccaggagtacaagaaataccagacaaacaagacaaccggcaacaccgataagagagccttcgtcgagacctggcagtccttttaccggaagaagcttaaggaggtgtggaaacctgccgtgcggtctggcggatctggcggaggctccaccagccccaagaaaaagagaaaagtctaagctgccttctgcggggcttgccttctggccatgcccttcttctctcccttgcacctgtacctcttggtctttgaataaagcctgagtaggaaggctagcaaaaaaaaaaaaaaaaaaaaaaaaaaaaaaaaaaaaaaaaaaaaaaaaaaaaaaaaaaaaaaaaaaaaaaaaaaaaaaaa

SEQ ID NO: 12973 - RNA, 5785 nt, synthetic construct
  source 1..5785: mol_type = other RNA
aggaaataagagagaaaagaagagtaagaagaaatataagagccaccatggcccctaagaagaagcgtaaagtgagccggatggaacgcctcgtctacgaggtgcggcagaagtgcagaaacatcgaggacatctgcatctcctgcggatctctgaacgtgaccctggagcacccactgttcatcggcggcatgtgccagaactgtaaaaactgttttctggagtgtgcctatcaatacgacgatgacggctaccagagctactgcaccatctgttgcggcggaagagaggtgctgatgtgtggaaataacaactgctgccggtgcttctgcgtggaatgcgtggacctgctggtgggccccggcgccgcccaggccgctattaaggaagatccttggaactgctacatgtgcggccacaagggcacatacggcctgctgagacggagagaggactggcctagcagactgcagatgttcttcgccaataaccacgaccaggagttcgacccccctaaggtgtaccctcccgtccccgccgagaagagaaagcccatccgggtcctgagcctgttcgatggcatcgccaccggtctgctggtgctgaaggacctgggcatccaggtggataggtacattgcctccgaggtgtgcgaggactccatcaccgtgggaatggtgcgtcatcagggcaagatcatgtacgtgggcgacgtgcggagcgtgacacagaagcatatccaggagtggggccctttcgacctggtgatcggcggcagcccttgcaatgacctgagcatcgtgaacccagcccggaagggcctgtacgagggaaccggcagactgttcttcgagttttacagactgctgcacgacgcccggcctaaggaaggcgacgaccggcccttcttttggctgttcgagaatgtggtggccatgggagtcagcgacaagcgggatattagccggttcctggagagcaaccccgtgatgatcgatgccaaggaagtgagcgccgcccaccgggccagatacttctggggcaatctgcctggcatgaacagacccctggccagcaccgtgaacgacaagctggagctgcaggagtgcctggagcacggccggatcgccaagttcagcaaggtgagaaccatcaccacccgaagcaacagcatcaaacaaggcaaggaccagcactttcctgtgttcatgaacgagaaggaggacatcctgtggtgtaccgagatggagagagtgttcgggttcccagtccactacacagatgtcagcaacatgtctagactggccagacagagactgctgggaagaagctggtccgtccctgtgatcagacacctgttcgcccctctgaaggagtacttcgcctgcgtgagcagcggcaacagcaacgccaacagccggggccccagcttctctagcggcctggtgccactgtccctgagagggagccacatgggccccatggagatctacaaaaccgtgagcgcctggaagcggcagcctgtgcgcgtgctgagcctgtttcggaatatcgataaagtcctgaaaagcctgggattcctggagagcggctctggctccggcggtggcaccctgaagtacgtggaggatgtgacaaacgtggtcagacgggatgtggagaagtggggccccttcgatctggtgtacggcagcacccaacccctgggcagctcttgtgaccggtgccctggctggtacatgtttcagttccaccggatcctgcagtacgccctgccgagacaggagtcccagcggccattcttttggattttcatggacaacttgctgctgaccgaggatgaccaggaaactaccactcggttcctgcagaccgaagccgtgaccctgcaggacgtgagaggccgggactaccagaacgccatgcgggtgtggtccaacatccctggactgaaaagcaagcacgcacctctgacccctaaagaagaggagtacctgcaggcccaggtgcggagcagaagcaagctggacgcccctaaggtggatctgctggtgaagaattgcctcctgcccctgagagagtacttcaagtatttcagccagaatagtctgcccctgggaggcagcggcggcggccccgagaccgtggtgagcttcgaggacgtggccgtgaggttcagccccgacgagtggcacctgctggacgacggccagaggaggctgtacagggacgtgctgagggagaactacagccacgtgaggagcctgggcttccccgtgcccgacctggccgtgatcttcaggatggagaggggcgaggagccctggccccccggcctgcccgccggcgagtggccctggggccagggccaggcccccggcggcccaagcagcggcgcccctcctcccagcggcggcagcccagccggctccccaacctctaccgaggagggcacctctgagtccgccacccccgagagcggccctggcacctccaccgagcccagcgagggcagcgcacccggcagccctgccggcagccccacctccacagaggagggaaccagcaccgagcccagcgaaggcagcgccccaggcaccagcaccgagcctagtgagcaggagattaaacggatcaacaagatcagaagaagacttgtgaaagacagcaacaccaagaaggccggcaagacaggccccatgaaaaccctgctggttagagtgatgacacccgatctgagagagcggctggaaaacctgagaaagaagcctgaaaatatcccccagcccatcagcaatacatctagagccaacctgaataagctgctgaccgattacaccgaaatgaagaaggcgatcctgcatgtgtactgggaagagttccagaaggaccctgtgggcctgatgagccgggtggcccagcctgccagcaagaagatcgatcagaacaagctgaaacctgagatggacgagaagggcaacctgaccaccgccggctttgcctgctctcagtgtggccagcccctgttcgtgtacaagctggagcaggtgtctgagaagggcaaggcttacaccaactacttcggacggtgcaatgtggccgagcacgaaaagctgatcctgctggcccagctgaagcccgagaaggatagcgacgaagccgtgacatatagcctgggaaagtttgggcagagggccctggatttctacagcattcatgtgaccaaggagtccacccaccccgtgaagcccctggcccagatcgccggaaacagatacgcctccggacctgtgggaaaggccctgagcgacgcatgtatgggcacaatcgcctccttcctgtctaagtaccaggacatcatcatcgaacaccagaaggtggtgaagggcaaccagaagagactggagagcctgcgggagctggccggcaaggaaaacctggaataccctagcgtgaccctgccacctcagcctcacaccaaggagggcgttgatgcctacaacgaagtgatcgcccgggtgcgaatgtgggtgaacctgaacctgtggcagaagctgaagctaagcagagatgatgccaagcctctgctgagactgaagggattcccttcctttcctctggtcgagagacaggccaacgaagtggactggtgggacatggtgtgtaacgtgaagaagctgatcaacgagaaaaaggaggatggcaaggtgttttggcagaatctggctggctacaagagacaggaagccctgagaccatacctgagcagcgaggaagatcggaagaagggaaagaaattcgctcggtaccagctgggcgacctgctgctgcacctggaaaagaagcacggcgaggactggggaaaggtgtacgacgaggcctgggagcggattgacaagaaagtggaaggcctgagcaagcacatcaagctggaagaggaacggagaagcgaggacgcccagagcaaggccgccctgaccgactggctgcgggctaaggccagcttcgtgatcgagggcctgaaggaggccgacaaggacgagttctgcagatgcgagctgaagctgcagaagtggtacggggacctgcggggaaagcccttcgccatcgaagccgagaacagcatcctggacatcagcggcttcagcaagcagtacaactgtgccttcatctggcagaaggacggcgtgaagaagctgaacctgtacctgatcatcaactacttcaagggcggcaagctgcggttcaagaagatcaaacctgaagccttcgaagccaacagattctacaccgtgatcaacaaaaagagcggcgagatcgtgcccatggaggtgaacttcaacttcgacgaccccaacctgatcatcctgcctctggcctttggcaagagacagggcagagaattcatctggaacgacctgctgtccctggaaaccggcagcctgaagctggccaacggaagagtgatcgagaagacactgtacaacagaagaacccggcaggatgagcctgccctgttcgtggccctgaccttcgagcggcgggaggtcctggactcctccaatatcaaaccaatgaacctgatcggcgtggcaagaggcgaaaacatccccgccgtgatcgccctgaccgaccccgagggctgcccactgagccggtttaaggatagcctgggaaacccaacccacatcctgagaatcggcgagagctataaggagaagcagcggaccatccaggccaagaaggaggtggagcagcggagagccggcggctacagccggaagtacgccagcaaagccaagaatctggcagacgatatggtgagaaacaccgctagagatctgctgtactacgccgtgacccaggatgccatgctgatcttcgccaacctgagccggggcttcggccggcagggcaagcggaccttcatggccgagagacagtacacacggatggaggactggctgaccgccaagctggcctacgagggcctgagcaagacctacctgtccaagacactggcccagtacacctccaagacatgcagcaactgtgggtttaccatcaccagcgccgactacgacagggtgctggagaagctgaagaagacagcaacaggctggatgaccacaattaacggcaaggagctgaaggtggagggccagattacctactacaacagatacaagagacagaacgtagtcaaggacctgtccgtcgagctggatagactgagcgaagaatctgtgaacaacgacatctcctcctggacaaagggcagaagcggagaagctctgagcctcctgaagaaaagattctcccatagacccgtgcaggagaagttcgtgtgcctgaactgcggcttcgagacacacgcagccgagcaagccgccctgaacatcgccagatcctggctgttcctgcggagccaggagtacaagaaataccagacaaacaagacaaccggcaacaccgataagagagccttcgtcgagacctggcagtccttttaccggaagaagcttaaggaggtgtggaaacctgccgtgcggtctggcggatctggcggaggctccaccagccccaagaaaaagagaaaagtctaagctgccttctgcggggcttgccttctggccatgcccttcttctctcccttgcacctgtacctcttggtctttgaataaagcctgagtaggaaggctagcaaaaaaaaaaaaaaaaaaaaaaaaaaaaaaaaaaaaaaaaaaaaaaaaaaaaaaaaaaaaaaaaaaaaaaaaaaaaaaaa

SEQ ID NO: 12974 - RNA, 5785 nt, synthetic construct
  source 1..5785: mol_type = other RNA
aggaaataagagagaaaagaagagtaagaagaaatataagagccaccatggcccctaagaagaagcgtaaagtgagccggatggaacgcctcgtctacgaggtgcggcagaagtgcagaaacatcgaggacatctgcatctcctgcggatctctgaacgtgaccctggagcacccactgttcatcggcggcatgtgccagaactgtaaaaactgttttctggagtgtgcctatcaatacgacgatgacggctaccagagctactgcaccatctgttgcggcggaagagaggtgctgatgtgtggaaataacaactgctgccggtgcttctgcgtggaatgcgtggacctgctggtgggccccggcgccgcccaggccgctattaaggaagatccttggaactgctacatgtgcggccacaagggcacatacggcctgctgagacggagagaggactggcctagcagactgcagatgttcttcgccaataaccacgaccaggagttcgacccccctaaggtgtaccctcccgtccccgccgagaagagaaagcccatccgggtcctgagcctgttcgatggcatcgccaccggtctgctggtgctgaaggacctgggcatccaggtggataggtacattgcctccgaggtgtgcgaggactccatcaccgtgggaatggtgcgtcatcagggcaagatcatgtacgtgggcgacgtgcggagcgtgacacagaagcatatccaggagtggggccctttcgacctggtgatcggcggcagcccttgcaatgacctgagcatcgtgaacccagcccggaagggcctgtacgagggaaccggcagactgttcttcgagttttacagactgctgcacgacgcccggcctaaggaaggcgacgaccggcccttcttttggctgttcgagaatgtggtggccatgggagtcagcgacaagcgggatattagccggttcctggagagcaaccccgtgatgatcgatgccaaggaagtgagcgccgcccaccgggccagatacttctggggcaatctgcctggcatgaacagacccctggccagcaccgtgaacgacaagctggagctgcaggagtgcctggagcacggccggatcgccaagttcagcaaggtgagaaccatcaccacccgaagcaacagcatcaaacaaggcaaggaccagcactttcctgtgttcatgaacgagaaggaggacatcctgtggtgtaccgagatggagagagtgttcgggttcccagtccactacacagatgtcagcaacatgtctagactggccagacagagactgctgggaagaagctggtccgtccctgtgatcagacacctgttcgcccctctgaaggagtacttcgcctgcgtgagcagcggcaacagcaacgccaacagccggggccccagcttctctagcggcctggtgccactgtccctgagagggagccacatgggccccatggagatctacaaaaccgtgagcgcctggaagcggcagcctgtgcgcgtgctgagcctgtttcggaatatcgataaagtcctgaaaagcctgggattcctggagagcggctctggctccggcggtggcaccctgaagtacgtggaggatgtgacaaacgtggtcagacgggatgtggagaagtggggccccttcgatctggtgtacggcagcacccaacccctgggcagctcttgtgaccggtgccctggctggtacatgtttcagttccaccggatcctgcagtacgccctgccgagacaggagtcccagcggccattcttttggattttcatggacaacttgctgctgaccgaggatgaccaggaaactaccactcggttcctgcagaccgaagccgtgaccctgcaggacgtgagaggccgggactaccagaacgccatgcgggtgtggtccaacatccctggactgaaaagcaagcacgcacctctgacccctaaagaagaggagtacctgcaggcccaggtgcggagcagaagcaagctggacgcccctaaggtggatctgctggtgaagaattgcctcctgcccctgagagagtacttcaagtatttcagccagaatagtctgcccctgggaggcagcggcggcggcctgcagggcctgctgaccttcagggacgtggccatcgagttcagcgaggaggagtggggctgcctgacccacacccagaggcagctgtacagggacgtgatgctggagaactacggccacctgcacttcctgggcctgctgctgagcaagcccgacctgatcatgttcctggagcaggagaagcagctgtgggacgtgaagaggaaggagagcaggggcttcagccccgagagccagtgcctgggcggcccaagcagcggcgcccctcctcccagcggcggcagcccagccggctccccaacctctaccgaggagggcacctctgagtccgccacccccgagagcggccctggcacctccaccgagcccagcgagggcagcgcacccggcagccctgccggcagccccacctccacagaggagggaaccagcaccgagcccagcgaaggcagcgccccaggcaccagcaccgagcctagtgagcaggagattaaacggatcaacaagatcagaagaagacttgtgaaagacagcaacaccaagaaggccggcaagacaggccccatgaaaaccctgctggttagagtgatgacacccgatctgagagagcggctggaaaacctgagaaagaagcctgaaaatatcccccagcccatcagcaatacatctagagccaacctgaataagctgctgaccgattacaccgaaatgaagaaggcgatcctgcatgtgtactgggaagagttccagaaggaccctgtgggcctgatgagccgggtggcccagcctgccagcaagaagatcgatcagaacaagctgaaacctgagatggacgagaagggcaacctgaccaccgccggctttgcctgctctcagtgtggccagcccctgttcgtgtacaagctggagcaggtgtctgagaagggcaaggcttacaccaactacttcggacggtgcaatgtggccgagcacgaaaagctgatcctgctggcccagctgaagcccgagaaggatagcgacgaagccgtgacatatagcctgggaaagtttgggcagagggccctggatttctacagcattcatgtgaccaaggagtccacccaccccgtgaagcccctggcccagatcgccggaaacagatacgcctccggacctgtgggaaaggccctgagcgacgcatgtatgggcacaatcgcctccttcctgtctaagtaccaggacatcatcatcgaacaccagaaggtggtgaagggcaaccagaagagactggagagcctgcgggagctggccggcaaggaaaacctggaataccctagcgtgaccctgccacctcagcctcacaccaaggagggcgttgatgcctacaacgaagtgatcgcccgggtgcgaatgtgggtgaacctgaacctgtggcagaagctgaagctaagcagagatgatgccaagcctctgctgagactgaagggattcccttcctttcctctggtcgagagacaggccaacgaagtggactggtgggacatggtgtgtaacgtgaagaagctgatcaacgagaaaaaggaggatggcaaggtgttttggcagaatctggctggctacaagagacaggaagccctgagaccatacctgagcagcgaggaagatcggaagaagggaaagaaattcgctcggtaccagctgggcgacctgctgctgcacctggaaaagaagcacggcgaggactggggaaaggtgtacgacgaggcctgggagcggattgacaagaaagtggaaggcctgagcaagcacatcaagctggaagaggaacggagaagcgaggacgcccagagcaaggccgccctgaccgactggctgcgggctaaggccagcttcgtgatcgagggcctgaaggaggccgacaaggacgagttctgcagatgcgagctgaagctgcagaagtggtacggggacctgcggggaaagcccttcgccatcgaagccgagaacagcatcctggacatcagcggcttcagcaagcagtacaactgtgccttcatctggcagaaggacggcgtgaagaagctgaacctgtacctgatcatcaactacttcaagggcggcaagctgcggttcaagaagatcaaacctgaagccttcgaagccaacagattctacaccgtgatcaacaaaaagagcggcgagatcgtgcccatggaggtgaacttcaacttcgacgaccccaacctgatcatcctgcctctggcctttggcaagagacagggcagagaattcatctggaacgacctgctgtccctggaaaccggcagcctgaagctggccaacggaagagtgatcgagaagacactgtacaacagaagaacccggcaggatgagcctgccctgttcgtggccctgaccttcgagcggcgggaggtcctggactcctccaatatcaaaccaatgaacctgatcggcgtggcaagaggcgaaaacatccccgccgtgatcgccctgaccgaccccgagggctgcccactgagccggtttaaggatagcctgggaaacccaacccacatcctgagaatcggcgagagctataaggagaagcagcggaccatccaggccaagaaggaggtggagcagcggagagccggcggctacagccggaagtacgccagcaaagccaagaatctggcagacgatatggtgagaaacaccgctagagatctgctgtactacgccgtgacccaggatgccatgctgatcttcgccaacctgagccggggcttcggccggcagggcaagcggaccttcatggccgagagacagtacacacggatggaggactggctgaccgccaagctggcctacgagggcctgagcaagacctacctgtccaagacactggcccagtacacctccaagacatgcagcaactgtgggtttaccatcaccagcgccgactacgacagggtgctggagaagctgaagaagacagcaacaggctggatgaccacaattaacggcaaggagctgaaggtggagggccagattacctactacaacagatacaagagacagaacgtagtcaaggacctgtccgtcgagctggatagactgagcgaagaatctgtgaacaacgacatctcctcctggacaaagggcagaagcggagaagctctgagcctcctgaagaaaagattctcccatagacccgtgcaggagaagttcgtgtgcctgaactgcggcttcgagacacacgcagccgagcaagccgccctgaacatcgccagatcctggctgttcctgcggagccaggagtacaagaaataccagacaaacaagacaaccggcaacaccgataagagagccttcgtcgagacctggcagtccttttaccggaagaagcttaaggaggtgtggaaacctgccgtgcggtctggcggatctggcggaggctccaccagccccaagaaaaagagaaaagtctaagctgccttctgcggggcttgccttctggccatgcccttcttctctcccttgcacctgtacctcttggtctttgaataaagcctgagtaggaaggctagcaaaaaaaaaaaaaaaaaaaaaaaaaaaaaaaaaaaaaaaaaaaaaaaaaaaaaaaaaaaaaaaaaaaaaaaaaaaaaaaa

SEQ ID NO: 12975 - RNA, 5785 nt, synthetic construct
  source 1..5785: mol_type = other RNA
aggaaataagagagaaaagaagagtaagaagaaatataagagccaccatggcccctaagaagaagcgtaaagtgagccggatggaacgcctcgtctacgaggtgcggcagaagtgcagaaacatcgaggacatctgcatctcctgcggatctctgaacgtgaccctggagcacccactgttcatcggcggcatgtgccagaactgtaaaaactgttttctggagtgtgcctatcaatacgacgatgacggctaccagagctactgcaccatctgttgcggcggaagagaggtgctgatgtgtggaaataacaactgctgccggtgcttctgcgtggaatgcgtggacctgctggtgggccccggcgccgcccaggccgctattaaggaagatccttggaactgctacatgtgcggccacaagggcacatacggcctgctgagacggagagaggactggcctagcagactgcagatgttcttcgccaataaccacgaccaggagttcgacccccctaaggtgtaccctcccgtccccgccgagaagagaaagcccatccgggtcctgagcctgttcgatggcatcgccaccggtctgctggtgctgaaggacctgggcatccaggtggataggtacattgcctccgaggtgtgcgaggactccatcaccgtgggaatggtgcgtcatcagggcaagatcatgtacgtgggcgacgtgcggagcgtgacacagaagcatatccaggagtggggccctttcgacctggtgatcggcggcagcccttgcaatgacctgagcatcgtgaacccagcccggaagggcctgtacgagggaaccggcagactgttcttcgagttttacagactgctgcacgacgcccggcctaaggaaggcgacgaccggcccttcttttggctgttcgagaatgtggtggccatgggagtcagcgacaagcgggatattagccggttcctggagagcaaccccgtgatgatcgatgccaaggaagtgagcgccgcccaccgggccagatacttctggggcaatctgcctggcatgaacagacccctggccagcaccgtgaacgacaagctggagctgcaggagtgcctggagcacggccggatcgccaagttcagcaaggtgagaaccatcaccacccgaagcaacagcatcaaacaaggcaaggaccagcactttcctgtgttcatgaacgagaaggaggacatcctgtggtgtaccgagatggagagagtgttcgggttcccagtccactacacagatgtcagcaacatgtctagactggccagacagagactgctgggaagaagctggtccgtccctgtgatcagacacctgttcgcccctctgaaggagtacttcgcctgcgtgagcagcggcaacagcaacgccaacagccggggccccagcttctctagcggcctggtgccactgtccctgagagggagccacatgggccccatggagatctacaaaaccgtgagcgcctggaagcggcagcctgtgcgcgtgctgagcctgtttcggaatatcgataaagtcctgaaaagcctgggattcctggagagcggctctggctccggcggtggcaccctgaagtacgtggaggatgtgacaaacgtggtcagacgggatgtggagaagtggggccccttcgatctggtgtacggcagcacccaacccctgggcagctcttgtgaccggtgccctggctggtacatgtttcagttccaccggatcctgcagtacgccctgccgagacaggagtcccagcggccattcttttggattttcatggacaacttgctgctgaccgaggatgaccaggaaactaccactcggttcctgcagaccgaagccgtgaccctgcaggacgtgagaggccgggactaccagaacgccatgcgggtgtggtccaacatccctggactgaaaagcaagcacgcacctctgacccctaaagaagaggagtacctgcaggcccaggtgcggagcagaagcaagctggacgcccctaaggtggatctgctggtgaagaattgcctcctgcccctgagagagtacttcaagtatttcagccagaatagtctgcccctgggaggcagcggcggcggcttcagcctggaggacgtgagcgtgagcttcagccccgccgagtgggccctgctggaccccgcccagagggccctgtggagggaggtgatgagggagaacgccgagaacgtggccttcctggccaggagcatcggcgagaccctggtggaggccaacaacgaccccgtgagcgagggcaggctggagaggagcagcggcggcgccgaggagcagatcagcttccccaacggcctggccaagaggggcggcccaagcagcggcgcccctcctcccagcggcggcagcccagccggctccccaacctctaccgaggagggcacctctgagtccgccacccccgagagcggccctggcacctccaccgagcccagcgagggcagcgcacccggcagccctgccggcagccccacctccacagaggagggaaccagcaccgagcccagcgaaggcagcgccccaggcaccagcaccgagcctagtgagcaggagattaaacggatcaacaagatcagaagaagacttgtgaaagacagcaacaccaagaaggccggcaagacaggccccatgaaaaccctgctggttagagtgatgacacccgatctgagagagcggctggaaaacctgagaaagaagcctgaaaatatcccccagcccatcagcaatacatctagagccaacctgaataagctgctgaccgattacaccgaaatgaagaaggcgatcctgcatgtgtactgggaagagttccagaaggaccctgtgggcctgatgagccgggtggcccagcctgccagcaagaagatcgatcagaacaagctgaaacctgagatggacgagaagggcaacctgaccaccgccggctttgcctgctctcagtgtggccagcccctgttcgtgtacaagctggagcaggtgtctgagaagggcaaggcttacaccaactacttcggacggtgcaatgtggccgagcacgaaaagctgatcctgctggcccagctgaagcccgagaaggatagcgacgaagccgtgacatatagcctgggaaagtttgggcagagggccctggatttctacagcattcatgtgaccaaggagtccacccaccccgtgaagcccctggcccagatcgccggaaacagatacgcctccggacctgtgggaaaggccctgagcgacgcatgtatgggcacaatcgcctccttcctgtctaagtaccaggacatcatcatcgaacaccagaaggtggtgaagggcaaccagaagagactggagagcctgcgggagctggccggcaaggaaaacctggaataccctagcgtgaccctgccacctcagcctcacaccaaggagggcgttgatgcctacaacgaagtgatcgcccgggtgcgaatgtgggtgaacctgaacctgtggcagaagctgaagctaagcagagatgatgccaagcctctgctgagactgaagggattcccttcctttcctctggtcgagagacaggccaacgaagtggactggtgggacatggtgtgtaacgtgaagaagctgatcaacgagaaaaaggaggatggcaaggtgttttggcagaatctggctggctacaagagacaggaagccctgagaccatacctgagcagcgaggaagatcggaagaagggaaagaaattcgctcggtaccagctgggcgacctgctgctgcacctggaaaagaagcacggcgaggactggggaaaggtgtacgacgaggcctgggagcggattgacaagaaagtggaaggcctgagcaagcacatcaagctggaagaggaacggagaagcgaggacgcccagagcaaggccgccctgaccgactggctgcgggctaaggccagcttcgtgatcgagggcctgaaggaggccgacaaggacgagttctgcagatgcgagctgaagctgcagaagtggtacggggacctgcggggaaagcccttcgccatcgaagccgagaacagcatcctggacatcagcggcttcagcaagcagtacaactgtgccttcatctggcagaaggacggcgtgaagaagctgaacctgtacctgatcatcaactacttcaagggcggcaagctgcggttcaagaagatcaaacctgaagccttcgaagccaacagattctacaccgtgatcaacaaaaagagcggcgagatcgtgcccatggaggtgaacttcaacttcgacgaccccaacctgatcatcctgcctctggcctttggcaagagacagggcagagaattcatctggaacgacctgctgtccctggaaaccggcagcctgaagctggccaacggaagagtgatcgagaagacactgtacaacagaagaacccggcaggatgagcctgccctgttcgtggccctgaccttcgagcggcgggaggtcctggactcctccaatatcaaaccaatgaacctgatcggcgtggcaagaggcgaaaacatccccgccgtgatcgccctgaccgaccccgagggctgcccactgagccggtttaaggatagcctgggaaacccaacccacatcctgagaatcggcgagagctataaggagaagcagcggaccatccaggccaagaaggaggtggagcagcggagagccggcggctacagccggaagtacgccagcaaagccaagaatctggcagacgatatggtgagaaacaccgctagagatctgctgtactacgccgtgacccaggatgccatgctgatcttcgccaacctgagccggggcttcggccggcagggcaagcggaccttcatggccgagagacagtacacacggatggaggactggctgaccgccaagctggcctacgagggcctgagcaagacctacctgtccaagacactggcccagtacacctccaagacatgcagcaactgtgggtttaccatcaccagcgccgactacgacagggtgctggagaagctgaagaagacagcaacaggctggatgaccacaattaacggcaaggagctgaaggtggagggccagattacctactacaacagatacaagagacagaacgtagtcaaggacctgtccgtcgagctggatagactgagcgaagaatctgtgaacaacgacatctcctcctggacaaagggcagaagcggagaagctctgagcctcctgaagaaaagattctcccatagacccgtgcaggagaagttcgtgtgcctgaactgcggcttcgagacacacgcagccgagcaagccgccctgaacatcgccagatcctggctgttcctgcggagccaggagtacaagaaataccagacaaacaagacaaccggcaacaccgataagagagccttcgtcgagacctggcagtccttttaccggaagaagcttaaggaggtgtggaaacctgccgtgcggtctggcggatctggcggaggctccaccagccccaagaaaaagagaaaagtctaagctgccttctgcggggcttgccttctggccatgcccttcttctctcccttgcacctgtacctcttggtctttgaataaagcctgagtaggaaggctagcaaaaaaaaaaaaaaaaaaaaaaaaaaaaaaaaaaaaaaaaaaaaaaaaaaaaaaaaaaaaaaaaaaaaaaaaaaaaaaaa

SEQ ID NO: 12976 - RNA, 5785 nt, synthetic construct
  source 1..5785: mol_type = other RNA
aggaaataagagagaaaagaagagtaagaagaaatataagagccaccatggcccctaagaagaagcgtaaagtgagccggatggaacgcctcgtctacgaggtgcggcagaagtgcagaaacatcgaggacatctgcatctcctgcggatctctgaacgtgaccctggagcacccactgttcatcggcggcatgtgccagaactgtaaaaactgttttctggagtgtgcctatcaatacgacgatgacggctaccagagctactgcaccatctgttgcggcggaagagaggtgctgatgtgtggaaataacaactgctgccggtgcttctgcgtggaatgcgtggacctgctggtgggccccggcgccgcccaggccgctattaaggaagatccttggaactgctacatgtgcggccacaagggcacatacggcctgctgagacggagagaggactggcctagcagactgcagatgttcttcgccaataaccacgaccaggagttcgacccccctaaggtgtaccctcccgtccccgccgagaagagaaagcccatccgggtcctgagcctgttcgatggcatcgccaccggtctgctggtgctgaaggacctgggcatccaggtggataggtacattgcctccgaggtgtgcgaggactccatcaccgtgggaatggtgcgtcatcagggcaagatcatgtacgtgggcgacgtgcggagcgtgacacagaagcatatccaggagtggggccctttcgacctggtgatcggcggcagcccttgcaatgacctgagcatcgtgaacccagcccggaagggcctgtacgagggaaccggcagactgttcttcgagttttacagactgctgcacgacgcccggcctaaggaaggcgacgaccggcccttcttttggctgttcgagaatgtggtggccatgggagtcagcgacaagcgggatattagccggttcctggagagcaaccccgtgatgatcgatgccaaggaagtgagcgccgcccaccgggccagatacttctggggcaatctgcctggcatgaacagacccctggccagcaccgtgaacgacaagctggagctgcaggagtgcctggagcacggccggatcgccaagttcagcaaggtgagaaccatcaccacccgaagcaacagcatcaaacaaggcaaggaccagcactttcctgtgttcatgaacgagaaggaggacatcctgtggtgtaccgagatggagagagtgttcgggttcccagtccactacacagatgtcagcaacatgtctagactggccagacagagactgctgggaagaagctggtccgtccctgtgatcagacacctgttcgcccctctgaaggagtacttcgcctgcgtgagcagcggcaacagcaacgccaacagccggggccccagcttctctagcggcctggtgccactgtccctgagagggagccacatgggccccatggagatctacaaaaccgtgagcgcctggaagcggcagcctgtgcgcgtgctgagcctgtttcggaatatcgataaagtcctgaaaagcctgggattcctggagagcggctctggctccggcggtggcaccctgaagtacgtggaggatgtgacaaacgtggtcagacgggatgtggagaagtggggccccttcgatctggtgtacggcagcacccaacccctgggcagctcttgtgaccggtgccctggctggtacatgtttcagttccaccggatcctgcagtacgccctgccgagacaggagtcccagcggccattcttttggattttcatggacaacttgctgctgaccgaggatgaccaggaaactaccactcggttcctgcagaccgaagccgtgaccctgcaggacgtgagaggccgggactaccagaacgccatgcgggtgtggtccaacatccctggactgaaaagcaagcacgcacctctgacccctaaagaagaggagtacctgcaggcccaggtgcggagcagaagcaagctggacgcccctaaggtggatctgctggtgaagaattgcctcctgcccctgagagagtacttcaagtatttcagccagaatagtctgcccctgggaggcagcggcggcggcatggcccacctgatgatgttcagggacgtggccgtggacttcagccaggaggagtgggagtgcctggacctggagcagaggggcctgtacagggacgtgatgctggagaactacagcaacatggtgagcctgggcctgtgcatctaccagcccgaggccttcagcctgctggagaagggcaaggagccctggaagatcctgagggacgagaccaggggcccctgccccgacatgcagagcaggggcggcccaagcagcggcgcccctcctcccagcggcggcagcccagccggctccccaacctctaccgaggagggcacctctgagtccgccacccccgagagcggccctggcacctccaccgagcccagcgagggcagcgcacccggcagccctgccggcagccccacctccacagaggagggaaccagcaccgagcccagcgaaggcagcgccccaggcaccagcaccgagcctagtgagcaggagattaaacggatcaacaagatcagaagaagacttgtgaaagacagcaacaccaagaaggccggcaagacaggccccatgaaaaccctgctggttagagtgatgacacccgatctgagagagcggctggaaaacctgagaaagaagcctgaaaatatcccccagcccatcagcaatacatctagagccaacctgaataagctgctgaccgattacaccgaaatgaagaaggcgatcctgcatgtgtactgggaagagttccagaaggaccctgtgggcctgatgagccgggtggcccagcctgccagcaagaagatcgatcagaacaagctgaaacctgagatggacgagaagggcaacctgaccaccgccggctttgcctgctctcagtgtggccagcccctgttcgtgtacaagctggagcaggtgtctgagaagggcaaggcttacaccaactacttcggacggtgcaatgtggccgagcacgaaaagctgatcctgctggcccagctgaagcccgagaaggatagcgacgaagccgtgacatatagcctgggaaagtttgggcagagggccctggatttctacagcattcatgtgaccaaggagtccacccaccccgtgaagcccctggcccagatcgccggaaacagatacgcctccggacctgtgggaaaggccctgagcgacgcatgtatgggcacaatcgcctccttcctgtctaagtaccaggacatcatcatcgaacaccagaaggtggtgaagggcaaccagaagagactggagagcctgcgggagctggccggcaaggaaaacctggaataccctagcgtgaccctgccacctcagcctcacaccaaggagggcgttgatgcctacaacgaagtgatcgcccgggtgcgaatgtgggtgaacctgaacctgtggcagaagctgaagctaagcagagatgatgccaagcctctgctgagactgaagggattcccttcctttcctctggtcgagagacaggccaacgaagtggactggtgggacatggtgtgtaacgtgaagaagctgatcaacgagaaaaaggaggatggcaaggtgttttggcagaatctggctggctacaagagacaggaagccctgagaccatacctgagcagcgaggaagatcggaagaagggaaagaaattcgctcggtaccagctgggcgacctgctgctgcacctggaaaagaagcacggcgaggactggggaaaggtgtacgacgaggcctgggagcggattgacaagaaagtggaaggcctgagcaagcacatcaagctggaagaggaacggagaagcgaggacgcccagagcaaggccgccctgaccgactggctgcgggctaaggccagcttcgtgatcgagggcctgaaggaggccgacaaggacgagttctgcagatgcgagctgaagctgcagaagtggtacggggacctgcggggaaagcccttcgccatcgaagccgagaacagcatcctggacatcagcggcttcagcaagcagtacaactgtgccttcatctggcagaaggacggcgtgaagaagctgaacctgtacctgatcatcaactacttcaagggcggcaagctgcggttcaagaagatcaaacctgaagccttcgaagccaacagattctacaccgtgatcaacaaaaagagcggcgagatcgtgcccatggaggtgaacttcaacttcgacgaccccaacctgatcatcctgcctctggcctttggcaagagacagggcagagaattcatctggaacgacctgctgtccctggaaaccggcagcctgaagctggccaacggaagagtgatcgagaagacactgtacaacagaagaacccggcaggatgagcctgccctgttcgtggccctgaccttcgagcggcgggaggtcctggactcctccaatatcaaaccaatgaacctgatcggcgtggcaagaggcgaaaacatccccgccgtgatcgccctgaccgaccccgagggctgcccactgagccggtttaaggatagcctgggaaacccaacccacatcctgagaatcggcgagagctataaggagaagcagcggaccatccaggccaagaaggaggtggagcagcggagagccggcggctacagccggaagtacgccagcaaagccaagaatctggcagacgatatggtgagaaacaccgctagagatctgctgtactacgccgtgacccaggatgccatgctgatcttcgccaacctgagccggggcttcggccggcagggcaagcggaccttcatggccgagagacagtacacacggatggaggactggctgaccgccaagctggcctacgagggcctgagcaagacctacctgtccaagacactggcccagtacacctccaagacatgcagcaactgtgggtttaccatcaccagcgccgactacgacagggtgctggagaagctgaagaagacagcaacaggctggatgaccacaattaacggcaaggagctgaaggtggagggccagattacctactacaacagatacaagagacagaacgtagtcaaggacctgtccgtcgagctggatagactgagcgaagaatctgtgaacaacgacatctcctcctggacaaagggcagaagcggagaagctctgagcctcctgaagaaaagattctcccatagacccgtgcaggagaagttcgtgtgcctgaactgcggcttcgagacacacgcagccgagcaagccgccctgaacatcgccagatcctggctgttcctgcggagccaggagtacaagaaataccagacaaacaagacaaccggcaacaccgataagagagccttcgtcgagacctggcagtccttttaccggaagaagcttaaggaggtgtggaaacctgccgtgcggtctggcggatctggcggaggctccaccagccccaagaaaaagagaaaagtctaagctgccttctgcggggcttgccttctggccatgcccttcttctctcccttgcacctgtacctcttggtctttgaataaagcctgagtaggaaggctagcaaaaaaaaaaaaaaaaaaaaaaaaaaaaaaaaaaaaaaaaaaaaaaaaaaaaaaaaaaaaaaaaaaaaaaaaaaaaaaaa

SEQ ID NO: 12977 - RNA, 5785 nt, synthetic construct
  source 1..5785: mol_type = other RNA
aggaaataagagagaaaagaagagtaagaagaaatataagagccaccatggcccctaagaagaagcgtaaagtgagccggatggaacgcctcgtctacgaggtgcggcagaagtgcagaaacatcgaggacatctgcatctcctgcggatctctgaacgtgaccctggagcacccactgttcatcggcggcatgtgccagaactgtaaaaactgttttctggagtgtgcctatcaatacgacgatgacggctaccagagctactgcaccatctgttgcggcggaagagaggtgctgatgtgtggaaataacaactgctgccggtgcttctgcgtggaatgcgtggacctgctggtgggccccggcgccgcccaggccgctattaaggaagatccttggaactgctacatgtgcggccacaagggcacatacggcctgctgagacggagagaggactggcctagcagactgcagatgttcttcgccaataaccacgaccaggagttcgacccccctaaggtgtaccctcccgtccccgccgagaagagaaagcccatccgggtcctgagcctgttcgatggcatcgccaccggtctgctggtgctgaaggacctgggcatccaggtggataggtacattgcctccgaggtgtgcgaggactccatcaccgtgggaatggtgcgtcatcagggcaagatcatgtacgtgggcgacgtgcggagcgtgacacagaagcatatccaggagtggggccctttcgacctggtgatcggcggcagcccttgcaatgacctgagcatcgtgaacccagcccggaagggcctgtacgagggaaccggcagactgttcttcgagttttacagactgctgcacgacgcccggcctaaggaaggcgacgaccggcccttcttttggctgttcgagaatgtggtggccatgggagtcagcgacaagcgggatattagccggttcctggagagcaaccccgtgatgatcgatgccaaggaagtgagcgccgcccaccgggccagatacttctggggcaatctgcctggcatgaacagacccctggccagcaccgtgaacgacaagctggagctgcaggagtgcctggagcacggccggatcgccaagttcagcaaggtgagaaccatcaccacccgaagcaacagcatcaaacaaggcaaggaccagcactttcctgtgttcatgaacgagaaggaggacatcctgtggtgtaccgagatggagagagtgttcgggttcccagtccactacacagatgtcagcaacatgtctagactggccagacagagactgctgggaagaagctggtccgtccctgtgatcagacacctgttcgcccctctgaaggagtacttcgcctgcgtgagcagcggcaacagcaacgccaacagccggggccccagcttctctagcggcctggtgccactgtccctgagagggagccacatgggccccatggagatctacaaaaccgtgagcgcctggaagcggcagcctgtgcgcgtgctgagcctgtttcggaatatcgataaagtcctgaaaagcctgggattcctggagagcggctctggctccggcggtggcaccctgaagtacgtggaggatgtgacaaacgtggtcagacgggatgtggagaagtggggccccttcgatctggtgtacggcagcacccaacccctgggcagctcttgtgaccggtgccctggctggtacatgtttcagttccaccggatcctgcagtacgccctgccgagacaggagtcccagcggccattcttttggattttcatggacaacttgctgctgaccgaggatgaccaggaaactaccactcggttcctgcagaccgaagccgtgaccctgcaggacgtgagaggccgggactaccagaacgccatgcgggtgtggtccaacatccctggactgaaaagcaagcacgcacctctgacccctaaagaagaggagtacctgcaggcccaggtgcggagcagaagcaagctggacgcccctaaggtggatctgctggtgaagaattgcctcctgcccctgagagagtacttcaagtatttcagccagaatagtctgcccctgggaggcagcggcggcggcatggacgccgtgacctacgaggacgtgcaggtgagcttcaccagggaggagtggaccctgctggaccccagccagaagagcctgtacaaggacgtgatggtggagacctacaggaacctgaccgccatcggctacaagtgggaggaccagaacatcaagaagcaccaccagtgcagcaggaggcacggcaggcacgagaggagcaacagcgccgagaaggactacgagtgcgagcagtgcggcggcggcccaagcagcggcgcccctcctcccagcggcggcagcccagccggctccccaacctctaccgaggagggcacctctgagtccgccacccccgagagcggccctggcacctccaccgagcccagcgagggcagcgcacccggcagccctgccggcagccccacctccacagaggagggaaccagcaccgagcccagcgaaggcagcgccccaggcaccagcaccgagcctagtgagcaggagattaaacggatcaacaagatcagaagaagacttgtgaaagacagcaacaccaagaaggccggcaagacaggccccatgaaaaccctgctggttagagtgatgacacccgatctgagagagcggctggaaaacctgagaaagaagcctgaaaatatcccccagcccatcagcaatacatctagagccaacctgaataagctgctgaccgattacaccgaaatgaagaaggcgatcctgcatgtgtactgggaagagttccagaaggaccctgtgggcctgatgagccgggtggcccagcctgccagcaagaagatcgatcagaacaagctgaaacctgagatggacgagaagggcaacctgaccaccgccggctttgcctgctctcagtgtggccagcccctgttcgtgtacaagctggagcaggtgtctgagaagggcaaggcttacaccaactacttcggacggtgcaatgtggccgagcacgaaaagctgatcctgctggcccagctgaagcccgagaaggatagcgacgaagccgtgacatatagcctgggaaagtttgggcagagggccctggatttctacagcattcatgtgaccaaggagtccacccaccccgtgaagcccctggcccagatcgccggaaacagatacgcctccggacctgtgggaaaggccctgagcgacgcatgtatgggcacaatcgcctccttcctgtctaagtaccaggacatcatcatcgaacaccagaaggtggtgaagggcaaccagaagagactggagagcctgcgggagctggccggcaaggaaaacctggaataccctagcgtgaccctgccacctcagcctcacaccaaggagggcgttgatgcctacaacgaagtgatcgcccgggtgcgaatgtgggtgaacctgaacctgtggcagaagctgaagctaagcagagatgatgccaagcctctgctgagactgaagggattcccttcctttcctctggtcgagagacaggccaacgaagtggactggtgggacatggtgtgtaacgtgaagaagctgatcaacgagaaaaaggaggatggcaaggtgttttggcagaatctggctggctacaagagacaggaagccctgagaccatacctgagcagcgaggaagatcggaagaagggaaagaaattcgctcggtaccagctgggcgacctgctgctgcacctggaaaagaagcacggcgaggactggggaaaggtgtacgacgaggcctgggagcggattgacaagaaagtggaaggcctgagcaagcacatcaagctggaagaggaacggagaagcgaggacgcccagagcaaggccgccctgaccgactggctgcgggctaaggccagcttcgtgatcgagggcctgaaggaggccgacaaggacgagttctgcagatgcgagctgaagctgcagaagtggtacggggacctgcggggaaagcccttcgccatcgaagccgagaacagcatcctggacatcagcggcttcagcaagcagtacaactgtgccttcatctggcagaaggacggcgtgaagaagctgaacctgtacctgatcatcaactacttcaagggcggcaagctgcggttcaagaagatcaaacctgaagccttcgaagccaacagattctacaccgtgatcaacaaaaagagcggcgagatcgtgcccatggaggtgaacttcaacttcgacgaccccaacctgatcatcctgcctctggcctttggcaagagacagggcagagaattcatctggaacgacctgctgtccctggaaaccggcagcctgaagctggccaacggaagagtgatcgagaagacactgtacaacagaagaacccggcaggatgagcctgccctgttcgtggccctgaccttcgagcggcgggaggtcctggactcctccaatatcaaaccaatgaacctgatcggcgtggcaagaggcgaaaacatccccgccgtgatcgccctgaccgaccccgagggctgcccactgagccggtttaaggatagcctgggaaacccaacccacatcctgagaatcggcgagagctataaggagaagcagcggaccatccaggccaagaaggaggtggagcagcggagagccggcggctacagccggaagtacgccagcaaagccaagaatctggcagacgatatggtgagaaacaccgctagagatctgctgtactacgccgtgacccaggatgccatgctgatcttcgccaacctgagccggggcttcggccggcagggcaagcggaccttcatggccgagagacagtacacacggatggaggactggctgaccgccaagctggcctacgagggcctgagcaagacctacctgtccaagacactggcccagtacacctccaagacatgcagcaactgtgggtttaccatcaccagcgccgactacgacagggtgctggagaagctgaagaagacagcaacaggctggatgaccacaattaacggcaaggagctgaaggtggagggccagattacctactacaacagatacaagagacagaacgtagtcaaggacctgtccgtcgagctggatagactgagcgaagaatctgtgaacaacgacatctcctcctggacaaagggcagaagcggagaagctctgagcctcctgaagaaaagattctcccatagacccgtgcaggagaagttcgtgtgcctgaactgcggcttcgagacacacgcagccgagcaagccgccctgaacatcgccagatcctggctgttcctgcggagccaggagtacaagaaataccagacaaacaagacaaccggcaacaccgataagagagccttcgtcgagacctggcagtccttttaccggaagaagcttaaggaggtgtggaaacctgccgtgcggtctggcggatctggcggaggctccaccagccccaagaaaaagagaaaagtctaagctgccttctgcggggcttgccttctggccatgcccttcttctctcccttgcacctgtacctcttggtctttgaataaagcctgagtaggaaggctagcaaaaaaaaaaaaaaaaaaaaaaaaaaaaaaaaaaaaaaaaaaaaaaaaaaaaaaaaaaaaaaaaaaaaaaaaaaaaaaaa

SEQ ID NO: 12978 - RNA, 5785 nt, synthetic construct
  source 1..5785: mol_type = other RNA
aggaaataagagagaaaagaagagtaagaagaaatataagagccaccatggcccctaagaagaagcgtaaagtgagccggatggaacgcctcgtctacgaggtgcggcagaagtgcagaaacatcgaggacatctgcatctcctgcggatctctgaacgtgaccctggagcacccactgttcatcggcggcatgtgccagaactgtaaaaactgttttctggagtgtgcctatcaatacgacgatgacggctaccagagctactgcaccatctgttgcggcggaagagaggtgctgatgtgtggaaataacaactgctgccggtgcttctgcgtggaatgcgtggacctgctggtgggccccggcgccgcccaggccgctattaaggaagatccttggaactgctacatgtgcggccacaagggcacatacggcctgctgagacggagagaggactggcctagcagactgcagatgttcttcgccaataaccacgaccaggagttcgacccccctaaggtgtaccctcccgtccccgccgagaagagaaagcccatccgggtcctgagcctgttcgatggcatcgccaccggtctgctggtgctgaaggacctgggcatccaggtggataggtacattgcctccgaggtgtgcgaggactccatcaccgtgggaatggtgcgtcatcagggcaagatcatgtacgtgggcgacgtgcggagcgtgacacagaagcatatccaggagtggggccctttcgacctggtgatcggcggcagcccttgcaatgacctgagcatcgtgaacccagcccggaagggcctgtacgagggaaccggcagactgttcttcgagttttacagactgctgcacgacgcccggcctaaggaaggcgacgaccggcccttcttttggctgttcgagaatgtggtggccatgggagtcagcgacaagcgggatattagccggttcctggagagcaaccccgtgatgatcgatgccaaggaagtgagcgccgcccaccgggccagatacttctggggcaatctgcctggcatgaacagacccctggccagcaccgtgaacgacaagctggagctgcaggagtgcctggagcacggccggatcgccaagttcagcaaggtgagaaccatcaccacccgaagcaacagcatcaaacaaggcaaggaccagcactttcctgtgttcatgaacgagaaggaggacatcctgtggtgtaccgagatggagagagtgttcgggttcccagtccactacacagatgtcagcaacatgtctagactggccagacagagactgctgggaagaagctggtccgtccctgtgatcagacacctgttcgcccctctgaaggagtacttcgcctgcgtgagcagcggcaacagcaacgccaacagccggggccccagcttctctagcggcctggtgccactgtccctgagagggagccacatgggccccatggagatctacaaaaccgtgagcgcctggaagcggcagcctgtgcgcgtgctgagcctgtttcggaatatcgataaagtcctgaaaagcctgggattcctggagagcggctctggctccggcggtggcaccctgaagtacgtggaggatgtgacaaacgtggtcagacgggatgtggagaagtggggccccttcgatctggtgtacggcagcacccaacccctgggcagctcttgtgaccggtgccctggctggtacatgtttcagttccaccggatcctgcagtacgccctgccgagacaggagtcccagcggccattcttttggattttcatggacaacttgctgctgaccgaggatgaccaggaaactaccactcggttcctgcagaccgaagccgtgaccctgcaggacgtgagaggccgggactaccagaacgccatgcgggtgtggtccaacatccctggactgaaaagcaagcacgcacctctgacccctaaagaagaggagtacctgcaggcccaggtgcggagcagaagcaagctggacgcccctaaggtggatctgctggtgaagaattgcctcctgcccctgagagagtacttcaagtatttcagccagaatagtctgcccctgggaggcagcggcggcggccaggagctgctgaccttcaaggacgtgagcgtggagttcagcatggacgagtgggcctgcctggaccccgcccagcagaccctgtaccaggacgtgatgctggagaactacaggcacctggtgttcctgggcctgaccctgagcaagcccgacctgatcacctgcctggagcagagcaaggagccctggaaggtgaagagccaccagaccgtggtgaagcaccccgccgtgagcgacccccccggcggcccaagcagcggcgcccctcctcccagcggcggcagcccagccggctccccaacctctaccgaggagggcacctctgagtccgccacccccgagagcggccctggcacctccaccgagcccagcgagggcagcgcacccggcagccctgccggcagccccacctccacagaggagggaaccagcaccgagcccagcgaaggcagcgccccaggcaccagcaccgagcctagtgagcaggagattaaacggatcaacaagatcagaagaagacttgtgaaagacagcaacaccaagaaggccggcaagacaggccccatgaaaaccctgctggttagagtgatgacacccgatctgagagagcggctggaaaacctgagaaagaagcctgaaaatatcccccagcccatcagcaatacatctagagccaacctgaataagctgctgaccgattacaccgaaatgaagaaggcgatcctgcatgtgtactgggaagagttccagaaggaccctgtgggcctgatgagccgggtggcccagcctgccagcaagaagatcgatcagaacaagctgaaacctgagatggacgagaagggcaacctgaccaccgccggctttgcctgctctcagtgtggccagcccctgttcgtgtacaagctggagcaggtgtctgagaagggcaaggcttacaccaactacttcggacggtgcaatgtggccgagcacgaaaagctgatcctgctggcccagctgaagcccgagaaggatagcgacgaagccgtgacatatagcctgggaaagtttgggcagagggccctggatttctacagcattcatgtgaccaaggagtccacccaccccgtgaagcccctggcccagatcgccggaaacagatacgcctccggacctgtgggaaaggccctgagcgacgcatgtatgggcacaatcgcctccttcctgtctaagtaccaggacatcatcatcgaacaccagaaggtggtgaagggcaaccagaagagactggagagcctgcgggagctggccggcaaggaaaacctggaataccctagcgtgaccctgccacctcagcctcacaccaaggagggcgttgatgcctacaacgaagtgatcgcccgggtgcgaatgtgggtgaacctgaacctgtggcagaagctgaagctaagcagagatgatgccaagcctctgctgagactgaagggattcccttcctttcctctggtcgagagacaggccaacgaagtggactggtgggacatggtgtgtaacgtgaagaagctgatcaacgagaaaaaggaggatggcaaggtgttttggcagaatctggctggctacaagagacaggaagccctgagaccatacctgagcagcgaggaagatcggaagaagggaaagaaattcgctcggtaccagctgggcgacctgctgctgcacctggaaaagaagcacggcgaggactggggaaaggtgtacgacgaggcctgggagcggattgacaagaaagtggaaggcctgagcaagcacatcaagctggaagaggaacggagaagcgaggacgcccagagcaaggccgccctgaccgactggctgcgggctaaggccagcttcgtgatcgagggcctgaaggaggccgacaaggacgagttctgcagatgcgagctgaagctgcagaagtggtacggggacctgcggggaaagcccttcgccatcgaagccgagaacagcatcctggacatcagcggcttcagcaagcagtacaactgtgccttcatctggcagaaggacggcgtgaagaagctgaacctgtacctgatcatcaactacttcaagggcggcaagctgcggttcaagaagatcaaacctgaagccttcgaagccaacagattctacaccgtgatcaacaaaaagagcggcgagatcgtgcccatggaggtgaacttcaacttcgacgaccccaacctgatcatcctgcctctggcctttggcaagagacagggcagagaattcatctggaacgacctgctgtccctggaaaccggcagcctgaagctggccaacggaagagtgatcgagaagacactgtacaacagaagaacccggcaggatgagcctgccctgttcgtggccctgaccttcgagcggcgggaggtcctggactcctccaatatcaaaccaatgaacctgatcggcgtggcaagaggcgaaaacatccccgccgtgatcgccctgaccgaccccgagggctgcccactgagccggtttaaggatagcctgggaaacccaacccacatcctgagaatcggcgagagctataaggagaagcagcggaccatccaggccaagaaggaggtggagcagcggagagccggcggctacagccggaagtacgccagcaaagccaagaatctggcagacgatatggtgagaaacaccgctagagatctgctgtactacgccgtgacccaggatgccatgctgatcttcgccaacctgagccggggcttcggccggcagggcaagcggaccttcatggccgagagacagtacacacggatggaggactggctgaccgccaagctggcctacgagggcctgagcaagacctacctgtccaagacactggcccagtacacctccaagacatgcagcaactgtgggtttaccatcaccagcgccgactacgacagggtgctggagaagctgaagaagacagcaacaggctggatgaccacaattaacggcaaggagctgaaggtggagggccagattacctactacaacagatacaagagacagaacgtagtcaaggacctgtccgtcgagctggatagactgagcgaagaatctgtgaacaacgacatctcctcctggacaaagggcagaagcggagaagctctgagcctcctgaagaaaagattctcccatagacccgtgcaggagaagttcgtgtgcctgaactgcggcttcgagacacacgcagccgagcaagccgccctgaacatcgccagatcctggctgttcctgcggagccaggagtacaagaaataccagacaaacaagacaaccggcaacaccgataagagagccttcgtcgagacctggcagtccttttaccggaagaagcttaaggaggtgtggaaacctgccgtgcggtctggcggatctggcggaggctccaccagccccaagaaaaagagaaaagtctaagctgccttctgcggggcttgccttctggccatgcccttcttctctcccttgcacctgtacctcttggtctttgaataaagcctgagtaggaaggctagcaaaaaaaaaaaaaaaaaaaaaaaaaaaaaaaaaaaaaaaaaaaaaaaaaaaaaaaaaaaaaaaaaaaaaaaaaaaaaaaa

SEQ ID NO: 12979 - RNA, 5818 nt, synthetic construct
  source 1..5818: mol_type = other RNA
aggaaataagagagaaaagaagagtaagaagaaatataagagccaccatggcccctaagaagaagcgtaaagtgagccggatggaacgcctcgtctacgaggtgcggcagaagtgcagaaacatcgaggacatctgcatctcctgcggatctctgaacgtgaccctggagcacccactgttcatcggcggcatgtgccagaactgtaaaaactgttttctggagtgtgcctatcaatacgacgatgacggctaccagagctactgcaccatctgttgcggcggaagagaggtgctgatgtgtggaaataacaactgctgccggtgcttctgcgtggaatgcgtggacctgctggtgggccccggcgccgcccaggccgctattaaggaagatccttggaactgctacatgtgcggccacaagggcacatacggcctgctgagacggagagaggactggcctagcagactgcagatgttcttcgccaataaccacgaccaggagttcgacccccctaaggtgtaccctcccgtccccgccgagaagagaaagcccatccgggtcctgagcctgttcgatggcatcgccaccggtctgctggtgctgaaggacctgggcatccaggtggataggtacattgcctccgaggtgtgcgaggactccatcaccgtgggaatggtgcgtcatcagggcaagatcatgtacgtgggcgacgtgcggagcgtgacacagaagcatatccaggagtggggccctttcgacctggtgatcggcggcagcccttgcaatgacctgagcatcgtgaacccagcccggaagggcctgtacgagggaaccggcagactgttcttcgagttttacagactgctgcacgacgcccggcctaaggaaggcgacgaccggcccttcttttggctgttcgagaatgtggtggccatgggagtcagcgacaagcgggatattagccggttcctggagagcaaccccgtgatgatcgatgccaaggaagtgagcgccgcccaccgggccagatacttctggggcaatctgcctggcatgaacagacccctggccagcaccgtgaacgacaagctggagctgcaggagtgcctggagcacggccggatcgccaagttcagcaaggtgagaaccatcaccacccgaagcaacagcatcaaacaaggcaaggaccagcactttcctgtgttcatgaacgagaaggaggacatcctgtggtgtaccgagatggagagagtgttcgggttcccagtccactacacagatgtcagcaacatgtctagactggccagacagagactgctgggaagaagctggtccgtccctgtgatcagacacctgttcgcccctctgaaggagtacttcgcctgcgtgagcagcggcaacagcaacgccaacagccggggccccagcttctctagcggcctggtgccactgtccctgagagggagccacatgggccccatggagatctacaaaaccgtgagcgcctggaagcggcagcctgtgcgcgtgctgagcctgtttcggaatatcgataaagtcctgaaaagcctgggattcctggagagcggctctggctccggcggtggcaccctgaagtacgtggaggatgtgacaaacgtggtcagacgggatgtggagaagtggggccccttcgatctggtgtacggcagcacccaacccctgggcagctcttgtgaccggtgccctggctggtacatgtttcagttccaccggatcctgcagtacgccctgccgagacaggagtcccagcggccattcttttggattttcatggacaacttgctgctgaccgaggatgaccaggaaactaccactcggttcctgcagaccgaagccgtgaccctgcaggacgtgagaggccgggactaccagaacgccatgcgggtgtggtccaacatccctggactgaaaagcaagcacgcacctctgacccctaaagaagaggagtacctgcaggcccaggtgcggagcagaagcaagctggacgcccctaaggtggatctgctggtgaagaattgcctcctgcccctgagagagtacttcaagtatttcagccagaatagtctgcccctgggaggcagcggcggcggcgtgacctacgaggacgtgaccgtgaccttcacccaggaggagtgggccctgctgaaccccagcgagaagaagctgtacagggacgtgatgtgggagaacctgaggaacatcttcagcaccggcaagatccagggcgacaactacaacgaggagcagcacaaccaccagggcagcaagcagagctgcagggtggtgaagatcagcggcggccagaagaggagccagaacgacgagaagcagaggatgcagagcgagggcaagagctacgagtgcgagggcggcccaagcagcggcgcccctcctcccagcggcggcagcccagccggctccccaacctctaccgaggagggcacctctgagtccgccacccccgagagcggccctggcacctccaccgagcccagcgagggcagcgcacccggcagccctgccggcagccccacctccacagaggagggaaccagcaccgagcccagcgaaggcagcgccccaggcaccagcaccgagcctagtgagcaggagattaaacggatcaacaagatcagaagaagacttgtgaaagacagcaacaccaagaaggccggcaagacaggccccatgaaaaccctgctggttagagtgatgacacccgatctgagagagcggctggaaaacctgagaaagaagcctgaaaatatcccccagcccatcagcaatacatctagagccaacctgaataagctgctgaccgattacaccgaaatgaagaaggcgatcctgcatgtgtactgggaagagttccagaaggaccctgtgggcctgatgagccgggtggcccagcctgccagcaagaagatcgatcagaacaagctgaaacctgagatggacgagaagggcaacctgaccaccgccggctttgcctgctctcagtgtggccagcccctgttcgtgtacaagctggagcaggtgtctgagaagggcaaggcttacaccaactacttcggacggtgcaatgtggccgagcacgaaaagctgatcctgctggcccagctgaagcccgagaaggatagcgacgaagccgtgacatatagcctgggaaagtttgggcagagggccctggatttctacagcattcatgtgaccaaggagtccacccaccccgtgaagcccctggcccagatcgccggaaacagatacgcctccggacctgtgggaaaggccctgagcgacgcatgtatgggcacaatcgcctccttcctgtctaagtaccaggacatcatcatcgaacaccagaaggtggtgaagggcaaccagaagagactggagagcctgcgggagctggccggcaaggaaaacctggaataccctagcgtgaccctgccacctcagcctcacaccaaggagggcgttgatgcctacaacgaagtgatcgcccgggtgcgaatgtgggtgaacctgaacctgtggcagaagctgaagctaagcagagatgatgccaagcctctgctgagactgaagggattcccttcctttcctctggtcgagagacaggccaacgaagtggactggtgggacatggtgtgtaacgtgaagaagctgatcaacgagaaaaaggaggatggcaaggtgttttggcagaatctggctggctacaagagacaggaagccctgagaccatacctgagcagcgaggaagatcggaagaagggaaagaaattcgctcggtaccagctgggcgacctgctgctgcacctggaaaagaagcacggcgaggactggggaaaggtgtacgacgaggcctgggagcggattgacaagaaagtggaaggcctgagcaagcacatcaagctggaagaggaacggagaagcgaggacgcccagagcaaggccgccctgaccgactggctgcgggctaaggccagcttcgtgatcgagggcctgaaggaggccgacaaggacgagttctgcagatgcgagctgaagctgcagaagtggtacggggacctgcggggaaagcccttcgccatcgaagccgagaacagcatcctggacatcagcggcttcagcaagcagtacaactgtgccttcatctggcagaaggacggcgtgaagaagctgaacctgtacctgatcatcaactacttcaagggcggcaagctgcggttcaagaagatcaaacctgaagccttcgaagccaacagattctacaccgtgatcaacaaaaagagcggcgagatcgtgcccatggaggtgaacttcaacttcgacgaccccaacctgatcatcctgcctctggcctttggcaagagacagggcagagaattcatctggaacgacctgctgtccctggaaaccggcagcctgaagctggccaacggaagagtgatcgagaagacactgtacaacagaagaacccggcaggatgagcctgccctgttcgtggccctgaccttcgagcggcgggaggtcctggactcctccaatatcaaaccaatgaacctgatcggcgtggcaagaggcgaaaacatccccgccgtgatcgccctgaccgaccccgagggctgcccactgagccggtttaaggatagcctgggaaacccaacccacatcctgagaatcggcgagagctataaggagaagcagcggaccatccaggccaagaaggaggtggagcagcggagagccggcggctacagccggaagtacgccagcaaagccaagaatctggcagacgatatggtgagaaacaccgctagagatctgctgtactacgccgtgacccaggatgccatgctgatcttcgccaacctgagccggggcttcggccggcagggcaagcggaccttcatggccgagagacagtacacacggatggaggactggctgaccgccaagctggcctacgagggcctgagcaagacctacctgtccaagacactggcccagtacacctccaagacatgcagcaactgtgggtttaccatcaccagcgccgactacgacagggtgctggagaagctgaagaagacagcaacaggctggatgaccacaattaacggcaaggagctgaaggtggagggccagattacctactacaacagatacaagagacagaacgtagtcaaggacctgtccgtcgagctggatagactgagcgaagaatctgtgaacaacgacatctcctcctggacaaagggcagaagcggagaagctctgagcctcctgaagaaaagattctcccatagacccgtgcaggagaagttcgtgtgcctgaactgcggcttcgagacacacgcagccgagcaagccgccctgaacatcgccagatcctggctgttcctgcggagccaggagtacaagaaataccagacaaacaagacaaccggcaacaccgataagagagccttcgtcgagacctggcagtccttttaccggaagaagcttaaggaggtgtggaaacctgccgtgcggtctggcggatctggcggaggctccaccagccccaagaaaaagagaaaagtctaagctgccttctgcggggcttgccttctggccatgcccttcttctctcccttgcacctgtacctcttggtctttgaataaagcctgagtaggaaggctagcaaaaaaaaaaaaaaaaaaaaaaaaaaaaaaaaaaaaaaaaaaaaaaaaaaaaaaaaaaaaaaaaaaaaaaaaaaaaaaaa

SEQ ID NO: 12980 - RNA, 5785 nt, synthetic construct
  source 1..5785: mol_type = other RNA
aggaaataagagagaaaagaagagtaagaagaaatataagagccaccatggcccctaagaagaagcgtaaagtgagccggatggaacgcctcgtctacgaggtgcggcagaagtgcagaaacatcgaggacatctgcatctcctgcggatctctgaacgtgaccctggagcacccactgttcatcggcggcatgtgccagaactgtaaaaactgttttctggagtgtgcctatcaatacgacgatgacggctaccagagctactgcaccatctgttgcggcggaagagaggtgctgatgtgtggaaataacaactgctgccggtgcttctgcgtggaatgcgtggacctgctggtgggccccggcgccgcccaggccgctattaaggaagatccttggaactgctacatgtgcggccacaagggcacatacggcctgctgagacggagagaggactggcctagcagactgcagatgttcttcgccaataaccacgaccaggagttcgacccccctaaggtgtaccctcccgtccccgccgagaagagaaagcccatccgggtcctgagcctgttcgatggcatcgccaccggtctgctggtgctgaaggacctgggcatccaggtggataggtacattgcctccgaggtgtgcgaggactccatcaccgtgggaatggtgcgtcatcagggcaagatcatgtacgtgggcgacgtgcggagcgtgacacagaagcatatccaggagtggggccctttcgacctggtgatcggcggcagcccttgcaatgacctgagcatcgtgaacccagcccggaagggcctgtacgagggaaccggcagactgttcttcgagttttacagactgctgcacgacgcccggcctaaggaaggcgacgaccggcccttcttttggctgttcgagaatgtggtggccatgggagtcagcgacaagcgggatattagccggttcctggagagcaaccccgtgatgatcgatgccaaggaagtgagcgccgcccaccgggccagatacttctggggcaatctgcctggcatgaacagacccctggccagcaccgtgaacgacaagctggagctgcaggagtgcctggagcacggccggatcgccaagttcagcaaggtgagaaccatcaccacccgaagcaacagcatcaaacaaggcaaggaccagcactttcctgtgttcatgaacgagaaggaggacatcctgtggtgtaccgagatggagagagtgttcgggttcccagtccactacacagatgtcagcaacatgtctagactggccagacagagactgctgggaagaagctggtccgtccctgtgatcagacacctgttcgcccctctgaaggagtacttcgcctgcgtgagcagcggcaacagcaacgccaacagccggggccccagcttctctagcggcctggtgccactgtccctgagagggagccacatgggccccatggagatctacaaaaccgtgagcgcctggaagcggcagcctgtgcgcgtgctgagcctgtttcggaatatcgataaagtcctgaaaagcctgggattcctggagagcggctctggctccggcggtggcaccctgaagtacgtggaggatgtgacaaacgtggtcagacgggatgtggagaagtggggccccttcgatctggtgtacggcagcacccaacccctgggcagctcttgtgaccggtgccctggctggtacatgtttcagttccaccggatcctgcagtacgccctgccgagacaggagtcccagcggccattcttttggattttcatggacaacttgctgctgaccgaggatgaccaggaaactaccactcggttcctgcagaccgaagccgtgaccctgcaggacgtgagaggccgggactaccagaacgccatgcgggtgtggtccaacatccctggactgaaaagcaagcacgcacctctgacccctaaagaagaggagtacctgcaggcccaggtgcggagcagaagcaagctggacgcccctaaggtggatctgctggtgaagaattgcctcctgcccctgagagagtacttcaagtatttcagccagaatagtctgcccctgggaggcagcggcggcggcgcccaggcccccctgagcttcgaggacgtggccgtgagcttcagcagggaggagtggaggctgctggtgcccgcccagaaggacctgtacagggacgtgatgctggagaactacaggaacctggtgagcgtgggctaccaggccagcgagcccgacagcctgttccagctggagcacggcggccccctgtgggtggtggagggcgccgcccccaggcccccctgccccgaggagatctgggagggcggcccaagcagcggcgcccctcctcccagcggcggcagcccagccggctccccaacctctaccgaggagggcacctctgagtccgccacccccgagagcggccctggcacctccaccgagcccagcgagggcagcgcacccggcagccctgccggcagccccacctccacagaggagggaaccagcaccgagcccagcgaaggcagcgccccaggcaccagcaccgagcctagtgagcaggagattaaacggatcaacaagatcagaagaagacttgtgaaagacagcaacaccaagaaggccggcaagacaggccccatgaaaaccctgctggttagagtgatgacacccgatctgagagagcggctggaaaacctgagaaagaagcctgaaaatatcccccagcccatcagcaatacatctagagccaacctgaataagctgctgaccgattacaccgaaatgaagaaggcgatcctgcatgtgtactgggaagagttccagaaggaccctgtgggcctgatgagccgggtggcccagcctgccagcaagaagatcgatcagaacaagctgaaacctgagatggacgagaagggcaacctgaccaccgccggctttgcctgctctcagtgtggccagcccctgttcgtgtacaagctggagcaggtgtctgagaagggcaaggcttacaccaactacttcggacggtgcaatgtggccgagcacgaaaagctgatcctgctggcccagctgaagcccgagaaggatagcgacgaagccgtgacatatagcctgggaaagtttgggcagagggccctggatttctacagcattcatgtgaccaaggagtccacccaccccgtgaagcccctggcccagatcgccggaaacagatacgcctccggacctgtgggaaaggccctgagcgacgcatgtatgggcacaatcgcctccttcctgtctaagtaccaggacatcatcatcgaacaccagaaggtggtgaagggcaaccagaagagactggagagcctgcgggagctggccggcaaggaaaacctggaataccctagcgtgaccctgccacctcagcctcacaccaaggagggcgttgatgcctacaacgaagtgatcgcccgggtgcgaatgtgggtgaacctgaacctgtggcagaagctgaagctaagcagagatgatgccaagcctctgctgagactgaagggattcccttcctttcctctggtcgagagacaggccaacgaagtggactggtgggacatggtgtgtaacgtgaagaagctgatcaacgagaaaaaggaggatggcaaggtgttttggcagaatctggctggctacaagagacaggaagccctgagaccatacctgagcagcgaggaagatcggaagaagggaaagaaattcgctcggtaccagctgggcgacctgctgctgcacctggaaaagaagcacggcgaggactggggaaaggtgtacgacgaggcctgggagcggattgacaagaaagtggaaggcctgagcaagcacatcaagctggaagaggaacggagaagcgaggacgcccagagcaaggccgccctgaccgactggctgcgggctaaggccagcttcgtgatcgagggcctgaaggaggccgacaaggacgagttctgcagatgcgagctgaagctgcagaagtggtacggggacctgcggggaaagcccttcgccatcgaagccgagaacagcatcctggacatcagcggcttcagcaagcagtacaactgtgccttcatctggcagaaggacggcgtgaagaagctgaacctgtacctgatcatcaactacttcaagggcggcaagctgcggttcaagaagatcaaacctgaagccttcgaagccaacagattctacaccgtgatcaacaaaaagagcggcgagatcgtgcccatggaggtgaacttcaacttcgacgaccccaacctgatcatcctgcctctggcctttggcaagagacagggcagagaattcatctggaacgacctgctgtccctggaaaccggcagcctgaagctggccaacggaagagtgatcgagaagacactgtacaacagaagaacccggcaggatgagcctgccctgttcgtggccctgaccttcgagcggcgggaggtcctggactcctccaatatcaaaccaatgaacctgatcggcgtggcaagaggcgaaaacatccccgccgtgatcgccctgaccgaccccgagggctgcccactgagccggtttaaggatagcctgggaaacccaacccacatcctgagaatcggcgagagctataaggagaagcagcggaccatccaggccaagaaggaggtggagcagcggagagccggcggctacagccggaagtacgccagcaaagccaagaatctggcagacgatatggtgagaaacaccgctagagatctgctgtactacgccgtgacccaggatgccatgctgatcttcgccaacctgagccggggcttcggccggcagggcaagcggaccttcatggccgagagacagtacacacggatggaggactggctgaccgccaagctggcctacgagggcctgagcaagacctacctgtccaagacactggcccagtacacctccaagacatgcagcaactgtgggtttaccatcaccagcgccgactacgacagggtgctggagaagctgaagaagacagcaacaggctggatgaccacaattaacggcaaggagctgaaggtggagggccagattacctactacaacagatacaagagacagaacgtagtcaaggacctgtccgtcgagctggatagactgagcgaagaatctgtgaacaacgacatctcctcctggacaaagggcagaagcggagaagctctgagcctcctgaagaaaagattctcccatagacccgtgcaggagaagttcgtgtgcctgaactgcggcttcgagacacacgcagccgagcaagccgccctgaacatcgccagatcctggctgttcctgcggagccaggagtacaagaaataccagacaaacaagacaaccggcaacaccgataagagagccttcgtcgagacctggcagtccttttaccggaagaagcttaaggaggtgtggaaacctgccgtgcggtctggcggatctggcggaggctccaccagccccaagaaaaagagaaaagtctaagctgccttctgcggggcttgccttctggccatgcccttcttctctcccttgcacctgtacctcttggtctttgaataaagcctgagtaggaaggctagcaaaaaaaaaaaaaaaaaaaaaaaaaaaaaaaaaaaaaaaaaaaaaaaaaaaaaaaaaaaaaaaaaaaaaaaaaaaaaaaa

SEQ ID NO: 12981 - RNA, 5785 nt, synthetic construct
  source 1..5785: mol_type = other RNA
aggaaataagagagaaaagaagagtaagaagaaatataagagccaccatggcccctaagaagaagcgtaaagtgagccggatggaacgcctcgtctacgaggtgcggcagaagtgcagaaacatcgaggacatctgcatctcctgcggatctctgaacgtgaccctggagcacccactgttcatcggcggcatgtgccagaactgtaaaaactgttttctggagtgtgcctatcaatacgacgatgacggctaccagagctactgcaccatctgttgcggcggaagagaggtgctgatgtgtggaaataacaactgctgccggtgcttctgcgtggaatgcgtggacctgctggtgggccccggcgccgcccaggccgctattaaggaagatccttggaactgctacatgtgcggccacaagggcacatacggcctgctgagacggagagaggactggcctagcagactgcagatgttcttcgccaataaccacgaccaggagttcgacccccctaaggtgtaccctcccgtccccgccgagaagagaaagcccatccgggtcctgagcctgttcgatggcatcgccaccggtctgctggtgctgaaggacctgggcatccaggtggataggtacattgcctccgaggtgtgcgaggactccatcaccgtgggaatggtgcgtcatcagggcaagatcatgtacgtgggcgacgtgcggagcgtgacacagaagcatatccaggagtggggccctttcgacctggtgatcggcggcagcccttgcaatgacctgagcatcgtgaacccagcccggaagggcctgtacgagggaaccggcagactgttcttcgagttttacagactgctgcacgacgcccggcctaaggaaggcgacgaccggcccttcttttggctgttcgagaatgtggtggccatgggagtcagcgacaagcgggatattagccggttcctggagagcaaccccgtgatgatcgatgccaaggaagtgagcgccgcccaccgggccagatacttctggggcaatctgcctggcatgaacagacccctggccagcaccgtgaacgacaagctggagctgcaggagtgcctggagcacggccggatcgccaagttcagcaaggtgagaaccatcaccacccgaagcaacagcatcaaacaaggcaaggaccagcactttcctgtgttcatgaacgagaaggaggacatcctgtggtgtaccgagatggagagagtgttcgggttcccagtccactacacagatgtcagcaacatgtctagactggccagacagagactgctgggaagaagctggtccgtccctgtgatcagacacctgttcgcccctctgaaggagtacttcgcctgcgtgagcagcggcaacagcaacgccaacagccggggccccagcttctctagcggcctggtgccactgtccctgagagggagccacatgggccccatggagatctacaaaaccgtgagcgcctggaagcggcagcctgtgcgcgtgctgagcctgtttcggaatatcgataaagtcctgaaaagcctgggattcctggagagcggctctggctccggcggtggcaccctgaagtacgtggaggatgtgacaaacgtggtcagacgggatgtggagaagtggggccccttcgatctggtgtacggcagcacccaacccctgggcagctcttgtgaccggtgccctggctggtacatgtttcagttccaccggatcctgcagtacgccctgccgagacaggagtcccagcggccattcttttggattttcatggacaacttgctgctgaccgaggatgaccaggaaactaccactcggttcctgcagaccgaagccgtgaccctgcaggacgtgagaggccgggactaccagaacgccatgcgggtgtggtccaacatccctggactgaaaagcaagcacgcacctctgacccctaaagaagaggagtacctgcaggcccaggtgcggagcagaagcaagctggacgcccctaaggtggatctgctggtgaagaattgcctcctgcccctgagagagtacttcaagtatttcagccagaatagtctgcccctgggaggcagcggcggcggcgcccagaagagcctgaccctggaggacgtggccgtggacttcagcagggaggagtggaggctgctggcccccgcccagaaggacctgtacagggacgtgatgctggagaactacaggaacctggtgagcgtgggccaccaggccagcaagcccgacgtgctggccaagctggagaggggcgaggagccctgggccatcgaggaggaggtgaggagcggcaccagccccgagaccggcaaggtgggcggcccaagcagcggcgcccctcctcccagcggcggcagcccagccggctccccaacctctaccgaggagggcacctctgagtccgccacccccgagagcggccctggcacctccaccgagcccagcgagggcagcgcacccggcagccctgccggcagccccacctccacagaggagggaaccagcaccgagcccagcgaaggcagcgccccaggcaccagcaccgagcctagtgagcaggagattaaacggatcaacaagatcagaagaagacttgtgaaagacagcaacaccaagaaggccggcaagacaggccccatgaaaaccctgctggttagagtgatgacacccgatctgagagagcggctggaaaacctgagaaagaagcctgaaaatatcccccagcccatcagcaatacatctagagccaacctgaataagctgctgaccgattacaccgaaatgaagaaggcgatcctgcatgtgtactgggaagagttccagaaggaccctgtgggcctgatgagccgggtggcccagcctgccagcaagaagatcgatcagaacaagctgaaacctgagatggacgagaagggcaacctgaccaccgccggctttgcctgctctcagtgtggccagcccctgttcgtgtacaagctggagcaggtgtctgagaagggcaaggcttacaccaactacttcggacggtgcaatgtggccgagcacgaaaagctgatcctgctggcccagctgaagcccgagaaggatagcgacgaagccgtgacatatagcctgggaaagtttgggcagagggccctggatttctacagcattcatgtgaccaaggagtccacccaccccgtgaagcccctggcccagatcgccggaaacagatacgcctccggacctgtgggaaaggccctgagcgacgcatgtatgggcacaatcgcctccttcctgtctaagtaccaggacatcatcatcgaacaccagaaggtggtgaagggcaaccagaagagactggagagcctgcgggagctggccggcaaggaaaacctggaataccctagcgtgaccctgccacctcagcctcacaccaaggagggcgttgatgcctacaacgaagtgatcgcccgggtgcgaatgtgggtgaacctgaacctgtggcagaagctgaagctaagcagagatgatgccaagcctctgctgagactgaagggattcccttcctttcctctggtcgagagacaggccaacgaagtggactggtgggacatggtgtgtaacgtgaagaagctgatcaacgagaaaaaggaggatggcaaggtgttttggcagaatctggctggctacaagagacaggaagccctgagaccatacctgagcagcgaggaagatcggaagaagggaaagaaattcgctcggtaccagctgggcgacctgctgctgcacctggaaaagaagcacggcgaggactggggaaaggtgtacgacgaggcctgggagcggattgacaagaaagtggaaggcctgagcaagcacatcaagctggaagaggaacggagaagcgaggacgcccagagcaaggccgccctgaccgactggctgcgggctaaggccagcttcgtgatcgagggcctgaaggaggccgacaaggacgagttctgcagatgcgagctgaagctgcagaagtggtacggggacctgcggggaaagcccttcgccatcgaagccgagaacagcatcctggacatcagcggcttcagcaagcagtacaactgtgccttcatctggcagaaggacggcgtgaagaagctgaacctgtacctgatcatcaactacttcaagggcggcaagctgcggttcaagaagatcaaacctgaagccttcgaagccaacagattctacaccgtgatcaacaaaaagagcggcgagatcgtgcccatggaggtgaacttcaacttcgacgaccccaacctgatcatcctgcctctggcctttggcaagagacagggcagagaattcatctggaacgacctgctgtccctggaaaccggcagcctgaagctggccaacggaagagtgatcgagaagacactgtacaacagaagaacccggcaggatgagcctgccctgttcgtggccctgaccttcgagcggcgggaggtcctggactcctccaatatcaaaccaatgaacctgatcggcgtggcaagaggcgaaaacatccccgccgtgatcgccctgaccgaccccgagggctgcccactgagccggtttaaggatagcctgggaaacccaacccacatcctgagaatcggcgagagctataaggagaagcagcggaccatccaggccaagaaggaggtggagcagcggagagccggcggctacagccggaagtacgccagcaaagccaagaatctggcagacgatatggtgagaaacaccgctagagatctgctgtactacgccgtgacccaggatgccatgctgatcttcgccaacctgagccggggcttcggccggcagggcaagcggaccttcatggccgagagacagtacacacggatggaggactggctgaccgccaagctggcctacgagggcctgagcaagacctacctgtccaagacactggcccagtacacctccaagacatgcagcaactgtgggtttaccatcaccagcgccgactacgacagggtgctggagaagctgaagaagacagcaacaggctggatgaccacaattaacggcaaggagctgaaggtggagggccagattacctactacaacagatacaagagacagaacgtagtcaaggacctgtccgtcgagctggatagactgagcgaagaatctgtgaacaacgacatctcctcctggacaaagggcagaagcggagaagctctgagcctcctgaagaaaagattctcccatagacccgtgcaggagaagttcgtgtgcctgaactgcggcttcgagacacacgcagccgagcaagccgccctgaacatcgccagatcctggctgttcctgcggagccaggagtacaagaaataccagacaaacaagacaaccggcaacaccgataagagagccttcgtcgagacctggcagtccttttaccggaagaagcttaaggaggtgtggaaacctgccgtgcggtctggcggatctggcggaggctccaccagccccaagaaaaagagaaaagtctaagctgccttctgcggggcttgccttctggccatgcccttcttctctcccttgcacctgtacctcttggtctttgaataaagcctgagtaggaaggctagcaaaaaaaaaaaaaaaaaaaaaaaaaaaaaaaaaaaaaaaaaaaaaaaaaaaaaaaaaaaaaaaaaaaaaaaaaaaaaaaa

SEQ ID NO: 12982 - RNA, 5785 nt, synthetic construct
  source 1..5785: mol_type = other RNA
aggaaataagagagaaaagaagagtaagaagaaatataagagccaccatggcccctaagaagaagcgtaaagtgagccggatggaacgcctcgtctacgaggtgcggcagaagtgcagaaacatcgaggacatctgcatctcctgcggatctctgaacgtgaccctggagcacccactgttcatcggcggcatgtgccagaactgtaaaaactgttttctggagtgtgcctatcaatacgacgatgacggctaccagagctactgcaccatctgttgcggcggaagagaggtgctgatgtgtggaaataacaactgctgccggtgcttctgcgtggaatgcgtggacctgctggtgggccccggcgccgcccaggccgctattaaggaagatccttggaactgctacatgtgcggccacaagggcacatacggcctgctgagacggagagaggactggcctagcagactgcagatgttcttcgccaataaccacgaccaggagttcgacccccctaaggtgtaccctcccgtccccgccgagaagagaaagcccatccgggtcctgagcctgttcgatggcatcgccaccggtctgctggtgctgaaggacctgggcatccaggtggataggtacattgcctccgaggtgtgcgaggactccatcaccgtgggaatggtgcgtcatcagggcaagatcatgtacgtgggcgacgtgcggagcgtgacacagaagcatatccaggagtggggccctttcgacctggtgatcggcggcagcccttgcaatgacctgagcatcgtgaacccagcccggaagggcctgtacgagggaaccggcagactgttcttcgagttttacagactgctgcacgacgcccggcctaaggaaggcgacgaccggcccttcttttggctgttcgagaatgtggtggccatgggagtcagcgacaagcgggatattagccggttcctggagagcaaccccgtgatgatcgatgccaaggaagtgagcgccgcccaccgggccagatacttctggggcaatctgcctggcatgaacagacccctggccagcaccgtgaacgacaagctggagctgcaggagtgcctggagcacggccggatcgccaagttcagcaaggtgagaaccatcaccacccgaagcaacagcatcaaacaaggcaaggaccagcactttcctgtgttcatgaacgagaaggaggacatcctgtggtgtaccgagatggagagagtgttcgggttcccagtccactacacagatgtcagcaacatgtctagactggccagacagagactgctgggaagaagctggtccgtccctgtgatcagacacctgttcgcccctctgaaggagtacttcgcctgcgtgagcagcggcaacagcaacgccaacagccggggccccagcttctctagcggcctggtgccactgtccctgagagggagccacatgggccccatggagatctacaaaaccgtgagcgcctggaagcggcagcctgtgcgcgtgctgagcctgtttcggaatatcgataaagtcctgaaaagcctgggattcctggagagcggctctggctccggcggtggcaccctgaagtacgtggaggatgtgacaaacgtggtcagacgggatgtggagaagtggggccccttcgatctggtgtacggcagcacccaacccctgggcagctcttgtgaccggtgccctggctggtacatgtttcagttccaccggatcctgcagtacgccctgccgagacaggagtcccagcggccattcttttggattttcatggacaacttgctgctgaccgaggatgaccaggaaactaccactcggttcctgcagaccgaagccgtgaccctgcaggacgtgagaggccgggactaccagaacgccatgcgggtgtggtccaacatccctggactgaaaagcaagcacgcacctctgacccctaaagaagaggagtacctgcaggcccaggtgcggagcagaagcaagctggacgcccctaaggtggatctgctggtgaagaattgcctcctgcccctgagagagtacttcaagtatttcagccagaatagtctgcccctgggaggcagcggcggcggcgcccaggagcccgtgaccttcaacgacgtggccgtggacttcacccaggaggagtggggccagctggacctggtgcagaggaccctgtacagggacgtgatgctggagacctacggccacctgctgagcgtgggcaaccagatcaccaagcccgaggtgatcagcctgctggagcagggcgaggagccctggagcatggagcccgcctaccccctgcagggcacctgccccgcccccgagatcggcggcccaagcagcggcgcccctcctcccagcggcggcagcccagccggctccccaacctctaccgaggagggcacctctgagtccgccacccccgagagcggccctggcacctccaccgagcccagcgagggcagcgcacccggcagccctgccggcagccccacctccacagaggagggaaccagcaccgagcccagcgaaggcagcgccccaggcaccagcaccgagcctagtgagcaggagattaaacggatcaacaagatcagaagaagacttgtgaaagacagcaacaccaagaaggccggcaagacaggccccatgaaaaccctgctggttagagtgatgacacccgatctgagagagcggctggaaaacctgagaaagaagcctgaaaatatcccccagcccatcagcaatacatctagagccaacctgaataagctgctgaccgattacaccgaaatgaagaaggcgatcctgcatgtgtactgggaagagttccagaaggaccctgtgggcctgatgagccgggtggcccagcctgccagcaagaagatcgatcagaacaagctgaaacctgagatggacgagaagggcaacctgaccaccgccggctttgcctgctctcagtgtggccagcccctgttcgtgtacaagctggagcaggtgtctgagaagggcaaggcttacaccaactacttcggacggtgcaatgtggccgagcacgaaaagctgatcctgctggcccagctgaagcccgagaaggatagcgacgaagccgtgacatatagcctgggaaagtttgggcagagggccctggatttctacagcattcatgtgaccaaggagtccacccaccccgtgaagcccctggcccagatcgccggaaacagatacgcctccggacctgtgggaaaggccctgagcgacgcatgtatgggcacaatcgcctccttcctgtctaagtaccaggacatcatcatcgaacaccagaaggtggtgaagggcaaccagaagagactggagagcctgcgggagctggccggcaaggaaaacctggaataccctagcgtgaccctgccacctcagcctcacaccaaggagggcgttgatgcctacaacgaagtgatcgcccgggtgcgaatgtgggtgaacctgaacctgtggcagaagctgaagctaagcagagatgatgccaagcctctgctgagactgaagggattcccttcctttcctctggtcgagagacaggccaacgaagtggactggtgggacatggtgtgtaacgtgaagaagctgatcaacgagaaaaaggaggatggcaaggtgttttggcagaatctggctggctacaagagacaggaagccctgagaccatacctgagcagcgaggaagatcggaagaagggaaagaaattcgctcggtaccagctgggcgacctgctgctgcacctggaaaagaagcacggcgaggactggggaaaggtgtacgacgaggcctgggagcggattgacaagaaagtggaaggcctgagcaagcacatcaagctggaagaggaacggagaagcgaggacgcccagagcaaggccgccctgaccgactggctgcgggctaaggccagcttcgtgatcgagggcctgaaggaggccgacaaggacgagttctgcagatgcgagctgaagctgcagaagtggtacggggacctgcggggaaagcccttcgccatcgaagccgagaacagcatcctggacatcagcggcttcagcaagcagtacaactgtgccttcatctggcagaaggacggcgtgaagaagctgaacctgtacctgatcatcaactacttcaagggcggcaagctgcggttcaagaagatcaaacctgaagccttcgaagccaacagattctacaccgtgatcaacaaaaagagcggcgagatcgtgcccatggaggtgaacttcaacttcgacgaccccaacctgatcatcctgcctctggcctttggcaagagacagggcagagaattcatctggaacgacctgctgtccctggaaaccggcagcctgaagctggccaacggaagagtgatcgagaagacactgtacaacagaagaacccggcaggatgagcctgccctgttcgtggccctgaccttcgagcggcgggaggtcctggactcctccaatatcaaaccaatgaacctgatcggcgtggcaagaggcgaaaacatccccgccgtgatcgccctgaccgaccccgagggctgcccactgagccggtttaaggatagcctgggaaacccaacccacatcctgagaatcggcgagagctataaggagaagcagcggaccatccaggccaagaaggaggtggagcagcggagagccggcggctacagccggaagtacgccagcaaagccaagaatctggcagacgatatggtgagaaacaccgctagagatctgctgtactacgccgtgacccaggatgccatgctgatcttcgccaacctgagccggggcttcggccggcagggcaagcggaccttcatggccgagagacagtacacacggatggaggactggctgaccgccaagctggcctacgagggcctgagcaagacctacctgtccaagacactggcccagtacacctccaagacatgcagcaactgtgggtttaccatcaccagcgccgactacgacagggtgctggagaagctgaagaagacagcaacaggctggatgaccacaattaacggcaaggagctgaaggtggagggccagattacctactacaacagatacaagagacagaacgtagtcaaggacctgtccgtcgagctggatagactgagcgaagaatctgtgaacaacgacatctcctcctggacaaagggcagaagcggagaagctctgagcctcctgaagaaaagattctcccatagacccgtgcaggagaagttcgtgtgcctgaactgcggcttcgagacacacgcagccgagcaagccgccctgaacatcgccagatcctggctgttcctgcggagccaggagtacaagaaataccagacaaacaagacaaccggcaacaccgataagagagccttcgtcgagacctggcagtccttttaccggaagaagcttaaggaggtgtggaaacctgccgtgcggtctggcggatctggcggaggctccaccagccccaagaaaaagagaaaagtctaagctgccttctgcggggcttgccttctggccatgcccttcttctctcccttgcacctgtacctcttggtctttgaataaagcctgagtaggaaggctagcaaaaaaaaaaaaaaaaaaaaaaaaaaaaaaaaaaaaaaaaaaaaaaaaaaaaaaaaaaaaaaaaaaaaaaaaaaaaaaaa

SEQ ID NO: 12983 - RNA, 5785 nt, synthetic construct
  source 1..5785: mol_type = other RNA
aggaaataagagagaaaagaagagtaagaagaaatataagagccaccatggcccctaagaagaagcgtaaagtgagccggatggaacgcctcgtctacgaggtgcggcagaagtgcagaaacatcgaggacatctgcatctcctgcggatctctgaacgtgaccctggagcacccactgttcatcggcggcatgtgccagaactgtaaaaactgttttctggagtgtgcctatcaatacgacgatgacggctaccagagctactgcaccatctgttgcggcggaagagaggtgctgatgtgtggaaataacaactgctgccggtgcttctgcgtggaatgcgtggacctgctggtgggccccggcgccgcccaggccgctattaaggaagatccttggaactgctacatgtgcggccacaagggcacatacggcctgctgagacggagagaggactggcctagcagactgcagatgttcttcgccaataaccacgaccaggagttcgacccccctaaggtgtaccctcccgtccccgccgagaagagaaagcccatccgggtcctgagcctgttcgatggcatcgccaccggtctgctggtgctgaaggacctgggcatccaggtggataggtacattgcctccgaggtgtgcgaggactccatcaccgtgggaatggtgcgtcatcagggcaagatcatgtacgtgggcgacgtgcggagcgtgacacagaagcatatccaggagtggggccctttcgacctggtgatcggcggcagcccttgcaatgacctgagcatcgtgaacccagcccggaagggcctgtacgagggaaccggcagactgttcttcgagttttacagactgctgcacgacgcccggcctaaggaaggcgacgaccggcccttcttttggctgttcgagaatgtggtggccatgggagtcagcgacaagcgggatattagccggttcctggagagcaaccccgtgatgatcgatgccaaggaagtgagcgccgcccaccgggccagatacttctggggcaatctgcctggcatgaacagacccctggccagcaccgtgaacgacaagctggagctgcaggagtgcctggagcacggccggatcgccaagttcagcaaggtgagaaccatcaccacccgaagcaacagcatcaaacaaggcaaggaccagcactttcctgtgttcatgaacgagaaggaggacatcctgtggtgtaccgagatggagagagtgttcgggttcccagtccactacacagatgtcagcaacatgtctagactggccagacagagactgctgggaagaagctggtccgtccctgtgatcagacacctgttcgcccctctgaaggagtacttcgcctgcgtgagcagcggcaacagcaacgccaacagccggggccccagcttctctagcggcctggtgccactgtccctgagagggagccacatgggccccatggagatctacaaaaccgtgagcgcctggaagcggcagcctgtgcgcgtgctgagcctgtttcggaatatcgataaagtcctgaaaagcctgggattcctggagagcggctctggctccggcggtggcaccctgaagtacgtggaggatgtgacaaacgtggtcagacgggatgtggagaagtggggccccttcgatctggtgtacggcagcacccaacccctgggcagctcttgtgaccggtgccctggctggtacatgtttcagttccaccggatcctgcagtacgccctgccgagacaggagtcccagcggccattcttttggattttcatggacaacttgctgctgaccgaggatgaccaggaaactaccactcggttcctgcagaccgaagccgtgaccctgcaggacgtgagaggccgggactaccagaacgccatgcgggtgtggtccaacatccctggactgaaaagcaagcacgcacctctgacccctaaagaagaggagtacctgcaggcccaggtgcggagcagaagcaagctggacgcccctaaggtggatctgctggtgaagaattgcctcctgcccctgagagagtacttcaagtatttcagccagaatagtctgcccctgggaggcagcggcggcggcaggcccagggccctgaagttcgccgacgtggccgtgtacttcagccccgaggagtggggctgcctgaggcccgcccagaggaccctgtacagggacgtgatgagggagacctacggccacctgggcgccctgggctgcgccggccccaagcccgccctgatcagctggctggagaggaacaccgacgactgggagcccgccgccctggacccccaggagtaccccaggggcgtgaccgtgcagggcggcccaagcagcggcgcccctcctcccagcggcggcagcccagccggctccccaacctctaccgaggagggcacctctgagtccgccacccccgagagcggccctggcacctccaccgagcccagcgagggcagcgcacccggcagccctgccggcagccccacctccacagaggagggaaccagcaccgagcccagcgaaggcagcgccccaggcaccagcaccgagcctagtgagcaggagattaaacggatcaacaagatcagaagaagacttgtgaaagacagcaacaccaagaaggccggcaagacaggccccatgaaaaccctgctggttagagtgatgacacccgatctgagagagcggctggaaaacctgagaaagaagcctgaaaatatcccccagcccatcagcaatacatctagagccaacctgaataagctgctgaccgattacaccgaaatgaagaaggcgatcctgcatgtgtactgggaagagttccagaaggaccctgtgggcctgatgagccgggtggcccagcctgccagcaagaagatcgatcagaacaagctgaaacctgagatggacgagaagggcaacctgaccaccgccggctttgcctgctctcagtgtggccagcccctgttcgtgtacaagctggagcaggtgtctgagaagggcaaggcttacaccaactacttcggacggtgcaatgtggccgagcacgaaaagctgatcctgctggcccagctgaagcccgagaaggatagcgacgaagccgtgacatatagcctgggaaagtttgggcagagggccctggatttctacagcattcatgtgaccaaggagtccacccaccccgtgaagcccctggcccagatcgccggaaacagatacgcctccggacctgtgggaaaggccctgagcgacgcatgtatgggcacaatcgcctccttcctgtctaagtaccaggacatcatcatcgaacaccagaaggtggtgaagggcaaccagaagagactggagagcctgcgggagctggccggcaaggaaaacctggaataccctagcgtgaccctgccacctcagcctcacaccaaggagggcgttgatgcctacaacgaagtgatcgcccgggtgcgaatgtgggtgaacctgaacctgtggcagaagctgaagctaagcagagatgatgccaagcctctgctgagactgaagggattcccttcctttcctctggtcgagagacaggccaacgaagtggactggtgggacatggtgtgtaacgtgaagaagctgatcaacgagaaaaaggaggatggcaaggtgttttggcagaatctggctggctacaagagacaggaagccctgagaccatacctgagcagcgaggaagatcggaagaagggaaagaaattcgctcggtaccagctgggcgacctgctgctgcacctggaaaagaagcacggcgaggactggggaaaggtgtacgacgaggcctgggagcggattgacaagaaagtggaaggcctgagcaagcacatcaagctggaagaggaacggagaagcgaggacgcccagagcaaggccgccctgaccgactggctgcgggctaaggccagcttcgtgatcgagggcctgaaggaggccgacaaggacgagttctgcagatgcgagctgaagctgcagaagtggtacggggacctgcggggaaagcccttcgccatcgaagccgagaacagcatcctggacatcagcggcttcagcaagcagtacaactgtgccttcatctggcagaaggacggcgtgaagaagctgaacctgtacctgatcatcaactacttcaagggcggcaagctgcggttcaagaagatcaaacctgaagccttcgaagccaacagattctacaccgtgatcaacaaaaagagcggcgagatcgtgcccatggaggtgaacttcaacttcgacgaccccaacctgatcatcctgcctctggcctttggcaagagacagggcagagaattcatctggaacgacctgctgtccctggaaaccggcagcctgaagctggccaacggaagagtgatcgagaagacactgtacaacagaagaacccggcaggatgagcctgccctgttcgtggccctgaccttcgagcggcgggaggtcctggactcctccaatatcaaaccaatgaacctgatcggcgtggcaagaggcgaaaacatccccgccgtgatcgccctgaccgaccccgagggctgcccactgagccggtttaaggatagcctgggaaacccaacccacatcctgagaatcggcgagagctataaggagaagcagcggaccatccaggccaagaaggaggtggagcagcggagagccggcggctacagccggaagtacgccagcaaagccaagaatctggcagacgatatggtgagaaacaccgctagagatctgctgtactacgccgtgacccaggatgccatgctgatcttcgccaacctgagccggggcttcggccggcagggcaagcggaccttcatggccgagagacagtacacacggatggaggactggctgaccgccaagctggcctacgagggcctgagcaagacctacctgtccaagacactggcccagtacacctccaagacatgcagcaactgtgggtttaccatcaccagcgccgactacgacagggtgctggagaagctgaagaagacagcaacaggctggatgaccacaattaacggcaaggagctgaaggtggagggccagattacctactacaacagatacaagagacagaacgtagtcaaggacctgtccgtcgagctggatagactgagcgaagaatctgtgaacaacgacatctcctcctggacaaagggcagaagcggagaagctctgagcctcctgaagaaaagattctcccatagacccgtgcaggagaagttcgtgtgcctgaactgcggcttcgagacacacgcagccgagcaagccgccctgaacatcgccagatcctggctgttcctgcggagccaggagtacaagaaataccagacaaacaagacaaccggcaacaccgataagagagccttcgtcgagacctggcagtccttttaccggaagaagcttaaggaggtgtggaaacctgccgtgcggtctggcggatctggcggaggctccaccagccccaagaaaaagagaaaagtctaagctgccttctgcggggcttgccttctggccatgcccttcttctctcccttgcacctgtacctcttggtctttgaataaagcctgagtaggaaggctagcaaaaaaaaaaaaaaaaaaaaaaaaaaaaaaaaaaaaaaaaaaaaaaaaaaaaaaaaaaaaaaaaaaaaaaaaaaaaaaaa

SEQ ID NO: 12984 - RNA, 5785 nt, synthetic construct
  source 1..5785: mol_type = other RNA
aggaaataagagagaaaagaagagtaagaagaaatataagagccaccatggcccctaagaagaagcgtaaagtgagccggatggaacgcctcgtctacgaggtgcggcagaagtgcagaaacatcgaggacatctgcatctcctgcggatctctgaacgtgaccctggagcacccactgttcatcggcggcatgtgccagaactgtaaaaactgttttctggagtgtgcctatcaatacgacgatgacggctaccagagctactgcaccatctgttgcggcggaagagaggtgctgatgtgtggaaataacaactgctgccggtgcttctgcgtggaatgcgtggacctgctggtgggccccggcgccgcccaggccgctattaaggaagatccttggaactgctacatgtgcggccacaagggcacatacggcctgctgagacggagagaggactggcctagcagactgcagatgttcttcgccaataaccacgaccaggagttcgacccccctaaggtgtaccctcccgtccccgccgagaagagaaagcccatccgggtcctgagcctgttcgatggcatcgccaccggtctgctggtgctgaaggacctgggcatccaggtggataggtacattgcctccgaggtgtgcgaggactccatcaccgtgggaatggtgcgtcatcagggcaagatcatgtacgtgggcgacgtgcggagcgtgacacagaagcatatccaggagtggggccctttcgacctggtgatcggcggcagcccttgcaatgacctgagcatcgtgaacccagcccggaagggcctgtacgagggaaccggcagactgttcttcgagttttacagactgctgcacgacgcccggcctaaggaaggcgacgaccggcccttcttttggctgttcgagaatgtggtggccatgggagtcagcgacaagcgggatattagccggttcctggagagcaaccccgtgatgatcgatgccaaggaagtgagcgccgcccaccgggccagatacttctggggcaatctgcctggcatgaacagacccctggccagcaccgtgaacgacaagctggagctgcaggagtgcctggagcacggccggatcgccaagttcagcaaggtgagaaccatcaccacccgaagcaacagcatcaaacaaggcaaggaccagcactttcctgtgttcatgaacgagaaggaggacatcctgtggtgtaccgagatggagagagtgttcgggttcccagtccactacacagatgtcagcaacatgtctagactggccagacagagactgctgggaagaagctggtccgtccctgtgatcagacacctgttcgcccctctgaaggagtacttcgcctgcgtgagcagcggcaacagcaacgccaacagccggggccccagcttctctagcggcctggtgccactgtccctgagagggagccacatgggccccatggagatctacaaaaccgtgagcgcctggaagcggcagcctgtgcgcgtgctgagcctgtttcggaatatcgataaagtcctgaaaagcctgggattcctggagagcggctctggctccggcggtggcaccctgaagtacgtggaggatgtgacaaacgtggtcagacgggatgtggagaagtggggccccttcgatctggtgtacggcagcacccaacccctgggcagctcttgtgaccggtgccctggctggtacatgtttcagttccaccggatcctgcagtacgccctgccgagacaggagtcccagcggccattcttttggattttcatggacaacttgctgctgaccgaggatgaccaggaaactaccactcggttcctgcagaccgaagccgtgaccctgcaggacgtgagaggccgggactaccagaacgccatgcgggtgtggtccaacatccctggactgaaaagcaagcacgcacctctgacccctaaagaagaggagtacctgcaggcccaggtgcggagcagaagcaagctggacgcccctaaggtggatctgctggtgaagaattgcctcctgcccctgagagagtacttcaagtatttcagccagaatagtctgcccctgggaggcagcggcggcggcagccaggtgagcgtgaccttcgaggacgtggccgtgctgttcaccagggacgagtggaggaagctggcccccccccagaggaacctgtaccaggacgtgatgctggagaactacagcaacctggtgagcctgggcctgctgttccccaagcccaaggtgatcagcctgctgcagcagggcgaggacccctggaaggtggagaaggagaacctgggcggcagcagcctgggctggaagaacagcggcggcccaagcagcggcgcccctcctcccagcggcggcagcccagccggctccccaacctctaccgaggagggcacctctgagtccgccacccccgagagcggccctggcacctccaccgagcccagcgagggcagcgcacccggcagccctgccggcagccccacctccacagaggagggaaccagcaccgagcccagcgaaggcagcgccccaggcaccagcaccgagcctagtgagcaggagattaaacggatcaacaagatcagaagaagacttgtgaaagacagcaacaccaagaaggccggcaagacaggccccatgaaaaccctgctggttagagtgatgacacccgatctgagagagcggctggaaaacctgagaaagaagcctgaaaatatcccccagcccatcagcaatacatctagagccaacctgaataagctgctgaccgattacaccgaaatgaagaaggcgatcctgcatgtgtactgggaagagttccagaaggaccctgtgggcctgatgagccgggtggcccagcctgccagcaagaagatcgatcagaacaagctgaaacctgagatggacgagaagggcaacctgaccaccgccggctttgcctgctctcagtgtggccagcccctgttcgtgtacaagctggagcaggtgtctgagaagggcaaggcttacaccaactacttcggacggtgcaatgtggccgagcacgaaaagctgatcctgctggcccagctgaagcccgagaaggatagcgacgaagccgtgacatatagcctgggaaagtttgggcagagggccctggatttctacagcattcatgtgaccaaggagtccacccaccccgtgaagcccctggcccagatcgccggaaacagatacgcctccggacctgtgggaaaggccctgagcgacgcatgtatgggcacaatcgcctccttcctgtctaagtaccaggacatcatcatcgaacaccagaaggtggtgaagggcaaccagaagagactggagagcctgcgggagctggccggcaaggaaaacctggaataccctagcgtgaccctgccacctcagcctcacaccaaggagggcgttgatgcctacaacgaagtgatcgcccgggtgcgaatgtgggtgaacctgaacctgtggcagaagctgaagctaagcagagatgatgccaagcctctgctgagactgaagggattcccttcctttcctctggtcgagagacaggccaacgaagtggactggtgggacatggtgtgtaacgtgaagaagctgatcaacgagaaaaaggaggatggcaaggtgttttggcagaatctggctggctacaagagacaggaagccctgagaccatacctgagcagcgaggaagatcggaagaagggaaagaaattcgctcggtaccagctgggcgacctgctgctgcacctggaaaagaagcacggcgaggactggggaaaggtgtacgacgaggcctgggagcggattgacaagaaagtggaaggcctgagcaagcacatcaagctggaagaggaacggagaagcgaggacgcccagagcaaggccgccctgaccgactggctgcgggctaaggccagcttcgtgatcgagggcctgaaggaggccgacaaggacgagttctgcagatgcgagctgaagctgcagaagtggtacggggacctgcggggaaagcccttcgccatcgaagccgagaacagcatcctggacatcagcggcttcagcaagcagtacaactgtgccttcatctggcagaaggacggcgtgaagaagctgaacctgtacctgatcatcaactacttcaagggcggcaagctgcggttcaagaagatcaaacctgaagccttcgaagccaacagattctacaccgtgatcaacaaaaagagcggcgagatcgtgcccatggaggtgaacttcaacttcgacgaccccaacctgatcatcctgcctctggcctttggcaagagacagggcagagaattcatctggaacgacctgctgtccctggaaaccggcagcctgaagctggccaacggaagagtgatcgagaagacactgtacaacagaagaacccggcaggatgagcctgccctgttcgtggccctgaccttcgagcggcgggaggtcctggactcctccaatatcaaaccaatgaacctgatcggcgtggcaagaggcgaaaacatccccgccgtgatcgccctgaccgaccccgagggctgcccactgagccggtttaaggatagcctgggaaacccaacccacatcctgagaatcggcgagagctataaggagaagcagcggaccatccaggccaagaaggaggtggagcagcggagagccggcggctacagccggaagtacgccagcaaagccaagaatctggcagacgatatggtgagaaacaccgctagagatctgctgtactacgccgtgacccaggatgccatgctgatcttcgccaacctgagccggggcttcggccggcagggcaagcggaccttcatggccgagagacagtacacacggatggaggactggctgaccgccaagctggcctacgagggcctgagcaagacctacctgtccaagacactggcccagtacacctccaagacatgcagcaactgtgggtttaccatcaccagcgccgactacgacagggtgctggagaagctgaagaagacagcaacaggctggatgaccacaattaacggcaaggagctgaaggtggagggccagattacctactacaacagatacaagagacagaacgtagtcaaggacctgtccgtcgagctggatagactgagcgaagaatctgtgaacaacgacatctcctcctggacaaagggcagaagcggagaagctctgagcctcctgaagaaaagattctcccatagacccgtgcaggagaagttcgtgtgcctgaactgcggcttcgagacacacgcagccgagcaagccgccctgaacatcgccagatcctggctgttcctgcggagccaggagtacaagaaataccagacaaacaagacaaccggcaacaccgataagagagccttcgtcgagacctggcagtccttttaccggaagaagcttaaggaggtgtggaaacctgccgtgcggtctggcggatctggcggaggctccaccagccccaagaaaaagagaaaagtctaagctgccttctgcggggcttgccttctggccatgcccttcttctctcccttgcacctgtacctcttggtctttgaataaagcctgagtaggaaggctagcaaaaaaaaaaaaaaaaaaaaaaaaaaaaaaaaaaaaaaaaaaaaaaaaaaaaaaaaaaaaaaaaaaaaaaaaaaaaaaaa

SEQ ID NO: 12985 - RNA, 5785 nt, synthetic construct
  source 1..5785: mol_type = other RNA
aggaaataagagagaaaagaagagtaagaagaaatataagagccaccatggcccctaagaagaagcgtaaagtgagccggatggaacgcctcgtctacgaggtgcggcagaagtgcagaaacatcgaggacatctgcatctcctgcggatctctgaacgtgaccctggagcacccactgttcatcggcggcatgtgccagaactgtaaaaactgttttctggagtgtgcctatcaatacgacgatgacggctaccagagctactgcaccatctgttgcggcggaagagaggtgctgatgtgtggaaataacaactgctgccggtgcttctgcgtggaatgcgtggacctgctggtgggccccggcgccgcccaggccgctattaaggaagatccttggaactgctacatgtgcggccacaagggcacatacggcctgctgagacggagagaggactggcctagcagactgcagatgttcttcgccaataaccacgaccaggagttcgacccccctaaggtgtaccctcccgtccccgccgagaagagaaagcccatccgggtcctgagcctgttcgatggcatcgccaccggtctgctggtgctgaaggacctgggcatccaggtggataggtacattgcctccgaggtgtgcgaggactccatcaccgtgggaatggtgcgtcatcagggcaagatcatgtacgtgggcgacgtgcggagcgtgacacagaagcatatccaggagtggggccctttcgacctggtgatcggcggcagcccttgcaatgacctgagcatcgtgaacccagcccggaagggcctgtacgagggaaccggcagactgttcttcgagttttacagactgctgcacgacgcccggcctaaggaaggcgacgaccggcccttcttttggctgttcgagaatgtggtggccatgggagtcagcgacaagcgggatattagccggttcctggagagcaaccccgtgatgatcgatgccaaggaagtgagcgccgcccaccgggccagatacttctggggcaatctgcctggcatgaacagacccctggccagcaccgtgaacgacaagctggagctgcaggagtgcctggagcacggccggatcgccaagttcagcaaggtgagaaccatcaccacccgaagcaacagcatcaaacaaggcaaggaccagcactttcctgtgttcatgaacgagaaggaggacatcctgtggtgtaccgagatggagagagtgttcgggttcccagtccactacacagatgtcagcaacatgtctagactggccagacagagactgctgggaagaagctggtccgtccctgtgatcagacacctgttcgcccctctgaaggagtacttcgcctgcgtgagcagcggcaacagcaacgccaacagccggggccccagcttctctagcggcctggtgccactgtccctgagagggagccacatgggccccatggagatctacaaaaccgtgagcgcctggaagcggcagcctgtgcgcgtgctgagcctgtttcggaatatcgataaagtcctgaaaagcctgggattcctggagagcggctctggctccggcggtggcaccctgaagtacgtggaggatgtgacaaacgtggtcagacgggatgtggagaagtggggccccttcgatctggtgtacggcagcacccaacccctgggcagctcttgtgaccggtgccctggctggtacatgtttcagttccaccggatcctgcagtacgccctgccgagacaggagtcccagcggccattcttttggattttcatggacaacttgctgctgaccgaggatgaccaggaaactaccactcggttcctgcagaccgaagccgtgaccctgcaggacgtgagaggccgggactaccagaacgccatgcgggtgtggtccaacatccctggactgaaaagcaagcacgcacctctgacccctaaagaagaggagtacctgcaggcccaggtgcggagcagaagcaagctggacgcccctaaggtggatctgctggtgaagaattgcctcctgcccctgagagagtacttcaagtatttcagccagaatagtctgcccctgggaggcagcggcggcggcatggaggagatgctgagcttcagggacgtggccatcgacttcagcgccgaggagtgggagtgcctggacctggcccagtggaacctgtacagggacgtgatgctggagaactacagcaacctggtgttcctgggcctggccagctgcaagccctacctggtgaccttcctggagcagaggcagggccccagcgacgtgaagaggcaggccgccgcccccgtgcaccccggcggcaccccctacggcggcccaagcagcggcgcccctcctcccagcggcggcagcccagccggctccccaacctctaccgaggagggcacctctgagtccgccacccccgagagcggccctggcacctccaccgagcccagcgagggcagcgcacccggcagccctgccggcagccccacctccacagaggagggaaccagcaccgagcccagcgaaggcagcgccccaggcaccagcaccgagcctagtgagcaggagattaaacggatcaacaagatcagaagaagacttgtgaaagacagcaacaccaagaaggccggcaagacaggccccatgaaaaccctgctggttagagtgatgacacccgatctgagagagcggctggaaaacctgagaaagaagcctgaaaatatcccccagcccatcagcaatacatctagagccaacctgaataagctgctgaccgattacaccgaaatgaagaaggcgatcctgcatgtgtactgggaagagttccagaaggaccctgtgggcctgatgagccgggtggcccagcctgccagcaagaagatcgatcagaacaagctgaaacctgagatggacgagaagggcaacctgaccaccgccggctttgcctgctctcagtgtggccagcccctgttcgtgtacaagctggagcaggtgtctgagaagggcaaggcttacaccaactacttcggacggtgcaatgtggccgagcacgaaaagctgatcctgctggcccagctgaagcccgagaaggatagcgacgaagccgtgacatatagcctgggaaagtttgggcagagggccctggatttctacagcattcatgtgaccaaggagtccacccaccccgtgaagcccctggcccagatcgccggaaacagatacgcctccggacctgtgggaaaggccctgagcgacgcatgtatgggcacaatcgcctccttcctgtctaagtaccaggacatcatcatcgaacaccagaaggtggtgaagggcaaccagaagagactggagagcctgcgggagctggccggcaaggaaaacctggaataccctagcgtgaccctgccacctcagcctcacaccaaggagggcgttgatgcctacaacgaagtgatcgcccgggtgcgaatgtgggtgaacctgaacctgtggcagaagctgaagctaagcagagatgatgccaagcctctgctgagactgaagggattcccttcctttcctctggtcgagagacaggccaacgaagtggactggtgggacatggtgtgtaacgtgaagaagctgatcaacgagaaaaaggaggatggcaaggtgttttggcagaatctggctggctacaagagacaggaagccctgagaccatacctgagcagcgaggaagatcggaagaagggaaagaaattcgctcggtaccagctgggcgacctgctgctgcacctggaaaagaagcacggcgaggactggggaaaggtgtacgacgaggcctgggagcggattgacaagaaagtggaaggcctgagcaagcacatcaagctggaagaggaacggagaagcgaggacgcccagagcaaggccgccctgaccgactggctgcgggctaaggccagcttcgtgatcgagggcctgaaggaggccgacaaggacgagttctgcagatgcgagctgaagctgcagaagtggtacggggacctgcggggaaagcccttcgccatcgaagccgagaacagcatcctggacatcagcggcttcagcaagcagtacaactgtgccttcatctggcagaaggacggcgtgaagaagctgaacctgtacctgatcatcaactacttcaagggcggcaagctgcggttcaagaagatcaaacctgaagccttcgaagccaacagattctacaccgtgatcaacaaaaagagcggcgagatcgtgcccatggaggtgaacttcaacttcgacgaccccaacctgatcatcctgcctctggcctttggcaagagacagggcagagaattcatctggaacgacctgctgtccctggaaaccggcagcctgaagctggccaacggaagagtgatcgagaagacactgtacaacagaagaacccggcaggatgagcctgccctgttcgtggccctgaccttcgagcggcgggaggtcctggactcctccaatatcaaaccaatgaacctgatcggcgtggcaagaggcgaaaacatccccgccgtgatcgccctgaccgaccccgagggctgcccactgagccggtttaaggatagcctgggaaacccaacccacatcctgagaatcggcgagagctataaggagaagcagcggaccatccaggccaagaaggaggtggagcagcggagagccggcggctacagccggaagtacgccagcaaagccaagaatctggcagacgatatggtgagaaacaccgctagagatctgctgtactacgccgtgacccaggatgccatgctgatcttcgccaacctgagccggggcttcggccggcagggcaagcggaccttcatggccgagagacagtacacacggatggaggactggctgaccgccaagctggcctacgagggcctgagcaagacctacctgtccaagacactggcccagtacacctccaagacatgcagcaactgtgggtttaccatcaccagcgccgactacgacagggtgctggagaagctgaagaagacagcaacaggctggatgaccacaattaacggcaaggagctgaaggtggagggccagattacctactacaacagatacaagagacagaacgtagtcaaggacctgtccgtcgagctggatagactgagcgaagaatctgtgaacaacgacatctcctcctggacaaagggcagaagcggagaagctctgagcctcctgaagaaaagattctcccatagacccgtgcaggagaagttcgtgtgcctgaactgcggcttcgagacacacgcagccgagcaagccgccctgaacatcgccagatcctggctgttcctgcggagccaggagtacaagaaataccagacaaacaagacaaccggcaacaccgataagagagccttcgtcgagacctggcagtccttttaccggaagaagcttaaggaggtgtggaaacctgccgtgcggtctggcggatctggcggaggctccaccagccccaagaaaaagagaaaagtctaagctgccttctgcggggcttgccttctggccatgcccttcttctctcccttgcacctgtacctcttggtctttgaataaagcctgagtaggaaggctagcaaaaaaaaaaaaaaaaaaaaaaaaaaaaaaaaaaaaaaaaaaaaaaaaaaaaaaaaaaaaaaaaaaaaaaaaaaaaaaaa

SEQ ID NO: 12986 - RNA, 5785 nt, synthetic construct
  source 1..5785: mol_type = other RNA
aggaaataagagagaaaagaagagtaagaagaaatataagagccaccatggcccctaagaagaagcgtaaagtgagccggatggaacgcctcgtctacgaggtgcggcagaagtgcagaaacatcgaggacatctgcatctcctgcggatctctgaacgtgaccctggagcacccactgttcatcggcggcatgtgccagaactgtaaaaactgttttctggagtgtgcctatcaatacgacgatgacggctaccagagctactgcaccatctgttgcggcggaagagaggtgctgatgtgtggaaataacaactgctgccggtgcttctgcgtggaatgcgtggacctgctggtgggccccggcgccgcccaggccgctattaaggaagatccttggaactgctacatgtgcggccacaagggcacatacggcctgctgagacggagagaggactggcctagcagactgcagatgttcttcgccaataaccacgaccaggagttcgacccccctaaggtgtaccctcccgtccccgccgagaagagaaagcccatccgggtcctgagcctgttcgatggcatcgccaccggtctgctggtgctgaaggacctgggcatccaggtggataggtacattgcctccgaggtgtgcgaggactccatcaccgtgggaatggtgcgtcatcagggcaagatcatgtacgtgggcgacgtgcggagcgtgacacagaagcatatccaggagtggggccctttcgacctggtgatcggcggcagcccttgcaatgacctgagcatcgtgaacccagcccggaagggcctgtacgagggaaccggcagactgttcttcgagttttacagactgctgcacgacgcccggcctaaggaaggcgacgaccggcccttcttttggctgttcgagaatgtggtggccatgggagtcagcgacaagcgggatattagccggttcctggagagcaaccccgtgatgatcgatgccaaggaagtgagcgccgcccaccgggccagatacttctggggcaatctgcctggcatgaacagacccctggccagcaccgtgaacgacaagctggagctgcaggagtgcctggagcacggccggatcgccaagttcagcaaggtgagaaccatcaccacccgaagcaacagcatcaaacaaggcaaggaccagcactttcctgtgttcatgaacgagaaggaggacatcctgtggtgtaccgagatggagagagtgttcgggttcccagtccactacacagatgtcagcaacatgtctagactggccagacagagactgctgggaagaagctggtccgtccctgtgatcagacacctgttcgcccctctgaaggagtacttcgcctgcgtgagcagcggcaacagcaacgccaacagccggggccccagcttctctagcggcctggtgccactgtccctgagagggagccacatgggccccatggagatctacaaaaccgtgagcgcctggaagcggcagcctgtgcgcgtgctgagcctgtttcggaatatcgataaagtcctgaaaagcctgggattcctggagagcggctctggctccggcggtggcaccctgaagtacgtggaggatgtgacaaacgtggtcagacgggatgtggagaagtggggccccttcgatctggtgtacggcagcacccaacccctgggcagctcttgtgaccggtgccctggctggtacatgtttcagttccaccggatcctgcagtacgccctgccgagacaggagtcccagcggccattcttttggattttcatggacaacttgctgctgaccgaggatgaccaggaaactaccactcggttcctgcagaccgaagccgtgaccctgcaggacgtgagaggccgggactaccagaacgccatgcgggtgtggtccaacatccctggactgaaaagcaagcacgcacctctgacccctaaagaagaggagtacctgcaggcccaggtgcggagcagaagcaagctggacgcccctaaggtggatctgctggtgaagaattgcctcctgcccctgagagagtacttcaagtatttcagccagaatagtctgcccctgggaggcagcggcggcggcgcccagggctacgtgaccttcgaggacgtggccgtgtacttcagccaggaggagtggaggctgctggacgaggcccagaagctgctgtacaggaacgtgatgctggagaacttcagcctgctggccagcctgggcctggccagcagcaagacccacgagatcacccagctggagagctgggaggagcccttcatgcccgcctgggaggtggtgaccagcgccacccccaggggcacctggtggggcggcccaagcagcggcgcccctcctcccagcggcggcagcccagccggctccccaacctctaccgaggagggcacctctgagtccgccacccccgagagcggccctggcacctccaccgagcccagcgagggcagcgcacccggcagccctgccggcagccccacctccacagaggagggaaccagcaccgagcccagcgaaggcagcgccccaggcaccagcaccgagcctagtgagcaggagattaaacggatcaacaagatcagaagaagacttgtgaaagacagcaacaccaagaaggccggcaagacaggccccatgaaaaccctgctggttagagtgatgacacccgatctgagagagcggctggaaaacctgagaaagaagcctgaaaatatcccccagcccatcagcaatacatctagagccaacctgaataagctgctgaccgattacaccgaaatgaagaaggcgatcctgcatgtgtactgggaagagttccagaaggaccctgtgggcctgatgagccgggtggcccagcctgccagcaagaagatcgatcagaacaagctgaaacctgagatggacgagaagggcaacctgaccaccgccggctttgcctgctctcagtgtggccagcccctgttcgtgtacaagctggagcaggtgtctgagaagggcaaggcttacaccaactacttcggacggtgcaatgtggccgagcacgaaaagctgatcctgctggcccagctgaagcccgagaaggatagcgacgaagccgtgacatatagcctgggaaagtttgggcagagggccctggatttctacagcattcatgtgaccaaggagtccacccaccccgtgaagcccctggcccagatcgccggaaacagatacgcctccggacctgtgggaaaggccctgagcgacgcatgtatgggcacaatcgcctccttcctgtctaagtaccaggacatcatcatcgaacaccagaaggtggtgaagggcaaccagaagagactggagagcctgcgggagctggccggcaaggaaaacctggaataccctagcgtgaccctgccacctcagcctcacaccaaggagggcgttgatgcctacaacgaagtgatcgcccgggtgcgaatgtgggtgaacctgaacctgtggcagaagctgaagctaagcagagatgatgccaagcctctgctgagactgaagggattcccttcctttcctctggtcgagagacaggccaacgaagtggactggtgggacatggtgtgtaacgtgaagaagctgatcaacgagaaaaaggaggatggcaaggtgttttggcagaatctggctggctacaagagacaggaagccctgagaccatacctgagcagcgaggaagatcggaagaagggaaagaaattcgctcggtaccagctgggcgacctgctgctgcacctggaaaagaagcacggcgaggactggggaaaggtgtacgacgaggcctgggagcggattgacaagaaagtggaaggcctgagcaagcacatcaagctggaagaggaacggagaagcgaggacgcccagagcaaggccgccctgaccgactggctgcgggctaaggccagcttcgtgatcgagggcctgaaggaggccgacaaggacgagttctgcagatgcgagctgaagctgcagaagtggtacggggacctgcggggaaagcccttcgccatcgaagccgagaacagcatcctggacatcagcggcttcagcaagcagtacaactgtgccttcatctggcagaaggacggcgtgaagaagctgaacctgtacctgatcatcaactacttcaagggcggcaagctgcggttcaagaagatcaaacctgaagccttcgaagccaacagattctacaccgtgatcaacaaaaagagcggcgagatcgtgcccatggaggtgaacttcaacttcgacgaccccaacctgatcatcctgcctctggcctttggcaagagacagggcagagaattcatctggaacgacctgctgtccctggaaaccggcagcctgaagctggccaacggaagagtgatcgagaagacactgtacaacagaagaacccggcaggatgagcctgccctgttcgtggccctgaccttcgagcggcgggaggtcctggactcctccaatatcaaaccaatgaacctgatcggcgtggcaagaggcgaaaacatccccgccgtgatcgccctgaccgaccccgagggctgcccactgagccggtttaaggatagcctgggaaacccaacccacatcctgagaatcggcgagagctataaggagaagcagcggaccatccaggccaagaaggaggtggagcagcggagagccggcggctacagccggaagtacgccagcaaagccaagaatctggcagacgatatggtgagaaacaccgctagagatctgctgtactacgccgtgacccaggatgccatgctgatcttcgccaacctgagccggggcttcggccggcagggcaagcggaccttcatggccgagagacagtacacacggatggaggactggctgaccgccaagctggcctacgagggcctgagcaagacctacctgtccaagacactggcccagtacacctccaagacatgcagcaactgtgggtttaccatcaccagcgccgactacgacagggtgctggagaagctgaagaagacagcaacaggctggatgaccacaattaacggcaaggagctgaaggtggagggccagattacctactacaacagatacaagagacagaacgtagtcaaggacctgtccgtcgagctggatagactgagcgaagaatctgtgaacaacgacatctcctcctggacaaagggcagaagcggagaagctctgagcctcctgaagaaaagattctcccatagacccgtgcaggagaagttcgtgtgcctgaactgcggcttcgagacacacgcagccgagcaagccgccctgaacatcgccagatcctggctgttcctgcggagccaggagtacaagaaataccagacaaacaagacaaccggcaacaccgataagagagccttcgtcgagacctggcagtccttttaccggaagaagcttaaggaggtgtggaaacctgccgtgcggtctggcggatctggcggaggctccaccagccccaagaaaaagagaaaagtctaagctgccttctgcggggcttgccttctggccatgcccttcttctctcccttgcacctgtacctcttggtctttgaataaagcctgagtaggaaggctagcaaaaaaaaaaaaaaaaaaaaaaaaaaaaaaaaaaaaaaaaaaaaaaaaaaaaaaaaaaaaaaaaaaaaaaaaaaaaaaaa

SEQ ID NO: 12987 - RNA, 5785 nt, synthetic construct
  source 1..5785: mol_type = other RNA
aggaaataagagagaaaagaagagtaagaagaaatataagagccaccatggcccctaagaagaagcgtaaagtgagccggatggaacgcctcgtctacgaggtgcggcagaagtgcagaaacatcgaggacatctgcatctcctgcggatctctgaacgtgaccctggagcacccactgttcatcggcggcatgtgccagaactgtaaaaactgttttctggagtgtgcctatcaatacgacgatgacggctaccagagctactgcaccatctgttgcggcggaagagaggtgctgatgtgtggaaataacaactgctgccggtgcttctgcgtggaatgcgtggacctgctggtgggccccggcgccgcccaggccgctattaaggaagatccttggaactgctacatgtgcggccacaagggcacatacggcctgctgagacggagagaggactggcctagcagactgcagatgttcttcgccaataaccacgaccaggagttcgacccccctaaggtgtaccctcccgtccccgccgagaagagaaagcccatccgggtcctgagcctgttcgatggcatcgccaccggtctgctggtgctgaaggacctgggcatccaggtggataggtacattgcctccgaggtgtgcgaggactccatcaccgtgggaatggtgcgtcatcagggcaagatcatgtacgtgggcgacgtgcggagcgtgacacagaagcatatccaggagtggggccctttcgacctggtgatcggcggcagcccttgcaatgacctgagcatcgtgaacccagcccggaagggcctgtacgagggaaccggcagactgttcttcgagttttacagactgctgcacgacgcccggcctaaggaaggcgacgaccggcccttcttttggctgttcgagaatgtggtggccatgggagtcagcgacaagcgggatattagccggttcctggagagcaaccccgtgatgatcgatgccaaggaagtgagcgccgcccaccgggccagatacttctggggcaatctgcctggcatgaacagacccctggccagcaccgtgaacgacaagctggagctgcaggagtgcctggagcacggccggatcgccaagttcagcaaggtgagaaccatcaccacccgaagcaacagcatcaaacaaggcaaggaccagcactttcctgtgttcatgaacgagaaggaggacatcctgtggtgtaccgagatggagagagtgttcgggttcccagtccactacacagatgtcagcaacatgtctagactggccagacagagactgctgggaagaagctggtccgtccctgtgatcagacacctgttcgcccctctgaaggagtacttcgcctgcgtgagcagcggcaacagcaacgccaacagccggggccccagcttctctagcggcctggtgccactgtccctgagagggagccacatgggccccatggagatctacaaaaccgtgagcgcctggaagcggcagcctgtgcgcgtgctgagcctgtttcggaatatcgataaagtcctgaaaagcctgggattcctggagagcggctctggctccggcggtggcaccctgaagtacgtggaggatgtgacaaacgtggtcagacgggatgtggagaagtggggccccttcgatctggtgtacggcagcacccaacccctgggcagctcttgtgaccggtgccctggctggtacatgtttcagttccaccggatcctgcagtacgccctgccgagacaggagtcccagcggccattcttttggattttcatggacaacttgctgctgaccgaggatgaccaggaaactaccactcggttcctgcagaccgaagccgtgaccctgcaggacgtgagaggccgggactaccagaacgccatgcgggtgtggtccaacatccctggactgaaaagcaagcacgcacctctgacccctaaagaagaggagtacctgcaggcccaggtgcggagcagaagcaagctggacgcccctaaggtggatctgctggtgaagaattgcctcctgcccctgagagagtacttcaagtatttcagccagaatagtctgcccctgggaggcagcggcggcggcgagcccgtgagcttcgccgaggtggccgtgtacttcagcagggaggagtgggccctgctggaccccgcccagagggccctgtacagggacgtgatgctggagacctaccagtgcgtggccagcctggtgaccgagacccccgtgcccgcccccaagcccgtgctgatcagcctgctggagggcaggaaggagccctggatccccgacatgaggagccccgaggccatgcccggcgacctgagcggcggcccaagcagcggcgcccctcctcccagcggcggcagcccagccggctccccaacctctaccgaggagggcacctctgagtccgccacccccgagagcggccctggcacctccaccgagcccagcgagggcagcgcacccggcagccctgccggcagccccacctccacagaggagggaaccagcaccgagcccagcgaaggcagcgccccaggcaccagcaccgagcctagtgagcaggagattaaacggatcaacaagatcagaagaagacttgtgaaagacagcaacaccaagaaggccggcaagacaggccccatgaaaaccctgctggttagagtgatgacacccgatctgagagagcggctggaaaacctgagaaagaagcctgaaaatatcccccagcccatcagcaatacatctagagccaacctgaataagctgctgaccgattacaccgaaatgaagaaggcgatcctgcatgtgtactgggaagagttccagaaggaccctgtgggcctgatgagccgggtggcccagcctgccagcaagaagatcgatcagaacaagctgaaacctgagatggacgagaagggcaacctgaccaccgccggctttgcctgctctcagtgtggccagcccctgttcgtgtacaagctggagcaggtgtctgagaagggcaaggcttacaccaactacttcggacggtgcaatgtggccgagcacgaaaagctgatcctgctggcccagctgaagcccgagaaggatagcgacgaagccgtgacatatagcctgggaaagtttgggcagagggccctggatttctacagcattcatgtgaccaaggagtccacccaccccgtgaagcccctggcccagatcgccggaaacagatacgcctccggacctgtgggaaaggccctgagcgacgcatgtatgggcacaatcgcctccttcctgtctaagtaccaggacatcatcatcgaacaccagaaggtggtgaagggcaaccagaagagactggagagcctgcgggagctggccggcaaggaaaacctggaataccctagcgtgaccctgccacctcagcctcacaccaaggagggcgttgatgcctacaacgaagtgatcgcccgggtgcgaatgtgggtgaacctgaacctgtggcagaagctgaagctaagcagagatgatgccaagcctctgctgagactgaagggattcccttcctttcctctggtcgagagacaggccaacgaagtggactggtgggacatggtgtgtaacgtgaagaagctgatcaacgagaaaaaggaggatggcaaggtgttttggcagaatctggctggctacaagagacaggaagccctgagaccatacctgagcagcgaggaagatcggaagaagggaaagaaattcgctcggtaccagctgggcgacctgctgctgcacctggaaaagaagcacggcgaggactggggaaaggtgtacgacgaggcctgggagcggattgacaagaaagtggaaggcctgagcaagcacatcaagctggaagaggaacggagaagcgaggacgcccagagcaaggccgccctgaccgactggctgcgggctaaggccagcttcgtgatcgagggcctgaaggaggccgacaaggacgagttctgcagatgcgagctgaagctgcagaagtggtacggggacctgcggggaaagcccttcgccatcgaagccgagaacagcatcctggacatcagcggcttcagcaagcagtacaactgtgccttcatctggcagaaggacggcgtgaagaagctgaacctgtacctgatcatcaactacttcaagggcggcaagctgcggttcaagaagatcaaacctgaagccttcgaagccaacagattctacaccgtgatcaacaaaaagagcggcgagatcgtgcccatggaggtgaacttcaacttcgacgaccccaacctgatcatcctgcctctggcctttggcaagagacagggcagagaattcatctggaacgacctgctgtccctggaaaccggcagcctgaagctggccaacggaagagtgatcgagaagacactgtacaacagaagaacccggcaggatgagcctgccctgttcgtggccctgaccttcgagcggcgggaggtcctggactcctccaatatcaaaccaatgaacctgatcggcgtggcaagaggcgaaaacatccccgccgtgatcgccctgaccgaccccgagggctgcccactgagccggtttaaggatagcctgggaaacccaacccacatcctgagaatcggcgagagctataaggagaagcagcggaccatccaggccaagaaggaggtggagcagcggagagccggcggctacagccggaagtacgccagcaaagccaagaatctggcagacgatatggtgagaaacaccgctagagatctgctgtactacgccgtgacccaggatgccatgctgatcttcgccaacctgagccggggcttcggccggcagggcaagcggaccttcatggccgagagacagtacacacggatggaggactggctgaccgccaagctggcctacgagggcctgagcaagacctacctgtccaagacactggcccagtacacctccaagacatgcagcaactgtgggtttaccatcaccagcgccgactacgacagggtgctggagaagctgaagaagacagcaacaggctggatgaccacaattaacggcaaggagctgaaggtggagggccagattacctactacaacagatacaagagacagaacgtagtcaaggacctgtccgtcgagctggatagactgagcgaagaatctgtgaacaacgacatctcctcctggacaaagggcagaagcggagaagctctgagcctcctgaagaaaagattctcccatagacccgtgcaggagaagttcgtgtgcctgaactgcggcttcgagacacacgcagccgagcaagccgccctgaacatcgccagatcctggctgttcctgcggagccaggagtacaagaaataccagacaaacaagacaaccggcaacaccgataagagagccttcgtcgagacctggcagtccttttaccggaagaagcttaaggaggtgtggaaacctgccgtgcggtctggcggatctggcggaggctccaccagccccaagaaaaagagaaaagtctaagctgccttctgcggggcttgccttctggccatgcccttcttctctcccttgcacctgtacctcttggtctttgaataaagcctgagtaggaaggctagcaaaaaaaaaaaaaaaaaaaaaaaaaaaaaaaaaaaaaaaaaaaaaaaaaaaaaaaaaaaaaaaaaaaaaaaaaaaaaaaa

SEQ ID NO: 12988 - RNA, 5785 nt, synthetic construct
  source 1..5785: mol_type = other RNA
aggaaataagagagaaaagaagagtaagaagaaatataagagccaccatggcccctaagaagaagcgtaaagtgagccggatggaacgcctcgtctacgaggtgcggcagaagtgcagaaacatcgaggacatctgcatctcctgcggatctctgaacgtgaccctggagcacccactgttcatcggcggcatgtgccagaactgtaaaaactgttttctggagtgtgcctatcaatacgacgatgacggctaccagagctactgcaccatctgttgcggcggaagagaggtgctgatgtgtggaaataacaactgctgccggtgcttctgcgtggaatgcgtggacctgctggtgggccccggcgccgcccaggccgctattaaggaagatccttggaactgctacatgtgcggccacaagggcacatacggcctgctgagacggagagaggactggcctagcagactgcagatgttcttcgccaataaccacgaccaggagttcgacccccctaaggtgtaccctcccgtccccgccgagaagagaaagcccatccgggtcctgagcctgttcgatggcatcgccaccggtctgctggtgctgaaggacctgggcatccaggtggataggtacattgcctccgaggtgtgcgaggactccatcaccgtgggaatggtgcgtcatcagggcaagatcatgtacgtgggcgacgtgcggagcgtgacacagaagcatatccaggagtggggccctttcgacctggtgatcggcggcagcccttgcaatgacctgagcatcgtgaacccagcccggaagggcctgtacgagggaaccggcagactgttcttcgagttttacagactgctgcacgacgcccggcctaaggaaggcgacgaccggcccttcttttggctgttcgagaatgtggtggccatgggagtcagcgacaagcgggatattagccggttcctggagagcaaccccgtgatgatcgatgccaaggaagtgagcgccgcccaccgggccagatacttctggggcaatctgcctggcatgaacagacccctggccagcaccgtgaacgacaagctggagctgcaggagtgcctggagcacggccggatcgccaagttcagcaaggtgagaaccatcaccacccgaagcaacagcatcaaacaaggcaaggaccagcactttcctgtgttcatgaacgagaaggaggacatcctgtggtgtaccgagatggagagagtgttcgggttcccagtccactacacagatgtcagcaacatgtctagactggccagacagagactgctgggaagaagctggtccgtccctgtgatcagacacctgttcgcccctctgaaggagtacttcgcctgcgtgagcagcggcaacagcaacgccaacagccggggccccagcttctctagcggcctggtgccactgtccctgagagggagccacatgggccccatggagatctacaaaaccgtgagcgcctggaagcggcagcctgtgcgcgtgctgagcctgtttcggaatatcgataaagtcctgaaaagcctgggattcctggagagcggctctggctccggcggtggcaccctgaagtacgtggaggatgtgacaaacgtggtcagacgggatgtggagaagtggggccccttcgatctggtgtacggcagcacccaacccctgggcagctcttgtgaccggtgccctggctggtacatgtttcagttccaccggatcctgcagtacgccctgccgagacaggagtcccagcggccattcttttggattttcatggacaacttgctgctgaccgaggatgaccaggaaactaccactcggttcctgcagaccgaagccgtgaccctgcaggacgtgagaggccgggactaccagaacgccatgcgggtgtggtccaacatccctggactgaaaagcaagcacgcacctctgacccctaaagaagaggagtacctgcaggcccaggtgcggagcagaagcaagctggacgcccctaaggtggatctgctggtgaagaattgcctcctgcccctgagagagtacttcaagtatttcagccagaatagtctgcccctgggaggcagcggcggcggcgtggccaggatgcagaccagggtgaccttcgacgacatcgccgtgagcttcagccaggaggagtgggagtacctggacgagggccagaaggagctgtacagggaggtgatggaggagaacctggagctgctgaccagcctgggcagcctggtggcccagcccgagcagatggaggagctgtacatgatggaccaccacgacatgggcctgaggggcaccctgctgagcctgtgcaccgaggacggcggcccaagcagcggcgcccctcctcccagcggcggcagcccagccggctccccaacctctaccgaggagggcacctctgagtccgccacccccgagagcggccctggcacctccaccgagcccagcgagggcagcgcacccggcagccctgccggcagccccacctccacagaggagggaaccagcaccgagcccagcgaaggcagcgccccaggcaccagcaccgagcctagtgagcaggagattaaacggatcaacaagatcagaagaagacttgtgaaagacagcaacaccaagaaggccggcaagacaggccccatgaaaaccctgctggttagagtgatgacacccgatctgagagagcggctggaaaacctgagaaagaagcctgaaaatatcccccagcccatcagcaatacatctagagccaacctgaataagctgctgaccgattacaccgaaatgaagaaggcgatcctgcatgtgtactgggaagagttccagaaggaccctgtgggcctgatgagccgggtggcccagcctgccagcaagaagatcgatcagaacaagctgaaacctgagatggacgagaagggcaacctgaccaccgccggctttgcctgctctcagtgtggccagcccctgttcgtgtacaagctggagcaggtgtctgagaagggcaaggcttacaccaactacttcggacggtgcaatgtggccgagcacgaaaagctgatcctgctggcccagctgaagcccgagaaggatagcgacgaagccgtgacatatagcctgggaaagtttgggcagagggccctggatttctacagcattcatgtgaccaaggagtccacccaccccgtgaagcccctggcccagatcgccggaaacagatacgcctccggacctgtgggaaaggccctgagcgacgcatgtatgggcacaatcgcctccttcctgtctaagtaccaggacatcatcatcgaacaccagaaggtggtgaagggcaaccagaagagactggagagcctgcgggagctggccggcaaggaaaacctggaataccctagcgtgaccctgccacctcagcctcacaccaaggagggcgttgatgcctacaacgaagtgatcgcccgggtgcgaatgtgggtgaacctgaacctgtggcagaagctgaagctaagcagagatgatgccaagcctctgctgagactgaagggattcccttcctttcctctggtcgagagacaggccaacgaagtggactggtgggacatggtgtgtaacgtgaagaagctgatcaacgagaaaaaggaggatggcaaggtgttttggcagaatctggctggctacaagagacaggaagccctgagaccatacctgagcagcgaggaagatcggaagaagggaaagaaattcgctcggtaccagctgggcgacctgctgctgcacctggaaaagaagcacggcgaggactggggaaaggtgtacgacgaggcctgggagcggattgacaagaaagtggaaggcctgagcaagcacatcaagctggaagaggaacggagaagcgaggacgcccagagcaaggccgccctgaccgactggctgcgggctaaggccagcttcgtgatcgagggcctgaaggaggccgacaaggacgagttctgcagatgcgagctgaagctgcagaagtggtacggggacctgcggggaaagcccttcgccatcgaagccgagaacagcatcctggacatcagcggcttcagcaagcagtacaactgtgccttcatctggcagaaggacggcgtgaagaagctgaacctgtacctgatcatcaactacttcaagggcggcaagctgcggttcaagaagatcaaacctgaagccttcgaagccaacagattctacaccgtgatcaacaaaaagagcggcgagatcgtgcccatggaggtgaacttcaacttcgacgaccccaacctgatcatcctgcctctggcctttggcaagagacagggcagagaattcatctggaacgacctgctgtccctggaaaccggcagcctgaagctggccaacggaagagtgatcgagaagacactgtacaacagaagaacccggcaggatgagcctgccctgttcgtggccctgaccttcgagcggcgggaggtcctggactcctccaatatcaaaccaatgaacctgatcggcgtggcaagaggcgaaaacatccccgccgtgatcgccctgaccgaccccgagggctgcccactgagccggtttaaggatagcctgggaaacccaacccacatcctgagaatcggcgagagctataaggagaagcagcggaccatccaggccaagaaggaggtggagcagcggagagccggcggctacagccggaagtacgccagcaaagccaagaatctggcagacgatatggtgagaaacaccgctagagatctgctgtactacgccgtgacccaggatgccatgctgatcttcgccaacctgagccggggcttcggccggcagggcaagcggaccttcatggccgagagacagtacacacggatggaggactggctgaccgccaagctggcctacgagggcctgagcaagacctacctgtccaagacactggcccagtacacctccaagacatgcagcaactgtgggtttaccatcaccagcgccgactacgacagggtgctggagaagctgaagaagacagcaacaggctggatgaccacaattaacggcaaggagctgaaggtggagggccagattacctactacaacagatacaagagacagaacgtagtcaaggacctgtccgtcgagctggatagactgagcgaagaatctgtgaacaacgacatctcctcctggacaaagggcagaagcggagaagctctgagcctcctgaagaaaagattctcccatagacccgtgcaggagaagttcgtgtgcctgaactgcggcttcgagacacacgcagccgagcaagccgccctgaacatcgccagatcctggctgttcctgcggagccaggagtacaagaaataccagacaaacaagacaaccggcaacaccgataagagagccttcgtcgagacctggcagtccttttaccggaagaagcttaaggaggtgtggaaacctgccgtgcggtctggcggatctggcggaggctccaccagccccaagaaaaagagaaaagtctaagctgccttctgcggggcttgccttctggccatgcccttcttctctcccttgcacctgtacctcttggtctttgaataaagcctgagtaggaaggctagcaaaaaaaaaaaaaaaaaaaaaaaaaaaaaaaaaaaaaaaaaaaaaaaaaaaaaaaaaaaaaaaaaaaaaaaaaaaaaaaa

SEQ ID NO: 12989 - RNA, 5785 nt, synthetic construct
  source 1..5785: mol_type = other RNA
aggaaataagagagaaaagaagagtaagaagaaatataagagccaccatggcccctaagaagaagcgtaaagtgagccggatggaacgcctcgtctacgaggtgcggcagaagtgcagaaacatcgaggacatctgcatctcctgcggatctctgaacgtgaccctggagcacccactgttcatcggcggcatgtgccagaactgtaaaaactgttttctggagtgtgcctatcaatacgacgatgacggctaccagagctactgcaccatctgttgcggcggaagagaggtgctgatgtgtggaaataacaactgctgccggtgcttctgcgtggaatgcgtggacctgctggtgggccccggcgccgcccaggccgctattaaggaagatccttggaactgctacatgtgcggccacaagggcacatacggcctgctgagacggagagaggactggcctagcagactgcagatgttcttcgccaataaccacgaccaggagttcgacccccctaaggtgtaccctcccgtccccgccgagaagagaaagcccatccgggtcctgagcctgttcgatggcatcgccaccggtctgctggtgctgaaggacctgggcatccaggtggataggtacattgcctccgaggtgtgcgaggactccatcaccgtgggaatggtgcgtcatcagggcaagatcatgtacgtgggcgacgtgcggagcgtgacacagaagcatatccaggagtggggccctttcgacctggtgatcggcggcagcccttgcaatgacctgagcatcgtgaacccagcccggaagggcctgtacgagggaaccggcagactgttcttcgagttttacagactgctgcacgacgcccggcctaaggaaggcgacgaccggcccttcttttggctgttcgagaatgtggtggccatgggagtcagcgacaagcgggatattagccggttcctggagagcaaccccgtgatgatcgatgccaaggaagtgagcgccgcccaccgggccagatacttctggggcaatctgcctggcatgaacagacccctggccagcaccgtgaacgacaagctggagctgcaggagtgcctggagcacggccggatcgccaagttcagcaaggtgagaaccatcaccacccgaagcaacagcatcaaacaaggcaaggaccagcactttcctgtgttcatgaacgagaaggaggacatcctgtggtgtaccgagatggagagagtgttcgggttcccagtccactacacagatgtcagcaacatgtctagactggccagacagagactgctgggaagaagctggtccgtccctgtgatcagacacctgttcgcccctctgaaggagtacttcgcctgcgtgagcagcggcaacagcaacgccaacagccggggccccagcttctctagcggcctggtgccactgtccctgagagggagccacatgggccccatggagatctacaaaaccgtgagcgcctggaagcggcagcctgtgcgcgtgctgagcctgtttcggaatatcgataaagtcctgaaaagcctgggattcctggagagcggctctggctccggcggtggcaccctgaagtacgtggaggatgtgacaaacgtggtcagacgggatgtggagaagtggggccccttcgatctggtgtacggcagcacccaacccctgggcagctcttgtgaccggtgccctggctggtacatgtttcagttccaccggatcctgcagtacgccctgccgagacaggagtcccagcggccattcttttggattttcatggacaacttgctgctgaccgaggatgaccaggaaactaccactcggttcctgcagaccgaagccgtgaccctgcaggacgtgagaggccgggactaccagaacgccatgcgggtgtggtccaacatccctggactgaaaagcaagcacgcacctctgacccctaaagaagaggagtacctgcaggcccaggtgcggagcagaagcaagctggacgcccctaaggtggatctgctggtgaagaattgcctcctgcccctgagagagtacttcaagtatttcagccagaatagtctgcccctgggaggcagcggcggcggcttccaggaggccgtgaccttcaaggacgtggccgtggccttcaccgaggaggagctgggcctgctggacagcgcccagaggaagctgtacagggacgtgatgctggagaacttcaggaacctggtgagcgtgggcaggcagagcttcaagcccgacatgatcagccagctggagagggaggagaagctgtggatgaaggagttccagacccagaggggcaggcacagcggcgacaggaaccagggcggcccaagcagcggcgcccctcctcccagcggcggcagcccagccggctccccaacctctaccgaggagggcacctctgagtccgccacccccgagagcggccctggcacctccaccgagcccagcgagggcagcgcacccggcagccctgccggcagccccacctccacagaggagggaaccagcaccgagcccagcgaaggcagcgccccaggcaccagcaccgagcctagtgagcaggagattaaacggatcaacaagatcagaagaagacttgtgaaagacagcaacaccaagaaggccggcaagacaggccccatgaaaaccctgctggttagagtgatgacacccgatctgagagagcggctggaaaacctgagaaagaagcctgaaaatatcccccagcccatcagcaatacatctagagccaacctgaataagctgctgaccgattacaccgaaatgaagaaggcgatcctgcatgtgtactgggaagagttccagaaggaccctgtgggcctgatgagccgggtggcccagcctgccagcaagaagatcgatcagaacaagctgaaacctgagatggacgagaagggcaacctgaccaccgccggctttgcctgctctcagtgtggccagcccctgttcgtgtacaagctggagcaggtgtctgagaagggcaaggcttacaccaactacttcggacggtgcaatgtggccgagcacgaaaagctgatcctgctggcccagctgaagcccgagaaggatagcgacgaagccgtgacatatagcctgggaaagtttgggcagagggccctggatttctacagcattcatgtgaccaaggagtccacccaccccgtgaagcccctggcccagatcgccggaaacagatacgcctccggacctgtgggaaaggccctgagcgacgcatgtatgggcacaatcgcctccttcctgtctaagtaccaggacatcatcatcgaacaccagaaggtggtgaagggcaaccagaagagactggagagcctgcgggagctggccggcaaggaaaacctggaataccctagcgtgaccctgccacctcagcctcacaccaaggagggcgttgatgcctacaacgaagtgatcgcccgggtgcgaatgtgggtgaacctgaacctgtggcagaagctgaagctaagcagagatgatgccaagcctctgctgagactgaagggattcccttcctttcctctggtcgagagacaggccaacgaagtggactggtgggacatggtgtgtaacgtgaagaagctgatcaacgagaaaaaggaggatggcaaggtgttttggcagaatctggctggctacaagagacaggaagccctgagaccatacctgagcagcgaggaagatcggaagaagggaaagaaattcgctcggtaccagctgggcgacctgctgctgcacctggaaaagaagcacggcgaggactggggaaaggtgtacgacgaggcctgggagcggattgacaagaaagtggaaggcctgagcaagcacatcaagctggaagaggaacggagaagcgaggacgcccagagcaaggccgccctgaccgactggctgcgggctaaggccagcttcgtgatcgagggcctgaaggaggccgacaaggacgagttctgcagatgcgagctgaagctgcagaagtggtacggggacctgcggggaaagcccttcgccatcgaagccgagaacagcatcctggacatcagcggcttcagcaagcagtacaactgtgccttcatctggcagaaggacggcgtgaagaagctgaacctgtacctgatcatcaactacttcaagggcggcaagctgcggttcaagaagatcaaacctgaagccttcgaagccaacagattctacaccgtgatcaacaaaaagagcggcgagatcgtgcccatggaggtgaacttcaacttcgacgaccccaacctgatcatcctgcctctggcctttggcaagagacagggcagagaattcatctggaacgacctgctgtccctggaaaccggcagcctgaagctggccaacggaagagtgatcgagaagacactgtacaacagaagaacccggcaggatgagcctgccctgttcgtggccctgaccttcgagcggcgggaggtcctggactcctccaatatcaaaccaatgaacctgatcggcgtggcaagaggcgaaaacatccccgccgtgatcgccctgaccgaccccgagggctgcccactgagccggtttaaggatagcctgggaaacccaacccacatcctgagaatcggcgagagctataaggagaagcagcggaccatccaggccaagaaggaggtggagcagcggagagccggcggctacagccggaagtacgccagcaaagccaagaatctggcagacgatatggtgagaaacaccgctagagatctgctgtactacgccgtgacccaggatgccatgctgatcttcgccaacctgagccggggcttcggccggcagggcaagcggaccttcatggccgagagacagtacacacggatggaggactggctgaccgccaagctggcctacgagggcctgagcaagacctacctgtccaagacactggcccagtacacctccaagacatgcagcaactgtgggtttaccatcaccagcgccgactacgacagggtgctggagaagctgaagaagacagcaacaggctggatgaccacaattaacggcaaggagctgaaggtggagggccagattacctactacaacagatacaagagacagaacgtagtcaaggacctgtccgtcgagctggatagactgagcgaagaatctgtgaacaacgacatctcctcctggacaaagggcagaagcggagaagctctgagcctcctgaagaaaagattctcccatagacccgtgcaggagaagttcgtgtgcctgaactgcggcttcgagacacacgcagccgagcaagccgccctgaacatcgccagatcctggctgttcctgcggagccaggagtacaagaaataccagacaaacaagacaaccggcaacaccgataagagagccttcgtcgagacctggcagtccttttaccggaagaagcttaaggaggtgtggaaacctgccgtgcggtctggcggatctggcggaggctccaccagccccaagaaaaagagaaaagtctaagctgccttctgcggggcttgccttctggccatgcccttcttctctcccttgcacctgtacctcttggtctttgaataaagcctgagtaggaaggctagcaaaaaaaaaaaaaaaaaaaaaaaaaaaaaaaaaaaaaaaaaaaaaaaaaaaaaaaaaaaaaaaaaaaaaaaaaaaaaaaa

SEQ ID NO: 12990 - RNA, 5785 nt, synthetic construct
  source 1..5785: mol_type = other RNA
aggaaataagagagaaaagaagagtaagaagaaatataagagccaccatggcccctaagaagaagcgtaaagtgagccggatggaacgcctcgtctacgaggtgcggcagaagtgcagaaacatcgaggacatctgcatctcctgcggatctctgaacgtgaccctggagcacccactgttcatcggcggcatgtgccagaactgtaaaaactgttttctggagtgtgcctatcaatacgacgatgacggctaccagagctactgcaccatctgttgcggcggaagagaggtgctgatgtgtggaaataacaactgctgccggtgcttctgcgtggaatgcgtggacctgctggtgggccccggcgccgcccaggccgctattaaggaagatccttggaactgctacatgtgcggccacaagggcacatacggcctgctgagacggagagaggactggcctagcagactgcagatgttcttcgccaataaccacgaccaggagttcgacccccctaaggtgtaccctcccgtccccgccgagaagagaaagcccatccgggtcctgagcctgttcgatggcatcgccaccggtctgctggtgctgaaggacctgggcatccaggtggataggtacattgcctccgaggtgtgcgaggactccatcaccgtgggaatggtgcgtcatcagggcaagatcatgtacgtgggcgacgtgcggagcgtgacacagaagcatatccaggagtggggccctttcgacctggtgatcggcggcagcccttgcaatgacctgagcatcgtgaacccagcccggaagggcctgtacgagggaaccggcagactgttcttcgagttttacagactgctgcacgacgcccggcctaaggaaggcgacgaccggcccttcttttggctgttcgagaatgtggtggccatgggagtcagcgacaagcgggatattagccggttcctggagagcaaccccgtgatgatcgatgccaaggaagtgagcgccgcccaccgggccagatacttctggggcaatctgcctggcatgaacagacccctggccagcaccgtgaacgacaagctggagctgcaggagtgcctggagcacggccggatcgccaagttcagcaaggtgagaaccatcaccacccgaagcaacagcatcaaacaaggcaaggaccagcactttcctgtgttcatgaacgagaaggaggacatcctgtggtgtaccgagatggagagagtgttcgggttcccagtccactacacagatgtcagcaacatgtctagactggccagacagagactgctgggaagaagctggtccgtccctgtgatcagacacctgttcgcccctctgaaggagtacttcgcctgcgtgagcagcggcaacagcaacgccaacagccggggccccagcttctctagcggcctggtgccactgtccctgagagggagccacatgggccccatggagatctacaaaaccgtgagcgcctggaagcggcagcctgtgcgcgtgctgagcctgtttcggaatatcgataaagtcctgaaaagcctgggattcctggagagcggctctggctccggcggtggcaccctgaagtacgtggaggatgtgacaaacgtggtcagacgggatgtggagaagtggggccccttcgatctggtgtacggcagcacccaacccctgggcagctcttgtgaccggtgccctggctggtacatgtttcagttccaccggatcctgcagtacgccctgccgagacaggagtcccagcggccattcttttggattttcatggacaacttgctgctgaccgaggatgaccaggaaactaccactcggttcctgcagaccgaagccgtgaccctgcaggacgtgagaggccgggactaccagaacgccatgcgggtgtggtccaacatccctggactgaaaagcaagcacgcacctctgacccctaaagaagaggagtacctgcaggcccaggtgcggagcagaagcaagctggacgcccctaaggtggatctgctggtgaagaattgcctcctgcccctgagagagtacttcaagtatttcagccagaatagtctgcccctgggaggcagcggcggcggcagcaagctgcccgaggccttcgaggacgtggccgtgtacttcaccaggaaggagtgggagctgctggaggccggcgacaagggcctgtaccaggaccagatgctgaggaactaccaggccctggtgagcctgggcctgcagggccccgcccccgacctgatctgcaggatgcagctgggcgagatggagctgtgggtgtgcgacgacgaggaggccggcgagagcagcctgagcgaggacttcggcggcccaagcagcggcgcccctcctcccagcggcggcagcccagccggctccccaacctctaccgaggagggcacctctgagtccgccacccccgagagcggccctggcacctccaccgagcccagcgagggcagcgcacccggcagccctgccggcagccccacctccacagaggagggaaccagcaccgagcccagcgaaggcagcgccccaggcaccagcaccgagcctagtgagcaggagattaaacggatcaacaagatcagaagaagacttgtgaaagacagcaacaccaagaaggccggcaagacaggccccatgaaaaccctgctggttagagtgatgacacccgatctgagagagcggctggaaaacctgagaaagaagcctgaaaatatcccccagcccatcagcaatacatctagagccaacctgaataagctgctgaccgattacaccgaaatgaagaaggcgatcctgcatgtgtactgggaagagttccagaaggaccctgtgggcctgatgagccgggtggcccagcctgccagcaagaagatcgatcagaacaagctgaaacctgagatggacgagaagggcaacctgaccaccgccggctttgcctgctctcagtgtggccagcccctgttcgtgtacaagctggagcaggtgtctgagaagggcaaggcttacaccaactacttcggacggtgcaatgtggccgagcacgaaaagctgatcctgctggcccagctgaagcccgagaaggatagcgacgaagccgtgacatatagcctgggaaagtttgggcagagggccctggatttctacagcattcatgtgaccaaggagtccacccaccccgtgaagcccctggcccagatcgccggaaacagatacgcctccggacctgtgggaaaggccctgagcgacgcatgtatgggcacaatcgcctccttcctgtctaagtaccaggacatcatcatcgaacaccagaaggtggtgaagggcaaccagaagagactggagagcctgcgggagctggccggcaaggaaaacctggaataccctagcgtgaccctgccacctcagcctcacaccaaggagggcgttgatgcctacaacgaagtgatcgcccgggtgcgaatgtgggtgaacctgaacctgtggcagaagctgaagctaagcagagatgatgccaagcctctgctgagactgaagggattcccttcctttcctctggtcgagagacaggccaacgaagtggactggtgggacatggtgtgtaacgtgaagaagctgatcaacgagaaaaaggaggatggcaaggtgttttggcagaatctggctggctacaagagacaggaagccctgagaccatacctgagcagcgaggaagatcggaagaagggaaagaaattcgctcggtaccagctgggcgacctgctgctgcacctggaaaagaagcacggcgaggactggggaaaggtgtacgacgaggcctgggagcggattgacaagaaagtggaaggcctgagcaagcacatcaagctggaagaggaacggagaagcgaggacgcccagagcaaggccgccctgaccgactggctgcgggctaaggccagcttcgtgatcgagggcctgaaggaggccgacaaggacgagttctgcagatgcgagctgaagctgcagaagtggtacggggacctgcggggaaagcccttcgccatcgaagccgagaacagcatcctggacatcagcggcttcagcaagcagtacaactgtgccttcatctggcagaaggacggcgtgaagaagctgaacctgtacctgatcatcaactacttcaagggcggcaagctgcggttcaagaagatcaaacctgaagccttcgaagccaacagattctacaccgtgatcaacaaaaagagcggcgagatcgtgcccatggaggtgaacttcaacttcgacgaccccaacctgatcatcctgcctctggcctttggcaagagacagggcagagaattcatctggaacgacctgctgtccctggaaaccggcagcctgaagctggccaacggaagagtgatcgagaagacactgtacaacagaagaacccggcaggatgagcctgccctgttcgtggccctgaccttcgagcggcgggaggtcctggactcctccaatatcaaaccaatgaacctgatcggcgtggcaagaggcgaaaacatccccgccgtgatcgccctgaccgaccccgagggctgcccactgagccggtttaaggatagcctgggaaacccaacccacatcctgagaatcggcgagagctataaggagaagcagcggaccatccaggccaagaaggaggtggagcagcggagagccggcggctacagccggaagtacgccagcaaagccaagaatctggcagacgatatggtgagaaacaccgctagagatctgctgtactacgccgtgacccaggatgccatgctgatcttcgccaacctgagccggggcttcggccggcagggcaagcggaccttcatggccgagagacagtacacacggatggaggactggctgaccgccaagctggcctacgagggcctgagcaagacctacctgtccaagacactggcccagtacacctccaagacatgcagcaactgtgggtttaccatcaccagcgccgactacgacagggtgctggagaagctgaagaagacagcaacaggctggatgaccacaattaacggcaaggagctgaaggtggagggccagattacctactacaacagatacaagagacagaacgtagtcaaggacctgtccgtcgagctggatagactgagcgaagaatctgtgaacaacgacatctcctcctggacaaagggcagaagcggagaagctctgagcctcctgaagaaaagattctcccatagacccgtgcaggagaagttcgtgtgcctgaactgcggcttcgagacacacgcagccgagcaagccgccctgaacatcgccagatcctggctgttcctgcggagccaggagtacaagaaataccagacaaacaagacaaccggcaacaccgataagagagccttcgtcgagacctggcagtccttttaccggaagaagcttaaggaggtgtggaaacctgccgtgcggtctggcggatctggcggaggctccaccagccccaagaaaaagagaaaagtctaagctgccttctgcggggcttgccttctggccatgcccttcttctctcccttgcacctgtacctcttggtctttgaataaagcctgagtaggaaggctagcaaaaaaaaaaaaaaaaaaaaaaaaaaaaaaaaaaaaaaaaaaaaaaaaaaaaaaaaaaaaaaaaaaaaaaaaaaaaaaaa

SEQ ID NO: 12991 - RNA, 5785 nt, synthetic construct
  source 1..5785: mol_type = other RNA
aggaaataagagagaaaagaagagtaagaagaaatataagagccaccatggcccctaagaagaagcgtaaagtgagccggatggaacgcctcgtctacgaggtgcggcagaagtgcagaaacatcgaggacatctgcatctcctgcggatctctgaacgtgaccctggagcacccactgttcatcggcggcatgtgccagaactgtaaaaactgttttctggagtgtgcctatcaatacgacgatgacggctaccagagctactgcaccatctgttgcggcggaagagaggtgctgatgtgtggaaataacaactgctgccggtgcttctgcgtggaatgcgtggacctgctggtgggccccggcgccgcccaggccgctattaaggaagatccttggaactgctacatgtgcggccacaagggcacatacggcctgctgagacggagagaggactggcctagcagactgcagatgttcttcgccaataaccacgaccaggagttcgacccccctaaggtgtaccctcccgtccccgccgagaagagaaagcccatccgggtcctgagcctgttcgatggcatcgccaccggtctgctggtgctgaaggacctgggcatccaggtggataggtacattgcctccgaggtgtgcgaggactccatcaccgtgggaatggtgcgtcatcagggcaagatcatgtacgtgggcgacgtgcggagcgtgacacagaagcatatccaggagtggggccctttcgacctggtgatcggcggcagcccttgcaatgacctgagcatcgtgaacccagcccggaagggcctgtacgagggaaccggcagactgttcttcgagttttacagactgctgcacgacgcccggcctaaggaaggcgacgaccggcccttcttttggctgttcgagaatgtggtggccatgggagtcagcgacaagcgggatattagccggttcctggagagcaaccccgtgatgatcgatgccaaggaagtgagcgccgcccaccgggccagatacttctggggcaatctgcctggcatgaacagacccctggccagcaccgtgaacgacaagctggagctgcaggagtgcctggagcacggccggatcgccaagttcagcaaggtgagaaccatcaccacccgaagcaacagcatcaaacaaggcaaggaccagcactttcctgtgttcatgaacgagaaggaggacatcctgtggtgtaccgagatggagagagtgttcgggttcccagtccactacacagatgtcagcaacatgtctagactggccagacagagactgctgggaagaagctggtccgtccctgtgatcagacacctgttcgcccctctgaaggagtacttcgcctgcgtgagcagcggcaacagcaacgccaacagccggggccccagcttctctagcggcctggtgccactgtccctgagagggagccacatgggccccatggagatctacaaaaccgtgagcgcctggaagcggcagcctgtgcgcgtgctgagcctgtttcggaatatcgataaagtcctgaaaagcctgggattcctggagagcggctctggctccggcggtggcaccctgaagtacgtggaggatgtgacaaacgtggtcagacgggatgtggagaagtggggccccttcgatctggtgtacggcagcacccaacccctgggcagctcttgtgaccggtgccctggctggtacatgtttcagttccaccggatcctgcagtacgccctgccgagacaggagtcccagcggccattcttttggattttcatggacaacttgctgctgaccgaggatgaccaggaaactaccactcggttcctgcagaccgaagccgtgaccctgcaggacgtgagaggccgggactaccagaacgccatgcgggtgtggtccaacatccctggactgaaaagcaagcacgcacctctgacccctaaagaagaggagtacctgcaggcccaggtgcggagcagaagcaagctggacgcccctaaggtggatctgctggtgaagaattgcctcctgcccctgagagagtacttcaagtatttcagccagaatagtctgcccctgggaggcagcggcggcggcttccaggagcccgtgaccttcaaggacgtggccgtggagttcacctgggaggagtggaggcagctggaccccacccagagggccctgttcagggacgtgatgctggagaactacaggaacctggtgagcctgggcctggccgtgaccaagcccgacgtgatcttccagctggagagcggcgaggtgccctggatgctggagagggaggtgcccaggagcagccccaccgagtgcctgaacctgggcggcccaagcagcggcgcccctcctcccagcggcggcagcccagccggctccccaacctctaccgaggagggcacctctgagtccgccacccccgagagcggccctggcacctccaccgagcccagcgagggcagcgcacccggcagccctgccggcagccccacctccacagaggagggaaccagcaccgagcccagcgaaggcagcgccccaggcaccagcaccgagcctagtgagcaggagattaaacggatcaacaagatcagaagaagacttgtgaaagacagcaacaccaagaaggccggcaagacaggccccatgaaaaccctgctggttagagtgatgacacccgatctgagagagcggctggaaaacctgagaaagaagcctgaaaatatcccccagcccatcagcaatacatctagagccaacctgaataagctgctgaccgattacaccgaaatgaagaaggcgatcctgcatgtgtactgggaagagttccagaaggaccctgtgggcctgatgagccgggtggcccagcctgccagcaagaagatcgatcagaacaagctgaaacctgagatggacgagaagggcaacctgaccaccgccggctttgcctgctctcagtgtggccagcccctgttcgtgtacaagctggagcaggtgtctgagaagggcaaggcttacaccaactacttcggacggtgcaatgtggccgagcacgaaaagctgatcctgctggcccagctgaagcccgagaaggatagcgacgaagccgtgacatatagcctgggaaagtttgggcagagggccctggatttctacagcattcatgtgaccaaggagtccacccaccccgtgaagcccctggcccagatcgccggaaacagatacgcctccggacctgtgggaaaggccctgagcgacgcatgtatgggcacaatcgcctccttcctgtctaagtaccaggacatcatcatcgaacaccagaaggtggtgaagggcaaccagaagagactggagagcctgcgggagctggccggcaaggaaaacctggaataccctagcgtgaccctgccacctcagcctcacaccaaggagggcgttgatgcctacaacgaagtgatcgcccgggtgcgaatgtgggtgaacctgaacctgtggcagaagctgaagctaagcagagatgatgccaagcctctgctgagactgaagggattcccttcctttcctctggtcgagagacaggccaacgaagtggactggtgggacatggtgtgtaacgtgaagaagctgatcaacgagaaaaaggaggatggcaaggtgttttggcagaatctggctggctacaagagacaggaagccctgagaccatacctgagcagcgaggaagatcggaagaagggaaagaaattcgctcggtaccagctgggcgacctgctgctgcacctggaaaagaagcacggcgaggactggggaaaggtgtacgacgaggcctgggagcggattgacaagaaagtggaaggcctgagcaagcacatcaagctggaagaggaacggagaagcgaggacgcccagagcaaggccgccctgaccgactggctgcgggctaaggccagcttcgtgatcgagggcctgaaggaggccgacaaggacgagttctgcagatgcgagctgaagctgcagaagtggtacggggacctgcggggaaagcccttcgccatcgaagccgagaacagcatcctggacatcagcggcttcagcaagcagtacaactgtgccttcatctggcagaaggacggcgtgaagaagctgaacctgtacctgatcatcaactacttcaagggcggcaagctgcggttcaagaagatcaaacctgaagccttcgaagccaacagattctacaccgtgatcaacaaaaagagcggcgagatcgtgcccatggaggtgaacttcaacttcgacgaccccaacctgatcatcctgcctctggcctttggcaagagacagggcagagaattcatctggaacgacctgctgtccctggaaaccggcagcctgaagctggccaacggaagagtgatcgagaagacactgtacaacagaagaacccggcaggatgagcctgccctgttcgtggccctgaccttcgagcggcgggaggtcctggactcctccaatatcaaaccaatgaacctgatcggcgtggcaagaggcgaaaacatccccgccgtgatcgccctgaccgaccccgagggctgcccactgagccggtttaaggatagcctgggaaacccaacccacatcctgagaatcggcgagagctataaggagaagcagcggaccatccaggccaagaaggaggtggagcagcggagagccggcggctacagccggaagtacgccagcaaagccaagaatctggcagacgatatggtgagaaacaccgctagagatctgctgtactacgccgtgacccaggatgccatgctgatcttcgccaacctgagccggggcttcggccggcagggcaagcggaccttcatggccgagagacagtacacacggatggaggactggctgaccgccaagctggcctacgagggcctgagcaagacctacctgtccaagacactggcccagtacacctccaagacatgcagcaactgtgggtttaccatcaccagcgccgactacgacagggtgctggagaagctgaagaagacagcaacaggctggatgaccacaattaacggcaaggagctgaaggtggagggccagattacctactacaacagatacaagagacagaacgtagtcaaggacctgtccgtcgagctggatagactgagcgaagaatctgtgaacaacgacatctcctcctggacaaagggcagaagcggagaagctctgagcctcctgaagaaaagattctcccatagacccgtgcaggagaagttcgtgtgcctgaactgcggcttcgagacacacgcagccgagcaagccgccctgaacatcgccagatcctggctgttcctgcggagccaggagtacaagaaataccagacaaacaagacaaccggcaacaccgataagagagccttcgtcgagacctggcagtccttttaccggaagaagcttaaggaggtgtggaaacctgccgtgcggtctggcggatctggcggaggctccaccagccccaagaaaaagagaaaagtctaagctgccttctgcggggcttgccttctggccatgcccttcttctctcccttgcacctgtacctcttggtctttgaataaagcctgagtaggaaggctagcaaaaaaaaaaaaaaaaaaaaaaaaaaaaaaaaaaaaaaaaaaaaaaaaaaaaaaaaaaaaaaaaaaaaaaaaaaaaaaaa

SEQ ID NO: 12992 - RNA, 5785 nt, synthetic construct
  source 1..5785: mol_type = other RNA
aggaaataagagagaaaagaagagtaagaagaaatataagagccaccatggcccctaagaagaagcgtaaagtgagccggatggaacgcctcgtctacgaggtgcggcagaagtgcagaaacatcgaggacatctgcatctcctgcggatctctgaacgtgaccctggagcacccactgttcatcggcggcatgtgccagaactgtaaaaactgttttctggagtgtgcctatcaatacgacgatgacggctaccagagctactgcaccatctgttgcggcggaagagaggtgctgatgtgtggaaataacaactgctgccggtgcttctgcgtggaatgcgtggacctgctggtgggccccggcgccgcccaggccgctattaaggaagatccttggaactgctacatgtgcggccacaagggcacatacggcctgctgagacggagagaggactggcctagcagactgcagatgttcttcgccaataaccacgaccaggagttcgacccccctaaggtgtaccctcccgtccccgccgagaagagaaagcccatccgggtcctgagcctgttcgatggcatcgccaccggtctgctggtgctgaaggacctgggcatccaggtggataggtacattgcctccgaggtgtgcgaggactccatcaccgtgggaatggtgcgtcatcagggcaagatcatgtacgtgggcgacgtgcggagcgtgacacagaagcatatccaggagtggggccctttcgacctggtgatcggcggcagcccttgcaatgacctgagcatcgtgaacccagcccggaagggcctgtacgagggaaccggcagactgttcttcgagttttacagactgctgcacgacgcccggcctaaggaaggcgacgaccggcccttcttttggctgttcgagaatgtggtggccatgggagtcagcgacaagcgggatattagccggttcctggagagcaaccccgtgatgatcgatgccaaggaagtgagcgccgcccaccgggccagatacttctggggcaatctgcctggcatgaacagacccctggccagcaccgtgaacgacaagctggagctgcaggagtgcctggagcacggccggatcgccaagttcagcaaggtgagaaccatcaccacccgaagcaacagcatcaaacaaggcaaggaccagcactttcctgtgttcatgaacgagaaggaggacatcctgtggtgtaccgagatggagagagtgttcgggttcccagtccactacacagatgtcagcaacatgtctagactggccagacagagactgctgggaagaagctggtccgtccctgtgatcagacacctgttcgcccctctgaaggagtacttcgcctgcgtgagcagcggcaacagcaacgccaacagccggggccccagcttctctagcggcctggtgccactgtccctgagagggagccacatgggccccatggagatctacaaaaccgtgagcgcctggaagcggcagcctgtgcgcgtgctgagcctgtttcggaatatcgataaagtcctgaaaagcctgggattcctggagagcggctctggctccggcggtggcaccctgaagtacgtggaggatgtgacaaacgtggtcagacgggatgtggagaagtggggccccttcgatctggtgtacggcagcacccaacccctgggcagctcttgtgaccggtgccctggctggtacatgtttcagttccaccggatcctgcagtacgccctgccgagacaggagtcccagcggccattcttttggattttcatggacaacttgctgctgaccgaggatgaccaggaaactaccactcggttcctgcagaccgaagccgtgaccctgcaggacgtgagaggccgggactaccagaacgccatgcgggtgtggtccaacatccctggactgaaaagcaagcacgcacctctgacccctaaagaagaggagtacctgcaggcccaggtgcggagcagaagcaagctggacgcccctaaggtggatctgctggtgaagaattgcctcctgcccctgagagagtacttcaagtatttcagccagaatagtctgcccctgggaggcagcggcggcggcagccagggcctggtgagcttcaaggacgtggccgtggacttcacccaggaggagtggcagcagctggaccccgcccagaggaccctgtacagggacgtgatgctggagaacttcagccacgtgatcagcctgggctaccccgtgagcaagcccgacgtgatcagcaagctggagcagggcgaggacccctggatcatcaagagggacgtgagcaactggatctacaccgacgagaaccaggccggcggcccaagcagcggcgcccctcctcccagcggcggcagcccagccggctccccaacctctaccgaggagggcacctctgagtccgccacccccgagagcggccctggcacctccaccgagcccagcgagggcagcgcacccggcagccctgccggcagccccacctccacagaggagggaaccagcaccgagcccagcgaaggcagcgccccaggcaccagcaccgagcctagtgagcaggagattaaacggatcaacaagatcagaagaagacttgtgaaagacagcaacaccaagaaggccggcaagacaggccccatgaaaaccctgctggttagagtgatgacacccgatctgagagagcggctggaaaacctgagaaagaagcctgaaaatatcccccagcccatcagcaatacatctagagccaacctgaataagctgctgaccgattacaccgaaatgaagaaggcgatcctgcatgtgtactgggaagagttccagaaggaccctgtgggcctgatgagccgggtggcccagcctgccagcaagaagatcgatcagaacaagctgaaacctgagatggacgagaagggcaacctgaccaccgccggctttgcctgctctcagtgtggccagcccctgttcgtgtacaagctggagcaggtgtctgagaagggcaaggcttacaccaactacttcggacggtgcaatgtggccgagcacgaaaagctgatcctgctggcccagctgaagcccgagaaggatagcgacgaagccgtgacatatagcctgggaaagtttgggcagagggccctggatttctacagcattcatgtgaccaaggagtccacccaccccgtgaagcccctggcccagatcgccggaaacagatacgcctccggacctgtgggaaaggccctgagcgacgcatgtatgggcacaatcgcctccttcctgtctaagtaccaggacatcatcatcgaacaccagaaggtggtgaagggcaaccagaagagactggagagcctgcgggagctggccggcaaggaaaacctggaataccctagcgtgaccctgccacctcagcctcacaccaaggagggcgttgatgcctacaacgaagtgatcgcccgggtgcgaatgtgggtgaacctgaacctgtggcagaagctgaagctaagcagagatgatgccaagcctctgctgagactgaagggattcccttcctttcctctggtcgagagacaggccaacgaagtggactggtgggacatggtgtgtaacgtgaagaagctgatcaacgagaaaaaggaggatggcaaggtgttttggcagaatctggctggctacaagagacaggaagccctgagaccatacctgagcagcgaggaagatcggaagaagggaaagaaattcgctcggtaccagctgggcgacctgctgctgcacctggaaaagaagcacggcgaggactggggaaaggtgtacgacgaggcctgggagcggattgacaagaaagtggaaggcctgagcaagcacatcaagctggaagaggaacggagaagcgaggacgcccagagcaaggccgccctgaccgactggctgcgggctaaggccagcttcgtgatcgagggcctgaaggaggccgacaaggacgagttctgcagatgcgagctgaagctgcagaagtggtacggggacctgcggggaaagcccttcgccatcgaagccgagaacagcatcctggacatcagcggcttcagcaagcagtacaactgtgccttcatctggcagaaggacggcgtgaagaagctgaacctgtacctgatcatcaactacttcaagggcggcaagctgcggttcaagaagatcaaacctgaagccttcgaagccaacagattctacaccgtgatcaacaaaaagagcggcgagatcgtgcccatggaggtgaacttcaacttcgacgaccccaacctgatcatcctgcctctggcctttggcaagagacagggcagagaattcatctggaacgacctgctgtccctggaaaccggcagcctgaagctggccaacggaagagtgatcgagaagacactgtacaacagaagaacccggcaggatgagcctgccctgttcgtggccctgaccttcgagcggcgggaggtcctggactcctccaatatcaaaccaatgaacctgatcggcgtggcaagaggcgaaaacatccccgccgtgatcgccctgaccgaccccgagggctgcccactgagccggtttaaggatagcctgggaaacccaacccacatcctgagaatcggcgagagctataaggagaagcagcggaccatccaggccaagaaggaggtggagcagcggagagccggcggctacagccggaagtacgccagcaaagccaagaatctggcagacgatatggtgagaaacaccgctagagatctgctgtactacgccgtgacccaggatgccatgctgatcttcgccaacctgagccggggcttcggccggcagggcaagcggaccttcatggccgagagacagtacacacggatggaggactggctgaccgccaagctggcctacgagggcctgagcaagacctacctgtccaagacactggcccagtacacctccaagacatgcagcaactgtgggtttaccatcaccagcgccgactacgacagggtgctggagaagctgaagaagacagcaacaggctggatgaccacaattaacggcaaggagctgaaggtggagggccagattacctactacaacagatacaagagacagaacgtagtcaaggacctgtccgtcgagctggatagactgagcgaagaatctgtgaacaacgacatctcctcctggacaaagggcagaagcggagaagctctgagcctcctgaagaaaagattctcccatagacccgtgcaggagaagttcgtgtgcctgaactgcggcttcgagacacacgcagccgagcaagccgccctgaacatcgccagatcctggctgttcctgcggagccaggagtacaagaaataccagacaaacaagacaaccggcaacaccgataagagagccttcgtcgagacctggcagtccttttaccggaagaagcttaaggaggtgtggaaacctgccgtgcggtctggcggatctggcggaggctccaccagccccaagaaaaagagaaaagtctaagctgccttctgcggggcttgccttctggccatgcccttcttctctcccttgcacctgtacctcttggtctttgaataaagcctgagtaggaaggctagcaaaaaaaaaaaaaaaaaaaaaaaaaaaaaaaaaaaaaaaaaaaaaaaaaaaaaaaaaaaaaaaaaaaaaaaaaaaaaaaa

SEQ ID NO: 12993 - RNA, 5785 nt, synthetic construct
  source 1..5785: mol_type = other RNA
aggaaataagagagaaaagaagagtaagaagaaatataagagccaccatggcccctaagaagaagcgtaaagtgagccggatggaacgcctcgtctacgaggtgcggcagaagtgcagaaacatcgaggacatctgcatctcctgcggatctctgaacgtgaccctggagcacccactgttcatcggcggcatgtgccagaactgtaaaaactgttttctggagtgtgcctatcaatacgacgatgacggctaccagagctactgcaccatctgttgcggcggaagagaggtgctgatgtgtggaaataacaactgctgccggtgcttctgcgtggaatgcgtggacctgctggtgggccccggcgccgcccaggccgctattaaggaagatccttggaactgctacatgtgcggccacaagggcacatacggcctgctgagacggagagaggactggcctagcagactgcagatgttcttcgccaataaccacgaccaggagttcgacccccctaaggtgtaccctcccgtccccgccgagaagagaaagcccatccgggtcctgagcctgttcgatggcatcgccaccggtctgctggtgctgaaggacctgggcatccaggtggataggtacattgcctccgaggtgtgcgaggactccatcaccgtgggaatggtgcgtcatcagggcaagatcatgtacgtgggcgacgtgcggagcgtgacacagaagcatatccaggagtggggccctttcgacctggtgatcggcggcagcccttgcaatgacctgagcatcgtgaacccagcccggaagggcctgtacgagggaaccggcagactgttcttcgagttttacagactgctgcacgacgcccggcctaaggaaggcgacgaccggcccttcttttggctgttcgagaatgtggtggccatgggagtcagcgacaagcgggatattagccggttcctggagagcaaccccgtgatgatcgatgccaaggaagtgagcgccgcccaccgggccagatacttctggggcaatctgcctggcatgaacagacccctggccagcaccgtgaacgacaagctggagctgcaggagtgcctggagcacggccggatcgccaagttcagcaaggtgagaaccatcaccacccgaagcaacagcatcaaacaaggcaaggaccagcactttcctgtgttcatgaacgagaaggaggacatcctgtggtgtaccgagatggagagagtgttcgggttcccagtccactacacagatgtcagcaacatgtctagactggccagacagagactgctgggaagaagctggtccgtccctgtgatcagacacctgttcgcccctctgaaggagtacttcgcctgcgtgagcagcggcaacagcaacgccaacagccggggccccagcttctctagcggcctggtgccactgtccctgagagggagccacatgggccccatggagatctacaaaaccgtgagcgcctggaagcggcagcctgtgcgcgtgctgagcctgtttcggaatatcgataaagtcctgaaaagcctgggattcctggagagcggctctggctccggcggtggcaccctgaagtacgtggaggatgtgacaaacgtggtcagacgggatgtggagaagtggggccccttcgatctggtgtacggcagcacccaacccctgggcagctcttgtgaccggtgccctggctggtacatgtttcagttccaccggatcctgcagtacgccctgccgagacaggagtcccagcggccattcttttggattttcatggacaacttgctgctgaccgaggatgaccaggaaactaccactcggttcctgcagaccgaagccgtgaccctgcaggacgtgagaggccgggactaccagaacgccatgcgggtgtggtccaacatccctggactgaaaagcaagcacgcacctctgacccctaaagaagaggagtacctgcaggcccaggtgcggagcagaagcaagctggacgcccctaaggtggatctgctggtgaagaattgcctcctgcccctgagagagtacttcaagtatttcagccagaatagtctgcccctgggaggcagcggcggcggcgcccaggagagcgtgaccttcgaggacgtggccgtgaacttcaccgacagggagtggcagtgcctgacctacgcccagaggcacctgtacaaggacgtgatgctggagaactacggcaacatggtgagcgtgggcttccccttccccaagccccccctgatcagccacctggagaggggcgtggagctgtgcgtgcaggacccccaggacagggagagcctgagctgcagctgcctggtgagcggcggcccaagcagcggcgcccctcctcccagcggcggcagcccagccggctccccaacctctaccgaggagggcacctctgagtccgccacccccgagagcggccctggcacctccaccgagcccagcgagggcagcgcacccggcagccctgccggcagccccacctccacagaggagggaaccagcaccgagcccagcgaaggcagcgccccaggcaccagcaccgagcctagtgagcaggagattaaacggatcaacaagatcagaagaagacttgtgaaagacagcaacaccaagaaggccggcaagacaggccccatgaaaaccctgctggttagagtgatgacacccgatctgagagagcggctggaaaacctgagaaagaagcctgaaaatatcccccagcccatcagcaatacatctagagccaacctgaataagctgctgaccgattacaccgaaatgaagaaggcgatcctgcatgtgtactgggaagagttccagaaggaccctgtgggcctgatgagccgggtggcccagcctgccagcaagaagatcgatcagaacaagctgaaacctgagatggacgagaagggcaacctgaccaccgccggctttgcctgctctcagtgtggccagcccctgttcgtgtacaagctggagcaggtgtctgagaagggcaaggcttacaccaactacttcggacggtgcaatgtggccgagcacgaaaagctgatcctgctggcccagctgaagcccgagaaggatagcgacgaagccgtgacatatagcctgggaaagtttgggcagagggccctggatttctacagcattcatgtgaccaaggagtccacccaccccgtgaagcccctggcccagatcgccggaaacagatacgcctccggacctgtgggaaaggccctgagcgacgcatgtatgggcacaatcgcctccttcctgtctaagtaccaggacatcatcatcgaacaccagaaggtggtgaagggcaaccagaagagactggagagcctgcgggagctggccggcaaggaaaacctggaataccctagcgtgaccctgccacctcagcctcacaccaaggagggcgttgatgcctacaacgaagtgatcgcccgggtgcgaatgtgggtgaacctgaacctgtggcagaagctgaagctaagcagagatgatgccaagcctctgctgagactgaagggattcccttcctttcctctggtcgagagacaggccaacgaagtggactggtgggacatggtgtgtaacgtgaagaagctgatcaacgagaaaaaggaggatggcaaggtgttttggcagaatctggctggctacaagagacaggaagccctgagaccatacctgagcagcgaggaagatcggaagaagggaaagaaattcgctcggtaccagctgggcgacctgctgctgcacctggaaaagaagcacggcgaggactggggaaaggtgtacgacgaggcctgggagcggattgacaagaaagtggaaggcctgagcaagcacatcaagctggaagaggaacggagaagcgaggacgcccagagcaaggccgccctgaccgactggctgcgggctaaggccagcttcgtgatcgagggcctgaaggaggccgacaaggacgagttctgcagatgcgagctgaagctgcagaagtggtacggggacctgcggggaaagcccttcgccatcgaagccgagaacagcatcctggacatcagcggcttcagcaagcagtacaactgtgccttcatctggcagaaggacggcgtgaagaagctgaacctgtacctgatcatcaactacttcaagggcggcaagctgcggttcaagaagatcaaacctgaagccttcgaagccaacagattctacaccgtgatcaacaaaaagagcggcgagatcgtgcccatggaggtgaacttcaacttcgacgaccccaacctgatcatcctgcctctggcctttggcaagagacagggcagagaattcatctggaacgacctgctgtccctggaaaccggcagcctgaagctggccaacggaagagtgatcgagaagacactgtacaacagaagaacccggcaggatgagcctgccctgttcgtggccctgaccttcgagcggcgggaggtcctggactcctccaatatcaaaccaatgaacctgatcggcgtggcaagaggcgaaaacatccccgccgtgatcgccctgaccgaccccgagggctgcccactgagccggtttaaggatagcctgggaaacccaacccacatcctgagaatcggcgagagctataaggagaagcagcggaccatccaggccaagaaggaggtggagcagcggagagccggcggctacagccggaagtacgccagcaaagccaagaatctggcagacgatatggtgagaaacaccgctagagatctgctgtactacgccgtgacccaggatgccatgctgatcttcgccaacctgagccggggcttcggccggcagggcaagcggaccttcatggccgagagacagtacacacggatggaggactggctgaccgccaagctggcctacgagggcctgagcaagacctacctgtccaagacactggcccagtacacctccaagacatgcagcaactgtgggtttaccatcaccagcgccgactacgacagggtgctggagaagctgaagaagacagcaacaggctggatgaccacaattaacggcaaggagctgaaggtggagggccagattacctactacaacagatacaagagacagaacgtagtcaaggacctgtccgtcgagctggatagactgagcgaagaatctgtgaacaacgacatctcctcctggacaaagggcagaagcggagaagctctgagcctcctgaagaaaagattctcccatagacccgtgcaggagaagttcgtgtgcctgaactgcggcttcgagacacacgcagccgagcaagccgccctgaacatcgccagatcctggctgttcctgcggagccaggagtacaagaaataccagacaaacaagacaaccggcaacaccgataagagagccttcgtcgagacctggcagtccttttaccggaagaagcttaaggaggtgtggaaacctgccgtgcggtctggcggatctggcggaggctccaccagccccaagaaaaagagaaaagtctaagctgccttctgcggggcttgccttctggccatgcccttcttctctcccttgcacctgtacctcttggtctttgaataaagcctgagtaggaaggctagcaaaaaaaaaaaaaaaaaaaaaaaaaaaaaaaaaaaaaaaaaaaaaaaaaaaaaaaaaaaaaaaaaaaaaaaaaaaaaaaa

SEQ ID NO: 12994 - RNA, 5785 nt, synthetic construct
  source 1..5785: mol_type = other RNA
aggaaataagagagaaaagaagagtaagaagaaatataagagccaccatggcccctaagaagaagcgtaaagtgagccggatggaacgcctcgtctacgaggtgcggcagaagtgcagaaacatcgaggacatctgcatctcctgcggatctctgaacgtgaccctggagcacccactgttcatcggcggcatgtgccagaactgtaaaaactgttttctggagtgtgcctatcaatacgacgatgacggctaccagagctactgcaccatctgttgcggcggaagagaggtgctgatgtgtggaaataacaactgctgccggtgcttctgcgtggaatgcgtggacctgctggtgggccccggcgccgcccaggccgctattaaggaagatccttggaactgctacatgtgcggccacaagggcacatacggcctgctgagacggagagaggactggcctagcagactgcagatgttcttcgccaataaccacgaccaggagttcgacccccctaaggtgtaccctcccgtccccgccgagaagagaaagcccatccgggtcctgagcctgttcgatggcatcgccaccggtctgctggtgctgaaggacctgggcatccaggtggataggtacattgcctccgaggtgtgcgaggactccatcaccgtgggaatggtgcgtcatcagggcaagatcatgtacgtgggcgacgtgcggagcgtgacacagaagcatatccaggagtggggccctttcgacctggtgatcggcggcagcccttgcaatgacctgagcatcgtgaacccagcccggaagggcctgtacgagggaaccggcagactgttcttcgagttttacagactgctgcacgacgcccggcctaaggaaggcgacgaccggcccttcttttggctgttcgagaatgtggtggccatgggagtcagcgacaagcgggatattagccggttcctggagagcaaccccgtgatgatcgatgccaaggaagtgagcgccgcccaccgggccagatacttctggggcaatctgcctggcatgaacagacccctggccagcaccgtgaacgacaagctggagctgcaggagtgcctggagcacggccggatcgccaagttcagcaaggtgagaaccatcaccacccgaagcaacagcatcaaacaaggcaaggaccagcactttcctgtgttcatgaacgagaaggaggacatcctgtggtgtaccgagatggagagagtgttcgggttcccagtccactacacagatgtcagcaacatgtctagactggccagacagagactgctgggaagaagctggtccgtccctgtgatcagacacctgttcgcccctctgaaggagtacttcgcctgcgtgagcagcggcaacagcaacgccaacagccggggccccagcttctctagcggcctggtgccactgtccctgagagggagccacatgggccccatggagatctacaaaaccgtgagcgcctggaagcggcagcctgtgcgcgtgctgagcctgtttcggaatatcgataaagtcctgaaaagcctgggattcctggagagcggctctggctccggcggtggcaccctgaagtacgtggaggatgtgacaaacgtggtcagacgggatgtggagaagtggggccccttcgatctggtgtacggcagcacccaacccctgggcagctcttgtgaccggtgccctggctggtacatgtttcagttccaccggatcctgcagtacgccctgccgagacaggagtcccagcggccattcttttggattttcatggacaacttgctgctgaccgaggatgaccaggaaactaccactcggttcctgcagaccgaagccgtgaccctgcaggacgtgagaggccgggactaccagaacgccatgcgggtgtggtccaacatccctggactgaaaagcaagcacgcacctctgacccctaaagaagaggagtacctgcaggcccaggtgcggagcagaagcaagctggacgcccctaaggtggatctgctggtgaagaattgcctcctgcccctgagagagtacttcaagtatttcagccagaatagtctgcccctgggaggcagcggcggcggcgcctacggcagcctgagcttcggcgaggtggccatcagcttcagccaggaggagtgggagtgcctggaccccgcccagagggccctgtacagggacgtgatgctggagacctacagcaacctggtgagcctggccggcagcagcatcagcaagcccgacgtgatcaccctgctggagcaggagaaggagccctgggtggtggtgaggagggagaccagcaggtggtaccccgacctggagagcggcggcccaagcagcggcgcccctcctcccagcggcggcagcccagccggctccccaacctctaccgaggagggcacctctgagtccgccacccccgagagcggccctggcacctccaccgagcccagcgagggcagcgcacccggcagccctgccggcagccccacctccacagaggagggaaccagcaccgagcccagcgaaggcagcgccccaggcaccagcaccgagcctagtgagcaggagattaaacggatcaacaagatcagaagaagacttgtgaaagacagcaacaccaagaaggccggcaagacaggccccatgaaaaccctgctggttagagtgatgacacccgatctgagagagcggctggaaaacctgagaaagaagcctgaaaatatcccccagcccatcagcaatacatctagagccaacctgaataagctgctgaccgattacaccgaaatgaagaaggcgatcctgcatgtgtactgggaagagttccagaaggaccctgtgggcctgatgagccgggtggcccagcctgccagcaagaagatcgatcagaacaagctgaaacctgagatggacgagaagggcaacctgaccaccgccggctttgcctgctctcagtgtggccagcccctgttcgtgtacaagctggagcaggtgtctgagaagggcaaggcttacaccaactacttcggacggtgcaatgtggccgagcacgaaaagctgatcctgctggcccagctgaagcccgagaaggatagcgacgaagccgtgacatatagcctgggaaagtttgggcagagggccctggatttctacagcattcatgtgaccaaggagtccacccaccccgtgaagcccctggcccagatcgccggaaacagatacgcctccggacctgtgggaaaggccctgagcgacgcatgtatgggcacaatcgcctccttcctgtctaagtaccaggacatcatcatcgaacaccagaaggtggtgaagggcaaccagaagagactggagagcctgcgggagctggccggcaaggaaaacctggaataccctagcgtgaccctgccacctcagcctcacaccaaggagggcgttgatgcctacaacgaagtgatcgcccgggtgcgaatgtgggtgaacctgaacctgtggcagaagctgaagctaagcagagatgatgccaagcctctgctgagactgaagggattcccttcctttcctctggtcgagagacaggccaacgaagtggactggtgggacatggtgtgtaacgtgaagaagctgatcaacgagaaaaaggaggatggcaaggtgttttggcagaatctggctggctacaagagacaggaagccctgagaccatacctgagcagcgaggaagatcggaagaagggaaagaaattcgctcggtaccagctgggcgacctgctgctgcacctggaaaagaagcacggcgaggactggggaaaggtgtacgacgaggcctgggagcggattgacaagaaagtggaaggcctgagcaagcacatcaagctggaagaggaacggagaagcgaggacgcccagagcaaggccgccctgaccgactggctgcgggctaaggccagcttcgtgatcgagggcctgaaggaggccgacaaggacgagttctgcagatgcgagctgaagctgcagaagtggtacggggacctgcggggaaagcccttcgccatcgaagccgagaacagcatcctggacatcagcggcttcagcaagcagtacaactgtgccttcatctggcagaaggacggcgtgaagaagctgaacctgtacctgatcatcaactacttcaagggcggcaagctgcggttcaagaagatcaaacctgaagccttcgaagccaacagattctacaccgtgatcaacaaaaagagcggcgagatcgtgcccatggaggtgaacttcaacttcgacgaccccaacctgatcatcctgcctctggcctttggcaagagacagggcagagaattcatctggaacgacctgctgtccctggaaaccggcagcctgaagctggccaacggaagagtgatcgagaagacactgtacaacagaagaacccggcaggatgagcctgccctgttcgtggccctgaccttcgagcggcgggaggtcctggactcctccaatatcaaaccaatgaacctgatcggcgtggcaagaggcgaaaacatccccgccgtgatcgccctgaccgaccccgagggctgcccactgagccggtttaaggatagcctgggaaacccaacccacatcctgagaatcggcgagagctataaggagaagcagcggaccatccaggccaagaaggaggtggagcagcggagagccggcggctacagccggaagtacgccagcaaagccaagaatctggcagacgatatggtgagaaacaccgctagagatctgctgtactacgccgtgacccaggatgccatgctgatcttcgccaacctgagccggggcttcggccggcagggcaagcggaccttcatggccgagagacagtacacacggatggaggactggctgaccgccaagctggcctacgagggcctgagcaagacctacctgtccaagacactggcccagtacacctccaagacatgcagcaactgtgggtttaccatcaccagcgccgactacgacagggtgctggagaagctgaagaagacagcaacaggctggatgaccacaattaacggcaaggagctgaaggtggagggccagattacctactacaacagatacaagagacagaacgtagtcaaggacctgtccgtcgagctggatagactgagcgaagaatctgtgaacaacgacatctcctcctggacaaagggcagaagcggagaagctctgagcctcctgaagaaaagattctcccatagacccgtgcaggagaagttcgtgtgcctgaactgcggcttcgagacacacgcagccgagcaagccgccctgaacatcgccagatcctggctgttcctgcggagccaggagtacaagaaataccagacaaacaagacaaccggcaacaccgataagagagccttcgtcgagacctggcagtccttttaccggaagaagcttaaggaggtgtggaaacctgccgtgcggtctggcggatctggcggaggctccaccagccccaagaaaaagagaaaagtctaagctgccttctgcggggcttgccttctggccatgcccttcttctctcccttgcacctgtacctcttggtctttgaataaagcctgagtaggaaggctagcaaaaaaaaaaaaaaaaaaaaaaaaaaaaaaaaaaaaaaaaaaaaaaaaaaaaaaaaaaaaaaaaaaaaaaaaaaaaaaaa

SEQ ID NO: 12995 - RNA, 5785 nt, synthetic construct
  source 1..5785: mol_type = other RNA
aggaaataagagagaaaagaagagtaagaagaaatataagagccaccatggcccctaagaagaagcgtaaagtgagccggatggaacgcctcgtctacgaggtgcggcagaagtgcagaaacatcgaggacatctgcatctcctgcggatctctgaacgtgaccctggagcacccactgttcatcggcggcatgtgccagaactgtaaaaactgttttctggagtgtgcctatcaatacgacgatgacggctaccagagctactgcaccatctgttgcggcggaagagaggtgctgatgtgtggaaataacaactgctgccggtgcttctgcgtggaatgcgtggacctgctggtgggccccggcgccgcccaggccgctattaaggaagatccttggaactgctacatgtgcggccacaagggcacatacggcctgctgagacggagagaggactggcctagcagactgcagatgttcttcgccaataaccacgaccaggagttcgacccccctaaggtgtaccctcccgtccccgccgagaagagaaagcccatccgggtcctgagcctgttcgatggcatcgccaccggtctgctggtgctgaaggacctgggcatccaggtggataggtacattgcctccgaggtgtgcgaggactccatcaccgtgggaatggtgcgtcatcagggcaagatcatgtacgtgggcgacgtgcggagcgtgacacagaagcatatccaggagtggggccctttcgacctggtgatcggcggcagcccttgcaatgacctgagcatcgtgaacccagcccggaagggcctgtacgagggaaccggcagactgttcttcgagttttacagactgctgcacgacgcccggcctaaggaaggcgacgaccggcccttcttttggctgttcgagaatgtggtggccatgggagtcagcgacaagcgggatattagccggttcctggagagcaaccccgtgatgatcgatgccaaggaagtgagcgccgcccaccgggccagatacttctggggcaatctgcctggcatgaacagacccctggccagcaccgtgaacgacaagctggagctgcaggagtgcctggagcacggccggatcgccaagttcagcaaggtgagaaccatcaccacccgaagcaacagcatcaaacaaggcaaggaccagcactttcctgtgttcatgaacgagaaggaggacatcctgtggtgtaccgagatggagagagtgttcgggttcccagtccactacacagatgtcagcaacatgtctagactggccagacagagactgctgggaagaagctggtccgtccctgtgatcagacacctgttcgcccctctgaaggagtacttcgcctgcgtgagcagcggcaacagcaacgccaacagccggggccccagcttctctagcggcctggtgccactgtccctgagagggagccacatgggccccatggagatctacaaaaccgtgagcgcctggaagcggcagcctgtgcgcgtgctgagcctgtttcggaatatcgataaagtcctgaaaagcctgggattcctggagagcggctctggctccggcggtggcaccctgaagtacgtggaggatgtgacaaacgtggtcagacgggatgtggagaagtggggccccttcgatctggtgtacggcagcacccaacccctgggcagctcttgtgaccggtgccctggctggtacatgtttcagttccaccggatcctgcagtacgccctgccgagacaggagtcccagcggccattcttttggattttcatggacaacttgctgctgaccgaggatgaccaggaaactaccactcggttcctgcagaccgaagccgtgaccctgcaggacgtgagaggccgggactaccagaacgccatgcgggtgtggtccaacatccctggactgaaaagcaagcacgcacctctgacccctaaagaagaggagtacctgcaggcccaggtgcggagcagaagcaagctggacgcccctaaggtggatctgctggtgaagaattgcctcctgcccctgagagagtacttcaagtatttcagccagaatagtctgcccctgggaggcagcggcggcggccagctgaccttcgaggacgtggccctgagcttcagcaaggaggagtggcagatcatggaccccaaccagaagaccctgtacatcgacgtgatgagggagatctacgagaccgtgaccagcctgggcctgaagctgaagaacgacaccggcaacgaccagcccgtgagcctgagcaccagcgagatccagcccagcggctgcaaggtgctgaggaaggccaggatgaaggtggcccagaccaccggcggcccaagcagcggcgcccctcctcccagcggcggcagcccagccggctccccaacctctaccgaggagggcacctctgagtccgccacccccgagagcggccctggcacctccaccgagcccagcgagggcagcgcacccggcagccctgccggcagccccacctccacagaggagggaaccagcaccgagcccagcgaaggcagcgccccaggcaccagcaccgagcctagtgagcaggagattaaacggatcaacaagatcagaagaagacttgtgaaagacagcaacaccaagaaggccggcaagacaggccccatgaaaaccctgctggttagagtgatgacacccgatctgagagagcggctggaaaacctgagaaagaagcctgaaaatatcccccagcccatcagcaatacatctagagccaacctgaataagctgctgaccgattacaccgaaatgaagaaggcgatcctgcatgtgtactgggaagagttccagaaggaccctgtgggcctgatgagccgggtggcccagcctgccagcaagaagatcgatcagaacaagctgaaacctgagatggacgagaagggcaacctgaccaccgccggctttgcctgctctcagtgtggccagcccctgttcgtgtacaagctggagcaggtgtctgagaagggcaaggcttacaccaactacttcggacggtgcaatgtggccgagcacgaaaagctgatcctgctggcccagctgaagcccgagaaggatagcgacgaagccgtgacatatagcctgggaaagtttgggcagagggccctggatttctacagcattcatgtgaccaaggagtccacccaccccgtgaagcccctggcccagatcgccggaaacagatacgcctccggacctgtgggaaaggccctgagcgacgcatgtatgggcacaatcgcctccttcctgtctaagtaccaggacatcatcatcgaacaccagaaggtggtgaagggcaaccagaagagactggagagcctgcgggagctggccggcaaggaaaacctggaataccctagcgtgaccctgccacctcagcctcacaccaaggagggcgttgatgcctacaacgaagtgatcgcccgggtgcgaatgtgggtgaacctgaacctgtggcagaagctgaagctaagcagagatgatgccaagcctctgctgagactgaagggattcccttcctttcctctggtcgagagacaggccaacgaagtggactggtgggacatggtgtgtaacgtgaagaagctgatcaacgagaaaaaggaggatggcaaggtgttttggcagaatctggctggctacaagagacaggaagccctgagaccatacctgagcagcgaggaagatcggaagaagggaaagaaattcgctcggtaccagctgggcgacctgctgctgcacctggaaaagaagcacggcgaggactggggaaaggtgtacgacgaggcctgggagcggattgacaagaaagtggaaggcctgagcaagcacatcaagctggaagaggaacggagaagcgaggacgcccagagcaaggccgccctgaccgactggctgcgggctaaggccagcttcgtgatcgagggcctgaaggaggccgacaaggacgagttctgcagatgcgagctgaagctgcagaagtggtacggggacctgcggggaaagcccttcgccatcgaagccgagaacagcatcctggacatcagcggcttcagcaagcagtacaactgtgccttcatctggcagaaggacggcgtgaagaagctgaacctgtacctgatcatcaactacttcaagggcggcaagctgcggttcaagaagatcaaacctgaagccttcgaagccaacagattctacaccgtgatcaacaaaaagagcggcgagatcgtgcccatggaggtgaacttcaacttcgacgaccccaacctgatcatcctgcctctggcctttggcaagagacagggcagagaattcatctggaacgacctgctgtccctggaaaccggcagcctgaagctggccaacggaagagtgatcgagaagacactgtacaacagaagaacccggcaggatgagcctgccctgttcgtggccctgaccttcgagcggcgggaggtcctggactcctccaatatcaaaccaatgaacctgatcggcgtggcaagaggcgaaaacatccccgccgtgatcgccctgaccgaccccgagggctgcccactgagccggtttaaggatagcctgggaaacccaacccacatcctgagaatcggcgagagctataaggagaagcagcggaccatccaggccaagaaggaggtggagcagcggagagccggcggctacagccggaagtacgccagcaaagccaagaatctggcagacgatatggtgagaaacaccgctagagatctgctgtactacgccgtgacccaggatgccatgctgatcttcgccaacctgagccggggcttcggccggcagggcaagcggaccttcatggccgagagacagtacacacggatggaggactggctgaccgccaagctggcctacgagggcctgagcaagacctacctgtccaagacactggcccagtacacctccaagacatgcagcaactgtgggtttaccatcaccagcgccgactacgacagggtgctggagaagctgaagaagacagcaacaggctggatgaccacaattaacggcaaggagctgaaggtggagggccagattacctactacaacagatacaagagacagaacgtagtcaaggacctgtccgtcgagctggatagactgagcgaagaatctgtgaacaacgacatctcctcctggacaaagggcagaagcggagaagctctgagcctcctgaagaaaagattctcccatagacccgtgcaggagaagttcgtgtgcctgaactgcggcttcgagacacacgcagccgagcaagccgccctgaacatcgccagatcctggctgttcctgcggagccaggagtacaagaaataccagacaaacaagacaaccggcaacaccgataagagagccttcgtcgagacctggcagtccttttaccggaagaagcttaaggaggtgtggaaacctgccgtgcggtctggcggatctggcggaggctccaccagccccaagaaaaagagaaaagtctaagctgccttctgcggggcttgccttctggccatgcccttcttctctcccttgcacctgtacctcttggtctttgaataaagcctgagtaggaaggctagcaaaaaaaaaaaaaaaaaaaaaaaaaaaaaaaaaaaaaaaaaaaaaaaaaaaaaaaaaaaaaaaaaaaaaaaaaaaaaaaa

SEQ ID NO: 12996 - RNA, 5785 nt, synthetic construct
  source 1..5785: mol_type = other RNA
aggaaataagagagaaaagaagagtaagaagaaatataagagccaccatggcccctaagaagaagcgtaaagtgagccggatggaacgcctcgtctacgaggtgcggcagaagtgcagaaacatcgaggacatctgcatctcctgcggatctctgaacgtgaccctggagcacccactgttcatcggcggcatgtgccagaactgtaaaaactgttttctggagtgtgcctatcaatacgacgatgacggctaccagagctactgcaccatctgttgcggcggaagagaggtgctgatgtgtggaaataacaactgctgccggtgcttctgcgtggaatgcgtggacctgctggtgggccccggcgccgcccaggccgctattaaggaagatccttggaactgctacatgtgcggccacaagggcacatacggcctgctgagacggagagaggactggcctagcagactgcagatgttcttcgccaataaccacgaccaggagttcgacccccctaaggtgtaccctcccgtccccgccgagaagagaaagcccatccgggtcctgagcctgttcgatggcatcgccaccggtctgctggtgctgaaggacctgggcatccaggtggataggtacattgcctccgaggtgtgcgaggactccatcaccgtgggaatggtgcgtcatcagggcaagatcatgtacgtgggcgacgtgcggagcgtgacacagaagcatatccaggagtggggccctttcgacctggtgatcggcggcagcccttgcaatgacctgagcatcgtgaacccagcccggaagggcctgtacgagggaaccggcagactgttcttcgagttttacagactgctgcacgacgcccggcctaaggaaggcgacgaccggcccttcttttggctgttcgagaatgtggtggccatgggagtcagcgacaagcgggatattagccggttcctggagagcaaccccgtgatgatcgatgccaaggaagtgagcgccgcccaccgggccagatacttctggggcaatctgcctggcatgaacagacccctggccagcaccgtgaacgacaagctggagctgcaggagtgcctggagcacggccggatcgccaagttcagcaaggtgagaaccatcaccacccgaagcaacagcatcaaacaaggcaaggaccagcactttcctgtgttcatgaacgagaaggaggacatcctgtggtgtaccgagatggagagagtgttcgggttcccagtccactacacagatgtcagcaacatgtctagactggccagacagagactgctgggaagaagctggtccgtccctgtgatcagacacctgttcgcccctctgaaggagtacttcgcctgcgtgagcagcggcaacagcaacgccaacagccggggccccagcttctctagcggcctggtgccactgtccctgagagggagccacatgggccccatggagatctacaaaaccgtgagcgcctggaagcggcagcctgtgcgcgtgctgagcctgtttcggaatatcgataaagtcctgaaaagcctgggattcctggagagcggctctggctccggcggtggcaccctgaagtacgtggaggatgtgacaaacgtggtcagacgggatgtggagaagtggggccccttcgatctggtgtacggcagcacccaacccctgggcagctcttgtgaccggtgccctggctggtacatgtttcagttccaccggatcctgcagtacgccctgccgagacaggagtcccagcggccattcttttggattttcatggacaacttgctgctgaccgaggatgaccaggaaactaccactcggttcctgcagaccgaagccgtgaccctgcaggacgtgagaggccgggactaccagaacgccatgcgggtgtggtccaacatccctggactgaaaagcaagcacgcacctctgacccctaaagaagaggagtacctgcaggcccaggtgcggagcagaagcaagctggacgcccctaaggtggatctgctggtgaagaattgcctcctgcccctgagagagtacttcaagtatttcagccagaatagtctgcccctgggaggcagcggcggcggcgagaagggccccctgaccttcagggacgtggtgatcgagttcagccaggaggagtggcagtgcctggacaccgcccagcaggacctgtacaggaaggtgatgctggagaacttcaggaacctggtgttcctgggcatcgacgtgagcaagcccgacctgatcacctgcctggagcagggcaagaacccctggaacatgaagaggcacagcatggtggccaccccccccggcgtgttcttcgtgggcggcccaagcagcggcgcccctcctcccagcggcggcagcccagccggctccccaacctctaccgaggagggcacctctgagtccgccacccccgagagcggccctggcacctccaccgagcccagcgagggcagcgcacccggcagccctgccggcagccccacctccacagaggagggaaccagcaccgagcccagcgaaggcagcgccccaggcaccagcaccgagcctagtgagcaggagattaaacggatcaacaagatcagaagaagacttgtgaaagacagcaacaccaagaaggccggcaagacaggccccatgaaaaccctgctggttagagtgatgacacccgatctgagagagcggctggaaaacctgagaaagaagcctgaaaatatcccccagcccatcagcaatacatctagagccaacctgaataagctgctgaccgattacaccgaaatgaagaaggcgatcctgcatgtgtactgggaagagttccagaaggaccctgtgggcctgatgagccgggtggcccagcctgccagcaagaagatcgatcagaacaagctgaaacctgagatggacgagaagggcaacctgaccaccgccggctttgcctgctctcagtgtggccagcccctgttcgtgtacaagctggagcaggtgtctgagaagggcaaggcttacaccaactacttcggacggtgcaatgtggccgagcacgaaaagctgatcctgctggcccagctgaagcccgagaaggatagcgacgaagccgtgacatatagcctgggaaagtttgggcagagggccctggatttctacagcattcatgtgaccaaggagtccacccaccccgtgaagcccctggcccagatcgccggaaacagatacgcctccggacctgtgggaaaggccctgagcgacgcatgtatgggcacaatcgcctccttcctgtctaagtaccaggacatcatcatcgaacaccagaaggtggtgaagggcaaccagaagagactggagagcctgcgggagctggccggcaaggaaaacctggaataccctagcgtgaccctgccacctcagcctcacaccaaggagggcgttgatgcctacaacgaagtgatcgcccgggtgcgaatgtgggtgaacctgaacctgtggcagaagctgaagctaagcagagatgatgccaagcctctgctgagactgaagggattcccttcctttcctctggtcgagagacaggccaacgaagtggactggtgggacatggtgtgtaacgtgaagaagctgatcaacgagaaaaaggaggatggcaaggtgttttggcagaatctggctggctacaagagacaggaagccctgagaccatacctgagcagcgaggaagatcggaagaagggaaagaaattcgctcggtaccagctgggcgacctgctgctgcacctggaaaagaagcacggcgaggactggggaaaggtgtacgacgaggcctgggagcggattgacaagaaagtggaaggcctgagcaagcacatcaagctggaagaggaacggagaagcgaggacgcccagagcaaggccgccctgaccgactggctgcgggctaaggccagcttcgtgatcgagggcctgaaggaggccgacaaggacgagttctgcagatgcgagctgaagctgcagaagtggtacggggacctgcggggaaagcccttcgccatcgaagccgagaacagcatcctggacatcagcggcttcagcaagcagtacaactgtgccttcatctggcagaaggacggcgtgaagaagctgaacctgtacctgatcatcaactacttcaagggcggcaagctgcggttcaagaagatcaaacctgaagccttcgaagccaacagattctacaccgtgatcaacaaaaagagcggcgagatcgtgcccatggaggtgaacttcaacttcgacgaccccaacctgatcatcctgcctctggcctttggcaagagacagggcagagaattcatctggaacgacctgctgtccctggaaaccggcagcctgaagctggccaacggaagagtgatcgagaagacactgtacaacagaagaacccggcaggatgagcctgccctgttcgtggccctgaccttcgagcggcgggaggtcctggactcctccaatatcaaaccaatgaacctgatcggcgtggcaagaggcgaaaacatccccgccgtgatcgccctgaccgaccccgagggctgcccactgagccggtttaaggatagcctgggaaacccaacccacatcctgagaatcggcgagagctataaggagaagcagcggaccatccaggccaagaaggaggtggagcagcggagagccggcggctacagccggaagtacgccagcaaagccaagaatctggcagacgatatggtgagaaacaccgctagagatctgctgtactacgccgtgacccaggatgccatgctgatcttcgccaacctgagccggggcttcggccggcagggcaagcggaccttcatggccgagagacagtacacacggatggaggactggctgaccgccaagctggcctacgagggcctgagcaagacctacctgtccaagacactggcccagtacacctccaagacatgcagcaactgtgggtttaccatcaccagcgccgactacgacagggtgctggagaagctgaagaagacagcaacaggctggatgaccacaattaacggcaaggagctgaaggtggagggccagattacctactacaacagatacaagagacagaacgtagtcaaggacctgtccgtcgagctggatagactgagcgaagaatctgtgaacaacgacatctcctcctggacaaagggcagaagcggagaagctctgagcctcctgaagaaaagattctcccatagacccgtgcaggagaagttcgtgtgcctgaactgcggcttcgagacacacgcagccgagcaagccgccctgaacatcgccagatcctggctgttcctgcggagccaggagtacaagaaataccagacaaacaagacaaccggcaacaccgataagagagccttcgtcgagacctggcagtccttttaccggaagaagcttaaggaggtgtggaaacctgccgtgcggtctggcggatctggcggaggctccaccagccccaagaaaaagagaaaagtctaagctgccttctgcggggcttgccttctggccatgcccttcttctctcccttgcacctgtacctcttggtctttgaataaagcctgagtaggaaggctagcaaaaaaaaaaaaaaaaaaaaaaaaaaaaaaaaaaaaaaaaaaaaaaaaaaaaaaaaaaaaaaaaaaaaaaaaaaaaaaaa

SEQ ID NO: 12997 - RNA, 5785 nt, synthetic construct
  source 1..5785: mol_type = other RNA
aggaaataagagagaaaagaagagtaagaagaaatataagagccaccatggcccctaagaagaagcgtaaagtgagccggatggaacgcctcgtctacgaggtgcggcagaagtgcagaaacatcgaggacatctgcatctcctgcggatctctgaacgtgaccctggagcacccactgttcatcggcggcatgtgccagaactgtaaaaactgttttctggagtgtgcctatcaatacgacgatgacggctaccagagctactgcaccatctgttgcggcggaagagaggtgctgatgtgtggaaataacaactgctgccggtgcttctgcgtggaatgcgtggacctgctggtgggccccggcgccgcccaggccgctattaaggaagatccttggaactgctacatgtgcggccacaagggcacatacggcctgctgagacggagagaggactggcctagcagactgcagatgttcttcgccaataaccacgaccaggagttcgacccccctaaggtgtaccctcccgtccccgccgagaagagaaagcccatccgggtcctgagcctgttcgatggcatcgccaccggtctgctggtgctgaaggacctgggcatccaggtggataggtacattgcctccgaggtgtgcgaggactccatcaccgtgggaatggtgcgtcatcagggcaagatcatgtacgtgggcgacgtgcggagcgtgacacagaagcatatccaggagtggggccctttcgacctggtgatcggcggcagcccttgcaatgacctgagcatcgtgaacccagcccggaagggcctgtacgagggaaccggcagactgttcttcgagttttacagactgctgcacgacgcccggcctaaggaaggcgacgaccggcccttcttttggctgttcgagaatgtggtggccatgggagtcagcgacaagcgggatattagccggttcctggagagcaaccccgtgatgatcgatgccaaggaagtgagcgccgcccaccgggccagatacttctggggcaatctgcctggcatgaacagacccctggccagcaccgtgaacgacaagctggagctgcaggagtgcctggagcacggccggatcgccaagttcagcaaggtgagaaccatcaccacccgaagcaacagcatcaaacaaggcaaggaccagcactttcctgtgttcatgaacgagaaggaggacatcctgtggtgtaccgagatggagagagtgttcgggttcccagtccactacacagatgtcagcaacatgtctagactggccagacagagactgctgggaagaagctggtccgtccctgtgatcagacacctgttcgcccctctgaaggagtacttcgcctgcgtgagcagcggcaacagcaacgccaacagccggggccccagcttctctagcggcctggtgccactgtccctgagagggagccacatgggccccatggagatctacaaaaccgtgagcgcctggaagcggcagcctgtgcgcgtgctgagcctgtttcggaatatcgataaagtcctgaaaagcctgggattcctggagagcggctctggctccggcggtggcaccctgaagtacgtggaggatgtgacaaacgtggtcagacgggatgtggagaagtggggccccttcgatctggtgtacggcagcacccaacccctgggcagctcttgtgaccggtgccctggctggtacatgtttcagttccaccggatcctgcagtacgccctgccgagacaggagtcccagcggccattcttttggattttcatggacaacttgctgctgaccgaggatgaccaggaaactaccactcggttcctgcagaccgaagccgtgaccctgcaggacgtgagaggccgggactaccagaacgccatgcgggtgtggtccaacatccctggactgaaaagcaagcacgcacctctgacccctaaagaagaggagtacctgcaggcccaggtgcggagcagaagcaagctggacgcccctaaggtggatctgctggtgaagaattgcctcctgcccctgagagagtacttcaagtatttcagccagaatagtctgcccctgggaggcagcggcggcggcttccagcacctggtgatgttcagggacgtggccgtggacttcagccaggaggagtgggagtgcctgaacagctaccagaggaacctgtacagggacgtgatcctggagaactacagcaacctggtgagcgtgggctgcaccatcagcaagcccgacgtgatcaccctgctggagcagggcaaggagccctggatggtggtgagggacgagaggaggaggaggagcctggacctggaggccaggggcggcccaagcagcggcgcccctcctcccagcggcggcagcccagccggctccccaacctctaccgaggagggcacctctgagtccgccacccccgagagcggccctggcacctccaccgagcccagcgagggcagcgcacccggcagccctgccggcagccccacctccacagaggagggaaccagcaccgagcccagcgaaggcagcgccccaggcaccagcaccgagcctagtgagcaggagattaaacggatcaacaagatcagaagaagacttgtgaaagacagcaacaccaagaaggccggcaagacaggccccatgaaaaccctgctggttagagtgatgacacccgatctgagagagcggctggaaaacctgagaaagaagcctgaaaatatcccccagcccatcagcaatacatctagagccaacctgaataagctgctgaccgattacaccgaaatgaagaaggcgatcctgcatgtgtactgggaagagttccagaaggaccctgtgggcctgatgagccgggtggcccagcctgccagcaagaagatcgatcagaacaagctgaaacctgagatggacgagaagggcaacctgaccaccgccggctttgcctgctctcagtgtggccagcccctgttcgtgtacaagctggagcaggtgtctgagaagggcaaggcttacaccaactacttcggacggtgcaatgtggccgagcacgaaaagctgatcctgctggcccagctgaagcccgagaaggatagcgacgaagccgtgacatatagcctgggaaagtttgggcagagggccctggatttctacagcattcatgtgaccaaggagtccacccaccccgtgaagcccctggcccagatcgccggaaacagatacgcctccggacctgtgggaaaggccctgagcgacgcatgtatgggcacaatcgcctccttcctgtctaagtaccaggacatcatcatcgaacaccagaaggtggtgaagggcaaccagaagagactggagagcctgcgggagctggccggcaaggaaaacctggaataccctagcgtgaccctgccacctcagcctcacaccaaggagggcgttgatgcctacaacgaagtgatcgcccgggtgcgaatgtgggtgaacctgaacctgtggcagaagctgaagctaagcagagatgatgccaagcctctgctgagactgaagggattcccttcctttcctctggtcgagagacaggccaacgaagtggactggtgggacatggtgtgtaacgtgaagaagctgatcaacgagaaaaaggaggatggcaaggtgttttggcagaatctggctggctacaagagacaggaagccctgagaccatacctgagcagcgaggaagatcggaagaagggaaagaaattcgctcggtaccagctgggcgacctgctgctgcacctggaaaagaagcacggcgaggactggggaaaggtgtacgacgaggcctgggagcggattgacaagaaagtggaaggcctgagcaagcacatcaagctggaagaggaacggagaagcgaggacgcccagagcaaggccgccctgaccgactggctgcgggctaaggccagcttcgtgatcgagggcctgaaggaggccgacaaggacgagttctgcagatgcgagctgaagctgcagaagtggtacggggacctgcggggaaagcccttcgccatcgaagccgagaacagcatcctggacatcagcggcttcagcaagcagtacaactgtgccttcatctggcagaaggacggcgtgaagaagctgaacctgtacctgatcatcaactacttcaagggcggcaagctgcggttcaagaagatcaaacctgaagccttcgaagccaacagattctacaccgtgatcaacaaaaagagcggcgagatcgtgcccatggaggtgaacttcaacttcgacgaccccaacctgatcatcctgcctctggcctttggcaagagacagggcagagaattcatctggaacgacctgctgtccctggaaaccggcagcctgaagctggccaacggaagagtgatcgagaagacactgtacaacagaagaacccggcaggatgagcctgccctgttcgtggccctgaccttcgagcggcgggaggtcctggactcctccaatatcaaaccaatgaacctgatcggcgtggcaagaggcgaaaacatccccgccgtgatcgccctgaccgaccccgagggctgcccactgagccggtttaaggatagcctgggaaacccaacccacatcctgagaatcggcgagagctataaggagaagcagcggaccatccaggccaagaaggaggtggagcagcggagagccggcggctacagccggaagtacgccagcaaagccaagaatctggcagacgatatggtgagaaacaccgctagagatctgctgtactacgccgtgacccaggatgccatgctgatcttcgccaacctgagccggggcttcggccggcagggcaagcggaccttcatggccgagagacagtacacacggatggaggactggctgaccgccaagctggcctacgagggcctgagcaagacctacctgtccaagacactggcccagtacacctccaagacatgcagcaactgtgggtttaccatcaccagcgccgactacgacagggtgctggagaagctgaagaagacagcaacaggctggatgaccacaattaacggcaaggagctgaaggtggagggccagattacctactacaacagatacaagagacagaacgtagtcaaggacctgtccgtcgagctggatagactgagcgaagaatctgtgaacaacgacatctcctcctggacaaagggcagaagcggagaagctctgagcctcctgaagaaaagattctcccatagacccgtgcaggagaagttcgtgtgcctgaactgcggcttcgagacacacgcagccgagcaagccgccctgaacatcgccagatcctggctgttcctgcggagccaggagtacaagaaataccagacaaacaagacaaccggcaacaccgataagagagccttcgtcgagacctggcagtccttttaccggaagaagcttaaggaggtgtggaaacctgccgtgcggtctggcggatctggcggaggctccaccagccccaagaaaaagagaaaagtctaagctgccttctgcggggcttgccttctggccatgcccttcttctctcccttgcacctgtacctcttggtctttgaataaagcctgagtaggaaggctagcaaaaaaaaaaaaaaaaaaaaaaaaaaaaaaaaaaaaaaaaaaaaaaaaaaaaaaaaaaaaaaaaaaaaaaaaaaaaaaaa

SEQ ID NO: 12998 - RNA, 5794 nt, synthetic construct
  source 1..5794: mol_type = other RNA
aggaaataagagagaaaagaagagtaagaagaaatataagagccaccatggcccctaagaagaagcgtaaagtgagccggatggaacgcctcgtctacgaggtgcggcagaagtgcagaaacatcgaggacatctgcatctcctgcggatctctgaacgtgaccctggagcacccactgttcatcggcggcatgtgccagaactgtaaaaactgttttctggagtgtgcctatcaatacgacgatgacggctaccagagctactgcaccatctgttgcggcggaagagaggtgctgatgtgtggaaataacaactgctgccggtgcttctgcgtggaatgcgtggacctgctggtgggccccggcgccgcccaggccgctattaaggaagatccttggaactgctacatgtgcggccacaagggcacatacggcctgctgagacggagagaggactggcctagcagactgcagatgttcttcgccaataaccacgaccaggagttcgacccccctaaggtgtaccctcccgtccccgccgagaagagaaagcccatccgggtcctgagcctgttcgatggcatcgccaccggtctgctggtgctgaaggacctgggcatccaggtggataggtacattgcctccgaggtgtgcgaggactccatcaccgtgggaatggtgcgtcatcagggcaagatcatgtacgtgggcgacgtgcggagcgtgacacagaagcatatccaggagtggggccctttcgacctggtgatcggcggcagcccttgcaatgacctgagcatcgtgaacccagcccggaagggcctgtacgagggaaccggcagactgttcttcgagttttacagactgctgcacgacgcccggcctaaggaaggcgacgaccggcccttcttttggctgttcgagaatgtggtggccatgggagtcagcgacaagcgggatattagccggttcctggagagcaaccccgtgatgatcgatgccaaggaagtgagcgccgcccaccgggccagatacttctggggcaatctgcctggcatgaacagacccctggccagcaccgtgaacgacaagctggagctgcaggagtgcctggagcacggccggatcgccaagttcagcaaggtgagaaccatcaccacccgaagcaacagcatcaaacaaggcaaggaccagcactttcctgtgttcatgaacgagaaggaggacatcctgtggtgtaccgagatggagagagtgttcgggttcccagtccactacacagatgtcagcaacatgtctagactggccagacagagactgctgggaagaagctggtccgtccctgtgatcagacacctgttcgcccctctgaaggagtacttcgcctgcgtgagcagcggcaacagcaacgccaacagccggggccccagcttctctagcggcctggtgccactgtccctgagagggagccacatgggccccatggagatctacaaaaccgtgagcgcctggaagcggcagcctgtgcgcgtgctgagcctgtttcggaatatcgataaagtcctgaaaagcctgggattcctggagagcggctctggctccggcggtggcaccctgaagtacgtggaggatgtgacaaacgtggtcagacgggatgtggagaagtggggccccttcgatctggtgtacggcagcacccaacccctgggcagctcttgtgaccggtgccctggctggtacatgtttcagttccaccggatcctgcagtacgccctgccgagacaggagtcccagcggccattcttttggattttcatggacaacttgctgctgaccgaggatgaccaggaaactaccactcggttcctgcagaccgaagccgtgaccctgcaggacgtgagaggccgggactaccagaacgccatgcgggtgtggtccaacatccctggactgaaaagcaagcacgcacctctgacccctaaagaagaggagtacctgcaggcccaggtgcggagcagaagcaagctggacgcccctaaggtggatctgctggtgaagaattgcctcctgcccctgagagagtacttcaagtatttcagccagaatagtctgcccctgggaggcagcggcggcggcctgaccttcgaggacgtggccgtgtacttcagcgaggaggagtggcagctgctgaaccccctggagaagaccctgtacaacgacgtgatgcaggacatctacgagaccgtgatcagcctgggcctgaagctgaagaacgacaccggcaacgaccaccccatcagcgtgagcaccagcgagatccagaccagcggctgcgaggtgagcaagaagaccaggatgaagatcgcccagaagaccatgggcagggagggcggcccaagcagcggcgcccctcctcccagcggcggcagcccagccggctccccaacctctaccgaggagggcacctctgagtccgccacccccgagagcggccctggcacctccaccgagcccagcgagggcagcgcacccggcagccctgccggcagccccacctccacagaggagggaaccagcaccgagcccagcgaaggcagcgccccaggcaccagcaccgagcctagtgagcaggagattaaacggatcaacaagatcagaagaagacttgtgaaagacagcaacaccaagaaggccggcaagacaggccccatgaaaaccctgctggttagagtgatgacacccgatctgagagagcggctggaaaacctgagaaagaagcctgaaaatatcccccagcccatcagcaatacatctagagccaacctgaataagctgctgaccgattacaccgaaatgaagaaggcgatcctgcatgtgtactgggaagagttccagaaggaccctgtgggcctgatgagccgggtggcccagcctgccagcaagaagatcgatcagaacaagctgaaacctgagatggacgagaagggcaacctgaccaccgccggctttgcctgctctcagtgtggccagcccctgttcgtgtacaagctggagcaggtgtctgagaagggcaaggcttacaccaactacttcggacggtgcaatgtggccgagcacgaaaagctgatcctgctggcccagctgaagcccgagaaggatagcgacgaagccgtgacatatagcctgggaaagtttgggcagagggccctggatttctacagcattcatgtgaccaaggagtccacccaccccgtgaagcccctggcccagatcgccggaaacagatacgcctccggacctgtgggaaaggccctgagcgacgcatgtatgggcacaatcgcctccttcctgtctaagtaccaggacatcatcatcgaacaccagaaggtggtgaagggcaaccagaagagactggagagcctgcgggagctggccggcaaggaaaacctggaataccctagcgtgaccctgccacctcagcctcacaccaaggagggcgttgatgcctacaacgaagtgatcgcccgggtgcgaatgtgggtgaacctgaacctgtggcagaagctgaagctaagcagagatgatgccaagcctctgctgagactgaagggattcccttcctttcctctggtcgagagacaggccaacgaagtggactggtgggacatggtgtgtaacgtgaagaagctgatcaacgagaaaaaggaggatggcaaggtgttttggcagaatctggctggctacaagagacaggaagccctgagaccatacctgagcagcgaggaagatcggaagaagggaaagaaattcgctcggtaccagctgggcgacctgctgctgcacctggaaaagaagcacggcgaggactggggaaaggtgtacgacgaggcctgggagcggattgacaagaaagtggaaggcctgagcaagcacatcaagctggaagaggaacggagaagcgaggacgcccagagcaaggccgccctgaccgactggctgcgggctaaggccagcttcgtgatcgagggcctgaaggaggccgacaaggacgagttctgcagatgcgagctgaagctgcagaagtggtacggggacctgcggggaaagcccttcgccatcgaagccgagaacagcatcctggacatcagcggcttcagcaagcagtacaactgtgccttcatctggcagaaggacggcgtgaagaagctgaacctgtacctgatcatcaactacttcaagggcggcaagctgcggttcaagaagatcaaacctgaagccttcgaagccaacagattctacaccgtgatcaacaaaaagagcggcgagatcgtgcccatggaggtgaacttcaacttcgacgaccccaacctgatcatcctgcctctggcctttggcaagagacagggcagagaattcatctggaacgacctgctgtccctggaaaccggcagcctgaagctggccaacggaagagtgatcgagaagacactgtacaacagaagaacccggcaggatgagcctgccctgttcgtggccctgaccttcgagcggcgggaggtcctggactcctccaatatcaaaccaatgaacctgatcggcgtggcaagaggcgaaaacatccccgccgtgatcgccctgaccgaccccgagggctgcccactgagccggtttaaggatagcctgggaaacccaacccacatcctgagaatcggcgagagctataaggagaagcagcggaccatccaggccaagaaggaggtggagcagcggagagccggcggctacagccggaagtacgccagcaaagccaagaatctggcagacgatatggtgagaaacaccgctagagatctgctgtactacgccgtgacccaggatgccatgctgatcttcgccaacctgagccggggcttcggccggcagggcaagcggaccttcatggccgagagacagtacacacggatggaggactggctgaccgccaagctggcctacgagggcctgagcaagacctacctgtccaagacactggcccagtacacctccaagacatgcagcaactgtgggtttaccatcaccagcgccgactacgacagggtgctggagaagctgaagaagacagcaacaggctggatgaccacaattaacggcaaggagctgaaggtggagggccagattacctactacaacagatacaagagacagaacgtagtcaaggacctgtccgtcgagctggatagactgagcgaagaatctgtgaacaacgacatctcctcctggacaaagggcagaagcggagaagctctgagcctcctgaagaaaagattctcccatagacccgtgcaggagaagttcgtgtgcctgaactgcggcttcgagacacacgcagccgagcaagccgccctgaacatcgccagatcctggctgttcctgcggagccaggagtacaagaaataccagacaaacaagacaaccggcaacaccgataagagagccttcgtcgagacctggcagtccttttaccggaagaagcttaaggaggtgtggaaacctgccgtgcggtctggcggatctggcggaggctccaccagccccaagaaaaagagaaaagtctaagctgccttctgcggggcttgccttctggccatgcccttcttctctcccttgcacctgtacctcttggtctttgaataaagcctgagtaggaaggctagcaaaaaaaaaaaaaaaaaaaaaaaaaaaaaaaaaaaaaaaaaaaaaaaaaaaaaaaaaaaaaaaaaaaaaaaaaaaaaaaa

SEQ ID NO: 12999 - RNA, 5785 nt, synthetic construct
  source 1..5785: mol_type = other RNA
aggaaataagagagaaaagaagagtaagaagaaatataagagccaccatggcccctaagaagaagcgtaaagtgagccggatggaacgcctcgtctacgaggtgcggcagaagtgcagaaacatcgaggacatctgcatctcctgcggatctctgaacgtgaccctggagcacccactgttcatcggcggcatgtgccagaactgtaaaaactgttttctggagtgtgcctatcaatacgacgatgacggctaccagagctactgcaccatctgttgcggcggaagagaggtgctgatgtgtggaaataacaactgctgccggtgcttctgcgtggaatgcgtggacctgctggtgggccccggcgccgcccaggccgctattaaggaagatccttggaactgctacatgtgcggccacaagggcacatacggcctgctgagacggagagaggactggcctagcagactgcagatgttcttcgccaataaccacgaccaggagttcgacccccctaaggtgtaccctcccgtccccgccgagaagagaaagcccatccgggtcctgagcctgttcgatggcatcgccaccggtctgctggtgctgaaggacctgggcatccaggtggataggtacattgcctccgaggtgtgcgaggactccatcaccgtgggaatggtgcgtcatcagggcaagatcatgtacgtgggcgacgtgcggagcgtgacacagaagcatatccaggagtggggccctttcgacctggtgatcggcggcagcccttgcaatgacctgagcatcgtgaacccagcccggaagggcctgtacgagggaaccggcagactgttcttcgagttttacagactgctgcacgacgcccggcctaaggaaggcgacgaccggcccttcttttggctgttcgagaatgtggtggccatgggagtcagcgacaagcgggatattagccggttcctggagagcaaccccgtgatgatcgatgccaaggaagtgagcgccgcccaccgggccagatacttctggggcaatctgcctggcatgaacagacccctggccagcaccgtgaacgacaagctggagctgcaggagtgcctggagcacggccggatcgccaagttcagcaaggtgagaaccatcaccacccgaagcaacagcatcaaacaaggcaaggaccagcactttcctgtgttcatgaacgagaaggaggacatcctgtggtgtaccgagatggagagagtgttcgggttcccagtccactacacagatgtcagcaacatgtctagactggccagacagagactgctgggaagaagctggtccgtccctgtgatcagacacctgttcgcccctctgaaggagtacttcgcctgcgtgagcagcggcaacagcaacgccaacagccggggccccagcttctctagcggcctggtgccactgtccctgagagggagccacatgggccccatggagatctacaaaaccgtgagcgcctggaagcggcagcctgtgcgcgtgctgagcctgtttcggaatatcgataaagtcctgaaaagcctgggattcctggagagcggctctggctccggcggtggcaccctgaagtacgtggaggatgtgacaaacgtggtcagacgggatgtggagaagtggggccccttcgatctggtgtacggcagcacccaacccctgggcagctcttgtgaccggtgccctggctggtacatgtttcagttccaccggatcctgcagtacgccctgccgagacaggagtcccagcggccattcttttggattttcatggacaacttgctgctgaccgaggatgaccaggaaactaccactcggttcctgcagaccgaagccgtgaccctgcaggacgtgagaggccgggactaccagaacgccatgcgggtgtggtccaacatccctggactgaaaagcaagcacgcacctctgacccctaaagaagaggagtacctgcaggcccaggtgcggagcagaagcaagctggacgcccctaaggtggatctgctggtgaagaattgcctcctgcccctgagagagtacttcaagtatttcagccagaatagtctgcccctgggaggcagcggcggcggccccaggctgcccctgaccttcgaggacgtggccatctacttcagcgagcaggagtggcaggacctggaggcctggcagaaggagctgtacaagcacgtgatgaggagcaactacgagaccctggtgagcctggacgacggcctgcccaagcccgagctgatcagctggatcgagcacggcggcgagcccttcaggaactggagggagagccagaagagcaggaacatcatctgcagcagcagcggcggcccaagcagcggcgcccctcctcccagcggcggcagcccagccggctccccaacctctaccgaggagggcacctctgagtccgccacccccgagagcggccctggcacctccaccgagcccagcgagggcagcgcacccggcagccctgccggcagccccacctccacagaggagggaaccagcaccgagcccagcgaaggcagcgccccaggcaccagcaccgagcctagtgagcaggagattaaacggatcaacaagatcagaagaagacttgtgaaagacagcaacaccaagaaggccggcaagacaggccccatgaaaaccctgctggttagagtgatgacacccgatctgagagagcggctggaaaacctgagaaagaagcctgaaaatatcccccagcccatcagcaatacatctagagccaacctgaataagctgctgaccgattacaccgaaatgaagaaggcgatcctgcatgtgtactgggaagagttccagaaggaccctgtgggcctgatgagccgggtggcccagcctgccagcaagaagatcgatcagaacaagctgaaacctgagatggacgagaagggcaacctgaccaccgccggctttgcctgctctcagtgtggccagcccctgttcgtgtacaagctggagcaggtgtctgagaagggcaaggcttacaccaactacttcggacggtgcaatgtggccgagcacgaaaagctgatcctgctggcccagctgaagcccgagaaggatagcgacgaagccgtgacatatagcctgggaaagtttgggcagagggccctggatttctacagcattcatgtgaccaaggagtccacccaccccgtgaagcccctggcccagatcgccggaaacagatacgcctccggacctgtgggaaaggccctgagcgacgcatgtatgggcacaatcgcctccttcctgtctaagtaccaggacatcatcatcgaacaccagaaggtggtgaagggcaaccagaagagactggagagcctgcgggagctggccggcaaggaaaacctggaataccctagcgtgaccctgccacctcagcctcacaccaaggagggcgttgatgcctacaacgaagtgatcgcccgggtgcgaatgtgggtgaacctgaacctgtggcagaagctgaagctaagcagagatgatgccaagcctctgctgagactgaagggattcccttcctttcctctggtcgagagacaggccaacgaagtggactggtgggacatggtgtgtaacgtgaagaagctgatcaacgagaaaaaggaggatggcaaggtgttttggcagaatctggctggctacaagagacaggaagccctgagaccatacctgagcagcgaggaagatcggaagaagggaaagaaattcgctcggtaccagctgggcgacctgctgctgcacctggaaaagaagcacggcgaggactggggaaaggtgtacgacgaggcctgggagcggattgacaagaaagtggaaggcctgagcaagcacatcaagctggaagaggaacggagaagcgaggacgcccagagcaaggccgccctgaccgactggctgcgggctaaggccagcttcgtgatcgagggcctgaaggaggccgacaaggacgagttctgcagatgcgagctgaagctgcagaagtggtacggggacctgcggggaaagcccttcgccatcgaagccgagaacagcatcctggacatcagcggcttcagcaagcagtacaactgtgccttcatctggcagaaggacggcgtgaagaagctgaacctgtacctgatcatcaactacttcaagggcggcaagctgcggttcaagaagatcaaacctgaagccttcgaagccaacagattctacaccgtgatcaacaaaaagagcggcgagatcgtgcccatggaggtgaacttcaacttcgacgaccccaacctgatcatcctgcctctggcctttggcaagagacagggcagagaattcatctggaacgacctgctgtccctggaaaccggcagcctgaagctggccaacggaagagtgatcgagaagacactgtacaacagaagaacccggcaggatgagcctgccctgttcgtggccctgaccttcgagcggcgggaggtcctggactcctccaatatcaaaccaatgaacctgatcggcgtggcaagaggcgaaaacatccccgccgtgatcgccctgaccgaccccgagggctgcccactgagccggtttaaggatagcctgggaaacccaacccacatcctgagaatcggcgagagctataaggagaagcagcggaccatccaggccaagaaggaggtggagcagcggagagccggcggctacagccggaagtacgccagcaaagccaagaatctggcagacgatatggtgagaaacaccgctagagatctgctgtactacgccgtgacccaggatgccatgctgatcttcgccaacctgagccggggcttcggccggcagggcaagcggaccttcatggccgagagacagtacacacggatggaggactggctgaccgccaagctggcctacgagggcctgagcaagacctacctgtccaagacactggcccagtacacctccaagacatgcagcaactgtgggtttaccatcaccagcgccgactacgacagggtgctggagaagctgaagaagacagcaacaggctggatgaccacaattaacggcaaggagctgaaggtggagggccagattacctactacaacagatacaagagacagaacgtagtcaaggacctgtccgtcgagctggatagactgagcgaagaatctgtgaacaacgacatctcctcctggacaaagggcagaagcggagaagctctgagcctcctgaagaaaagattctcccatagacccgtgcaggagaagttcgtgtgcctgaactgcggcttcgagacacacgcagccgagcaagccgccctgaacatcgccagatcctggctgttcctgcggagccaggagtacaagaaataccagacaaacaagacaaccggcaacaccgataagagagccttcgtcgagacctggcagtccttttaccggaagaagcttaaggaggtgtggaaacctgccgtgcggtctggcggatctggcggaggctccaccagccccaagaaaaagagaaaagtctaagctgccttctgcggggcttgccttctggccatgcccttcttctctcccttgcacctgtacctcttggtctttgaataaagcctgagtaggaaggctagcaaaaaaaaaaaaaaaaaaaaaaaaaaaaaaaaaaaaaaaaaaaaaaaaaaaaaaaaaaaaaaaaaaaaaaaaaaaaaaaa

SEQ ID NO: 13000 - RNA, 5785 nt, synthetic construct
  source 1..5785: mol_type = other RNA
aggaaataagagagaaaagaagagtaagaagaaatataagagccaccatggcccctaagaagaagcgtaaagtgagccggatggaacgcctcgtctacgaggtgcggcagaagtgcagaaacatcgaggacatctgcatctcctgcggatctctgaacgtgaccctggagcacccactgttcatcggcggcatgtgccagaactgtaaaaactgttttctggagtgtgcctatcaatacgacgatgacggctaccagagctactgcaccatctgttgcggcggaagagaggtgctgatgtgtggaaataacaactgctgccggtgcttctgcgtggaatgcgtggacctgctggtgggccccggcgccgcccaggccgctattaaggaagatccttggaactgctacatgtgcggccacaagggcacatacggcctgctgagacggagagaggactggcctagcagactgcagatgttcttcgccaataaccacgaccaggagttcgacccccctaaggtgtaccctcccgtccccgccgagaagagaaagcccatccgggtcctgagcctgttcgatggcatcgccaccggtctgctggtgctgaaggacctgggcatccaggtggataggtacattgcctccgaggtgtgcgaggactccatcaccgtgggaatggtgcgtcatcagggcaagatcatgtacgtgggcgacgtgcggagcgtgacacagaagcatatccaggagtggggccctttcgacctggtgatcggcggcagcccttgcaatgacctgagcatcgtgaacccagcccggaagggcctgtacgagggaaccggcagactgttcttcgagttttacagactgctgcacgacgcccggcctaaggaaggcgacgaccggcccttcttttggctgttcgagaatgtggtggccatgggagtcagcgacaagcgggatattagccggttcctggagagcaaccccgtgatgatcgatgccaaggaagtgagcgccgcccaccgggccagatacttctggggcaatctgcctggcatgaacagacccctggccagcaccgtgaacgacaagctggagctgcaggagtgcctggagcacggccggatcgccaagttcagcaaggtgagaaccatcaccacccgaagcaacagcatcaaacaaggcaaggaccagcactttcctgtgttcatgaacgagaaggaggacatcctgtggtgtaccgagatggagagagtgttcgggttcccagtccactacacagatgtcagcaacatgtctagactggccagacagagactgctgggaagaagctggtccgtccctgtgatcagacacctgttcgcccctctgaaggagtacttcgcctgcgtgagcagcggcaacagcaacgccaacagccggggccccagcttctctagcggcctggtgccactgtccctgagagggagccacatgggccccatggagatctacaaaaccgtgagcgcctggaagcggcagcctgtgcgcgtgctgagcctgtttcggaatatcgataaagtcctgaaaagcctgggattcctggagagcggctctggctccggcggtggcaccctgaagtacgtggaggatgtgacaaacgtggtcagacgggatgtggagaagtggggccccttcgatctggtgtacggcagcacccaacccctgggcagctcttgtgaccggtgccctggctggtacatgtttcagttccaccggatcctgcagtacgccctgccgagacaggagtcccagcggccattcttttggattttcatggacaacttgctgctgaccgaggatgaccaggaaactaccactcggttcctgcagaccgaagccgtgaccctgcaggacgtgagaggccgggactaccagaacgccatgcgggtgtggtccaacatccctggactgaaaagcaagcacgcacctctgacccctaaagaagaggagtacctgcaggcccaggtgcggagcagaagcaagctggacgcccctaaggtggatctgctggtgaagaattgcctcctgcccctgagagagtacttcaagtatttcagccagaatagtctgcccctgggaggcagcggcggcggcatgagccagggcagcgtgaccttcagggacgtggccatcgacttcagccaggaggagtggaagtggctgcagcccgcccagagggacctgtacaggtgcgtgatgctggagaactacggccacctggtgagcctgggcctgagcatcagcaagcccgacgtggtgagcctgctggagcagggcaaggagccctggctgggcaagagggacgtgaagagggacctgttccccgtgagcgagagcggcggcccaagcagcggcgcccctcctcccagcggcggcagcccagccggctccccaacctctaccgaggagggcacctctgagtccgccacccccgagagcggccctggcacctccaccgagcccagcgagggcagcgcacccggcagccctgccggcagccccacctccacagaggagggaaccagcaccgagcccagcgaaggcagcgccccaggcaccagcaccgagcctagtgagcaggagattaaacggatcaacaagatcagaagaagacttgtgaaagacagcaacaccaagaaggccggcaagacaggccccatgaaaaccctgctggttagagtgatgacacccgatctgagagagcggctggaaaacctgagaaagaagcctgaaaatatcccccagcccatcagcaatacatctagagccaacctgaataagctgctgaccgattacaccgaaatgaagaaggcgatcctgcatgtgtactgggaagagttccagaaggaccctgtgggcctgatgagccgggtggcccagcctgccagcaagaagatcgatcagaacaagctgaaacctgagatggacgagaagggcaacctgaccaccgccggctttgcctgctctcagtgtggccagcccctgttcgtgtacaagctggagcaggtgtctgagaagggcaaggcttacaccaactacttcggacggtgcaatgtggccgagcacgaaaagctgatcctgctggcccagctgaagcccgagaaggatagcgacgaagccgtgacatatagcctgggaaagtttgggcagagggccctggatttctacagcattcatgtgaccaaggagtccacccaccccgtgaagcccctggcccagatcgccggaaacagatacgcctccggacctgtgggaaaggccctgagcgacgcatgtatgggcacaatcgcctccttcctgtctaagtaccaggacatcatcatcgaacaccagaaggtggtgaagggcaaccagaagagactggagagcctgcgggagctggccggcaaggaaaacctggaataccctagcgtgaccctgccacctcagcctcacaccaaggagggcgttgatgcctacaacgaagtgatcgcccgggtgcgaatgtgggtgaacctgaacctgtggcagaagctgaagctaagcagagatgatgccaagcctctgctgagactgaagggattcccttcctttcctctggtcgagagacaggccaacgaagtggactggtgggacatggtgtgtaacgtgaagaagctgatcaacgagaaaaaggaggatggcaaggtgttttggcagaatctggctggctacaagagacaggaagccctgagaccatacctgagcagcgaggaagatcggaagaagggaaagaaattcgctcggtaccagctgggcgacctgctgctgcacctggaaaagaagcacggcgaggactggggaaaggtgtacgacgaggcctgggagcggattgacaagaaagtggaaggcctgagcaagcacatcaagctggaagaggaacggagaagcgaggacgcccagagcaaggccgccctgaccgactggctgcgggctaaggccagcttcgtgatcgagggcctgaaggaggccgacaaggacgagttctgcagatgcgagctgaagctgcagaagtggtacggggacctgcggggaaagcccttcgccatcgaagccgagaacagcatcctggacatcagcggcttcagcaagcagtacaactgtgccttcatctggcagaaggacggcgtgaagaagctgaacctgtacctgatcatcaactacttcaagggcggcaagctgcggttcaagaagatcaaacctgaagccttcgaagccaacagattctacaccgtgatcaacaaaaagagcggcgagatcgtgcccatggaggtgaacttcaacttcgacgaccccaacctgatcatcctgcctctggcctttggcaagagacagggcagagaattcatctggaacgacctgctgtccctggaaaccggcagcctgaagctggccaacggaagagtgatcgagaagacactgtacaacagaagaacccggcaggatgagcctgccctgttcgtggccctgaccttcgagcggcgggaggtcctggactcctccaatatcaaaccaatgaacctgatcggcgtggcaagaggcgaaaacatccccgccgtgatcgccctgaccgaccccgagggctgcccactgagccggtttaaggatagcctgggaaacccaacccacatcctgagaatcggcgagagctataaggagaagcagcggaccatccaggccaagaaggaggtggagcagcggagagccggcggctacagccggaagtacgccagcaaagccaagaatctggcagacgatatggtgagaaacaccgctagagatctgctgtactacgccgtgacccaggatgccatgctgatcttcgccaacctgagccggggcttcggccggcagggcaagcggaccttcatggccgagagacagtacacacggatggaggactggctgaccgccaagctggcctacgagggcctgagcaagacctacctgtccaagacactggcccagtacacctccaagacatgcagcaactgtgggtttaccatcaccagcgccgactacgacagggtgctggagaagctgaagaagacagcaacaggctggatgaccacaattaacggcaaggagctgaaggtggagggccagattacctactacaacagatacaagagacagaacgtagtcaaggacctgtccgtcgagctggatagactgagcgaagaatctgtgaacaacgacatctcctcctggacaaagggcagaagcggagaagctctgagcctcctgaagaaaagattctcccatagacccgtgcaggagaagttcgtgtgcctgaactgcggcttcgagacacacgcagccgagcaagccgccctgaacatcgccagatcctggctgttcctgcggagccaggagtacaagaaataccagacaaacaagacaaccggcaacaccgataagagagccttcgtcgagacctggcagtccttttaccggaagaagcttaaggaggtgtggaaacctgccgtgcggtctggcggatctggcggaggctccaccagccccaagaaaaagagaaaagtctaagctgccttctgcggggcttgccttctggccatgcccttcttctctcccttgcacctgtacctcttggtctttgaataaagcctgagtaggaaggctagcaaaaaaaaaaaaaaaaaaaaaaaaaaaaaaaaaaaaaaaaaaaaaaaaaaaaaaaaaaaaaaaaaaaaaaaaaaaaaaaa

SEQ ID NO: 13001 - RNA, 5785 nt, synthetic construct
  source 1..5785: mol_type = other RNA
aggaaataagagagaaaagaagagtaagaagaaatataagagccaccatggcccctaagaagaagcgtaaagtgagccggatggaacgcctcgtctacgaggtgcggcagaagtgcagaaacatcgaggacatctgcatctcctgcggatctctgaacgtgaccctggagcacccactgttcatcggcggcatgtgccagaactgtaaaaactgttttctggagtgtgcctatcaatacgacgatgacggctaccagagctactgcaccatctgttgcggcggaagagaggtgctgatgtgtggaaataacaactgctgccggtgcttctgcgtggaatgcgtggacctgctggtgggccccggcgccgcccaggccgctattaaggaagatccttggaactgctacatgtgcggccacaagggcacatacggcctgctgagacggagagaggactggcctagcagactgcagatgttcttcgccaataaccacgaccaggagttcgacccccctaaggtgtaccctcccgtccccgccgagaagagaaagcccatccgggtcctgagcctgttcgatggcatcgccaccggtctgctggtgctgaaggacctgggcatccaggtggataggtacattgcctccgaggtgtgcgaggactccatcaccgtgggaatggtgcgtcatcagggcaagatcatgtacgtgggcgacgtgcggagcgtgacacagaagcatatccaggagtggggccctttcgacctggtgatcggcggcagcccttgcaatgacctgagcatcgtgaacccagcccggaagggcctgtacgagggaaccggcagactgttcttcgagttttacagactgctgcacgacgcccggcctaaggaaggcgacgaccggcccttcttttggctgttcgagaatgtggtggccatgggagtcagcgacaagcgggatattagccggttcctggagagcaaccccgtgatgatcgatgccaaggaagtgagcgccgcccaccgggccagatacttctggggcaatctgcctggcatgaacagacccctggccagcaccgtgaacgacaagctggagctgcaggagtgcctggagcacggccggatcgccaagttcagcaaggtgagaaccatcaccacccgaagcaacagcatcaaacaaggcaaggaccagcactttcctgtgttcatgaacgagaaggaggacatcctgtggtgtaccgagatggagagagtgttcgggttcccagtccactacacagatgtcagcaacatgtctagactggccagacagagactgctgggaagaagctggtccgtccctgtgatcagacacctgttcgcccctctgaaggagtacttcgcctgcgtgagcagcggcaacagcaacgccaacagccggggccccagcttctctagcggcctggtgccactgtccctgagagggagccacatgggccccatggagatctacaaaaccgtgagcgcctggaagcggcagcctgtgcgcgtgctgagcctgtttcggaatatcgataaagtcctgaaaagcctgggattcctggagagcggctctggctccggcggtggcaccctgaagtacgtggaggatgtgacaaacgtggtcagacgggatgtggagaagtggggccccttcgatctggtgtacggcagcacccaacccctgggcagctcttgtgaccggtgccctggctggtacatgtttcagttccaccggatcctgcagtacgccctgccgagacaggagtcccagcggccattcttttggattttcatggacaacttgctgctgaccgaggatgaccaggaaactaccactcggttcctgcagaccgaagccgtgaccctgcaggacgtgagaggccgggactaccagaacgccatgcgggtgtggtccaacatccctggactgaaaagcaagcacgcacctctgacccctaaagaagaggagtacctgcaggcccaggtgcggagcagaagcaagctggacgcccctaaggtggatctgctggtgaagaattgcctcctgcccctgagagagtacttcaagtatttcagccagaatagtctgcccctgggaggcagcggcggcggcgtggccttcgaggacgtggccgtgaacttcacccaggaggagtgggccctgctggaccccagccagaagaacctgtacagggaggtgatgcaggagaccctgaggaacctggccagcatcggccagaggtggagcaaccagaacgccgaggacaagcaccagaaccccaggaggaacctgaggaggctgatcggcgagaggctgttccagagcaaggagagccaccagcacgtggaggtgctgggcggcccaagcagcggcgcccctcctcccagcggcggcagcccagccggctccccaacctctaccgaggagggcacctctgagtccgccacccccgagagcggccctggcacctccaccgagcccagcgagggcagcgcacccggcagccctgccggcagccccacctccacagaggagggaaccagcaccgagcccagcgaaggcagcgccccaggcaccagcaccgagcctagtgagcaggagattaaacggatcaacaagatcagaagaagacttgtgaaagacagcaacaccaagaaggccggcaagacaggccccatgaaaaccctgctggttagagtgatgacacccgatctgagagagcggctggaaaacctgagaaagaagcctgaaaatatcccccagcccatcagcaatacatctagagccaacctgaataagctgctgaccgattacaccgaaatgaagaaggcgatcctgcatgtgtactgggaagagttccagaaggaccctgtgggcctgatgagccgggtggcccagcctgccagcaagaagatcgatcagaacaagctgaaacctgagatggacgagaagggcaacctgaccaccgccggctttgcctgctctcagtgtggccagcccctgttcgtgtacaagctggagcaggtgtctgagaagggcaaggcttacaccaactacttcggacggtgcaatgtggccgagcacgaaaagctgatcctgctggcccagctgaagcccgagaaggatagcgacgaagccgtgacatatagcctgggaaagtttgggcagagggccctggatttctacagcattcatgtgaccaaggagtccacccaccccgtgaagcccctggcccagatcgccggaaacagatacgcctccggacctgtgggaaaggccctgagcgacgcatgtatgggcacaatcgcctccttcctgtctaagtaccaggacatcatcatcgaacaccagaaggtggtgaagggcaaccagaagagactggagagcctgcgggagctggccggcaaggaaaacctggaataccctagcgtgaccctgccacctcagcctcacaccaaggagggcgttgatgcctacaacgaagtgatcgcccgggtgcgaatgtgggtgaacctgaacctgtggcagaagctgaagctaagcagagatgatgccaagcctctgctgagactgaagggattcccttcctttcctctggtcgagagacaggccaacgaagtggactggtgggacatggtgtgtaacgtgaagaagctgatcaacgagaaaaaggaggatggcaaggtgttttggcagaatctggctggctacaagagacaggaagccctgagaccatacctgagcagcgaggaagatcggaagaagggaaagaaattcgctcggtaccagctgggcgacctgctgctgcacctggaaaagaagcacggcgaggactggggaaaggtgtacgacgaggcctgggagcggattgacaagaaagtggaaggcctgagcaagcacatcaagctggaagaggaacggagaagcgaggacgcccagagcaaggccgccctgaccgactggctgcgggctaaggccagcttcgtgatcgagggcctgaaggaggccgacaaggacgagttctgcagatgcgagctgaagctgcagaagtggtacggggacctgcggggaaagcccttcgccatcgaagccgagaacagcatcctggacatcagcggcttcagcaagcagtacaactgtgccttcatctggcagaaggacggcgtgaagaagctgaacctgtacctgatcatcaactacttcaagggcggcaagctgcggttcaagaagatcaaacctgaagccttcgaagccaacagattctacaccgtgatcaacaaaaagagcggcgagatcgtgcccatggaggtgaacttcaacttcgacgaccccaacctgatcatcctgcctctggcctttggcaagagacagggcagagaattcatctggaacgacctgctgtccctggaaaccggcagcctgaagctggccaacggaagagtgatcgagaagacactgtacaacagaagaacccggcaggatgagcctgccctgttcgtggccctgaccttcgagcggcgggaggtcctggactcctccaatatcaaaccaatgaacctgatcggcgtggcaagaggcgaaaacatccccgccgtgatcgccctgaccgaccccgagggctgcccactgagccggtttaaggatagcctgggaaacccaacccacatcctgagaatcggcgagagctataaggagaagcagcggaccatccaggccaagaaggaggtggagcagcggagagccggcggctacagccggaagtacgccagcaaagccaagaatctggcagacgatatggtgagaaacaccgctagagatctgctgtactacgccgtgacccaggatgccatgctgatcttcgccaacctgagccggggcttcggccggcagggcaagcggaccttcatggccgagagacagtacacacggatggaggactggctgaccgccaagctggcctacgagggcctgagcaagacctacctgtccaagacactggcccagtacacctccaagacatgcagcaactgtgggtttaccatcaccagcgccgactacgacagggtgctggagaagctgaagaagacagcaacaggctggatgaccacaattaacggcaaggagctgaaggtggagggccagattacctactacaacagatacaagagacagaacgtagtcaaggacctgtccgtcgagctggatagactgagcgaagaatctgtgaacaacgacatctcctcctggacaaagggcagaagcggagaagctctgagcctcctgaagaaaagattctcccatagacccgtgcaggagaagttcgtgtgcctgaactgcggcttcgagacacacgcagccgagcaagccgccctgaacatcgccagatcctggctgttcctgcggagccaggagtacaagaaataccagacaaacaagacaaccggcaacaccgataagagagccttcgtcgagacctggcagtccttttaccggaagaagcttaaggaggtgtggaaacctgccgtgcggtctggcggatctggcggaggctccaccagccccaagaaaaagagaaaagtctaagctgccttctgcggggcttgccttctggccatgcccttcttctctcccttgcacctgtacctcttggtctttgaataaagcctgagtaggaaggctagcaaaaaaaaaaaaaaaaaaaaaaaaaaaaaaaaaaaaaaaaaaaaaaaaaaaaaaaaaaaaaaaaaaaaaaaaaaaaaaaa

SEQ ID NO: 13002 - RNA, 5785 nt, synthetic construct
  source 1..5785: mol_type = other RNA
aggaaataagagagaaaagaagagtaagaagaaatataagagccaccatggcccctaagaagaagcgtaaagtgagccggatggaacgcctcgtctacgaggtgcggcagaagtgcagaaacatcgaggacatctgcatctcctgcggatctctgaacgtgaccctggagcacccactgttcatcggcggcatgtgccagaactgtaaaaactgttttctggagtgtgcctatcaatacgacgatgacggctaccagagctactgcaccatctgttgcggcggaagagaggtgctgatgtgtggaaataacaactgctgccggtgcttctgcgtggaatgcgtggacctgctggtgggccccggcgccgcccaggccgctattaaggaagatccttggaactgctacatgtgcggccacaagggcacatacggcctgctgagacggagagaggactggcctagcagactgcagatgttcttcgccaataaccacgaccaggagttcgacccccctaaggtgtaccctcccgtccccgccgagaagagaaagcccatccgggtcctgagcctgttcgatggcatcgccaccggtctgctggtgctgaaggacctgggcatccaggtggataggtacattgcctccgaggtgtgcgaggactccatcaccgtgggaatggtgcgtcatcagggcaagatcatgtacgtgggcgacgtgcggagcgtgacacagaagcatatccaggagtggggccctttcgacctggtgatcggcggcagcccttgcaatgacctgagcatcgtgaacccagcccggaagggcctgtacgagggaaccggcagactgttcttcgagttttacagactgctgcacgacgcccggcctaaggaaggcgacgaccggcccttcttttggctgttcgagaatgtggtggccatgggagtcagcgacaagcgggatattagccggttcctggagagcaaccccgtgatgatcgatgccaaggaagtgagcgccgcccaccgggccagatacttctggggcaatctgcctggcatgaacagacccctggccagcaccgtgaacgacaagctggagctgcaggagtgcctggagcacggccggatcgccaagttcagcaaggtgagaaccatcaccacccgaagcaacagcatcaaacaaggcaaggaccagcactttcctgtgttcatgaacgagaaggaggacatcctgtggtgtaccgagatggagagagtgttcgggttcccagtccactacacagatgtcagcaacatgtctagactggccagacagagactgctgggaagaagctggtccgtccctgtgatcagacacctgttcgcccctctgaaggagtacttcgcctgcgtgagcagcggcaacagcaacgccaacagccggggccccagcttctctagcggcctggtgccactgtccctgagagggagccacatgggccccatggagatctacaaaaccgtgagcgcctggaagcggcagcctgtgcgcgtgctgagcctgtttcggaatatcgataaagtcctgaaaagcctgggattcctggagagcggctctggctccggcggtggcaccctgaagtacgtggaggatgtgacaaacgtggtcagacgggatgtggagaagtggggccccttcgatctggtgtacggcagcacccaacccctgggcagctcttgtgaccggtgccctggctggtacatgtttcagttccaccggatcctgcagtacgccctgccgagacaggagtcccagcggccattcttttggattttcatggacaacttgctgctgaccgaggatgaccaggaaactaccactcggttcctgcagaccgaagccgtgaccctgcaggacgtgagaggccgggactaccagaacgccatgcgggtgtggtccaacatccctggactgaaaagcaagcacgcacctctgacccctaaagaagaggagtacctgcaggcccaggtgcggagcagaagcaagctggacgcccctaaggtggatctgctggtgaagaattgcctcctgcccctgagagagtacttcaagtatttcagccagaatagtctgcccctgggaggcagcggcggcggcgtggaggagcccgtgaccttcaaggacgtggccgtggccttcacccaggaggagtggggccagctggacctggtgcagaggaccctgtacagggacgtgatgctggagacctacggccacctgctgagcgtgggcaaccagatcgccaagcccgaggtgatcagcctgctggagcagggcgaggagccctggagcgtggagcagggctaccccaagagcagctgccccgagtggatgaggaacggcggcccaagcagcggcgcccctcctcccagcggcggcagcccagccggctccccaacctctaccgaggagggcacctctgagtccgccacccccgagagcggccctggcacctccaccgagcccagcgagggcagcgcacccggcagccctgccggcagccccacctccacagaggagggaaccagcaccgagcccagcgaaggcagcgccccaggcaccagcaccgagcctagtgagcaggagattaaacggatcaacaagatcagaagaagacttgtgaaagacagcaacaccaagaaggccggcaagacaggccccatgaaaaccctgctggttagagtgatgacacccgatctgagagagcggctggaaaacctgagaaagaagcctgaaaatatcccccagcccatcagcaatacatctagagccaacctgaataagctgctgaccgattacaccgaaatgaagaaggcgatcctgcatgtgtactgggaagagttccagaaggaccctgtgggcctgatgagccgggtggcccagcctgccagcaagaagatcgatcagaacaagctgaaacctgagatggacgagaagggcaacctgaccaccgccggctttgcctgctctcagtgtggccagcccctgttcgtgtacaagctggagcaggtgtctgagaagggcaaggcttacaccaactacttcggacggtgcaatgtggccgagcacgaaaagctgatcctgctggcccagctgaagcccgagaaggatagcgacgaagccgtgacatatagcctgggaaagtttgggcagagggccctggatttctacagcattcatgtgaccaaggagtccacccaccccgtgaagcccctggcccagatcgccggaaacagatacgcctccggacctgtgggaaaggccctgagcgacgcatgtatgggcacaatcgcctccttcctgtctaagtaccaggacatcatcatcgaacaccagaaggtggtgaagggcaaccagaagagactggagagcctgcgggagctggccggcaaggaaaacctggaataccctagcgtgaccctgccacctcagcctcacaccaaggagggcgttgatgcctacaacgaagtgatcgcccgggtgcgaatgtgggtgaacctgaacctgtggcagaagctgaagctaagcagagatgatgccaagcctctgctgagactgaagggattcccttcctttcctctggtcgagagacaggccaacgaagtggactggtgggacatggtgtgtaacgtgaagaagctgatcaacgagaaaaaggaggatggcaaggtgttttggcagaatctggctggctacaagagacaggaagccctgagaccatacctgagcagcgaggaagatcggaagaagggaaagaaattcgctcggtaccagctgggcgacctgctgctgcacctggaaaagaagcacggcgaggactggggaaaggtgtacgacgaggcctgggagcggattgacaagaaagtggaaggcctgagcaagcacatcaagctggaagaggaacggagaagcgaggacgcccagagcaaggccgccctgaccgactggctgcgggctaaggccagcttcgtgatcgagggcctgaaggaggccgacaaggacgagttctgcagatgcgagctgaagctgcagaagtggtacggggacctgcggggaaagcccttcgccatcgaagccgagaacagcatcctggacatcagcggcttcagcaagcagtacaactgtgccttcatctggcagaaggacggcgtgaagaagctgaacctgtacctgatcatcaactacttcaagggcggcaagctgcggttcaagaagatcaaacctgaagccttcgaagccaacagattctacaccgtgatcaacaaaaagagcggcgagatcgtgcccatggaggtgaacttcaacttcgacgaccccaacctgatcatcctgcctctggcctttggcaagagacagggcagagaattcatctggaacgacctgctgtccctggaaaccggcagcctgaagctggccaacggaagagtgatcgagaagacactgtacaacagaagaacccggcaggatgagcctgccctgttcgtggccctgaccttcgagcggcgggaggtcctggactcctccaatatcaaaccaatgaacctgatcggcgtggcaagaggcgaaaacatccccgccgtgatcgccctgaccgaccccgagggctgcccactgagccggtttaaggatagcctgggaaacccaacccacatcctgagaatcggcgagagctataaggagaagcagcggaccatccaggccaagaaggaggtggagcagcggagagccggcggctacagccggaagtacgccagcaaagccaagaatctggcagacgatatggtgagaaacaccgctagagatctgctgtactacgccgtgacccaggatgccatgctgatcttcgccaacctgagccggggcttcggccggcagggcaagcggaccttcatggccgagagacagtacacacggatggaggactggctgaccgccaagctggcctacgagggcctgagcaagacctacctgtccaagacactggcccagtacacctccaagacatgcagcaactgtgggtttaccatcaccagcgccgactacgacagggtgctggagaagctgaagaagacagcaacaggctggatgaccacaattaacggcaaggagctgaaggtggagggccagattacctactacaacagatacaagagacagaacgtagtcaaggacctgtccgtcgagctggatagactgagcgaagaatctgtgaacaacgacatctcctcctggacaaagggcagaagcggagaagctctgagcctcctgaagaaaagattctcccatagacccgtgcaggagaagttcgtgtgcctgaactgcggcttcgagacacacgcagccgagcaagccgccctgaacatcgccagatcctggctgttcctgcggagccaggagtacaagaaataccagacaaacaagacaaccggcaacaccgataagagagccttcgtcgagacctggcagtccttttaccggaagaagcttaaggaggtgtggaaacctgccgtgcggtctggcggatctggcggaggctccaccagccccaagaaaaagagaaaagtctaagctgccttctgcggggcttgccttctggccatgcccttcttctctcccttgcacctgtacctcttggtctttgaataaagcctgagtaggaaggctagcaaaaaaaaaaaaaaaaaaaaaaaaaaaaaaaaaaaaaaaaaaaaaaaaaaaaaaaaaaaaaaaaaaaaaaaaaaaaaaaa

SEQ ID NO: 13003 - RNA, 5785 nt, synthetic construct
  source 1..5785: mol_type = other RNA
aggaaataagagagaaaagaagagtaagaagaaatataagagccaccatggcccctaagaagaagcgtaaagtgagccggatggaacgcctcgtctacgaggtgcggcagaagtgcagaaacatcgaggacatctgcatctcctgcggatctctgaacgtgaccctggagcacccactgttcatcggcggcatgtgccagaactgtaaaaactgttttctggagtgtgcctatcaatacgacgatgacggctaccagagctactgcaccatctgttgcggcggaagagaggtgctgatgtgtggaaataacaactgctgccggtgcttctgcgtggaatgcgtggacctgctggtgggccccggcgccgcccaggccgctattaaggaagatccttggaactgctacatgtgcggccacaagggcacatacggcctgctgagacggagagaggactggcctagcagactgcagatgttcttcgccaataaccacgaccaggagttcgacccccctaaggtgtaccctcccgtccccgccgagaagagaaagcccatccgggtcctgagcctgttcgatggcatcgccaccggtctgctggtgctgaaggacctgggcatccaggtggataggtacattgcctccgaggtgtgcgaggactccatcaccgtgggaatggtgcgtcatcagggcaagatcatgtacgtgggcgacgtgcggagcgtgacacagaagcatatccaggagtggggccctttcgacctggtgatcggcggcagcccttgcaatgacctgagcatcgtgaacccagcccggaagggcctgtacgagggaaccggcagactgttcttcgagttttacagactgctgcacgacgcccggcctaaggaaggcgacgaccggcccttcttttggctgttcgagaatgtggtggccatgggagtcagcgacaagcgggatattagccggttcctggagagcaaccccgtgatgatcgatgccaaggaagtgagcgccgcccaccgggccagatacttctggggcaatctgcctggcatgaacagacccctggccagcaccgtgaacgacaagctggagctgcaggagtgcctggagcacggccggatcgccaagttcagcaaggtgagaaccatcaccacccgaagcaacagcatcaaacaaggcaaggaccagcactttcctgtgttcatgaacgagaaggaggacatcctgtggtgtaccgagatggagagagtgttcgggttcccagtccactacacagatgtcagcaacatgtctagactggccagacagagactgctgggaagaagctggtccgtccctgtgatcagacacctgttcgcccctctgaaggagtacttcgcctgcgtgagcagcggcaacagcaacgccaacagccggggccccagcttctctagcggcctggtgccactgtccctgagagggagccacatgggccccatggagatctacaaaaccgtgagcgcctggaagcggcagcctgtgcgcgtgctgagcctgtttcggaatatcgataaagtcctgaaaagcctgggattcctggagagcggctctggctccggcggtggcaccctgaagtacgtggaggatgtgacaaacgtggtcagacgggatgtggagaagtggggccccttcgatctggtgtacggcagcacccaacccctgggcagctcttgtgaccggtgccctggctggtacatgtttcagttccaccggatcctgcagtacgccctgccgagacaggagtcccagcggccattcttttggattttcatggacaacttgctgctgaccgaggatgaccaggaaactaccactcggttcctgcagaccgaagccgtgaccctgcaggacgtgagaggccgggactaccagaacgccatgcgggtgtggtccaacatccctggactgaaaagcaagcacgcacctctgacccctaaagaagaggagtacctgcaggcccaggtgcggagcagaagcaagctggacgcccctaaggtggatctgctggtgaagaattgcctcctgcccctgagagagtacttcaagtatttcagccagaatagtctgcccctgggaggcagcggcggcggctgcgaggtgagcgtgagcttcgaggacgtgaccgtggacttcagcagggaggagtggcagcacctggaccccgcccagaggaggctgtacagggacgtgaccctggagaactacagccacctgtgcagcgtgggctaccaggtgcccaagcccgaggtgatcttcaagctggagcagggcgagggcccctggaccctggaggaggagaccccccaccagagctgcagcgacgaggacatgggcggcggcccaagcagcggcgcccctcctcccagcggcggcagcccagccggctccccaacctctaccgaggagggcacctctgagtccgccacccccgagagcggccctggcacctccaccgagcccagcgagggcagcgcacccggcagccctgccggcagccccacctccacagaggagggaaccagcaccgagcccagcgaaggcagcgccccaggcaccagcaccgagcctagtgagcaggagattaaacggatcaacaagatcagaagaagacttgtgaaagacagcaacaccaagaaggccggcaagacaggccccatgaaaaccctgctggttagagtgatgacacccgatctgagagagcggctggaaaacctgagaaagaagcctgaaaatatcccccagcccatcagcaatacatctagagccaacctgaataagctgctgaccgattacaccgaaatgaagaaggcgatcctgcatgtgtactgggaagagttccagaaggaccctgtgggcctgatgagccgggtggcccagcctgccagcaagaagatcgatcagaacaagctgaaacctgagatggacgagaagggcaacctgaccaccgccggctttgcctgctctcagtgtggccagcccctgttcgtgtacaagctggagcaggtgtctgagaagggcaaggcttacaccaactacttcggacggtgcaatgtggccgagcacgaaaagctgatcctgctggcccagctgaagcccgagaaggatagcgacgaagccgtgacatatagcctgggaaagtttgggcagagggccctggatttctacagcattcatgtgaccaaggagtccacccaccccgtgaagcccctggcccagatcgccggaaacagatacgcctccggacctgtgggaaaggccctgagcgacgcatgtatgggcacaatcgcctccttcctgtctaagtaccaggacatcatcatcgaacaccagaaggtggtgaagggcaaccagaagagactggagagcctgcgggagctggccggcaaggaaaacctggaataccctagcgtgaccctgccacctcagcctcacaccaaggagggcgttgatgcctacaacgaagtgatcgcccgggtgcgaatgtgggtgaacctgaacctgtggcagaagctgaagctaagcagagatgatgccaagcctctgctgagactgaagggattcccttcctttcctctggtcgagagacaggccaacgaagtggactggtgggacatggtgtgtaacgtgaagaagctgatcaacgagaaaaaggaggatggcaaggtgttttggcagaatctggctggctacaagagacaggaagccctgagaccatacctgagcagcgaggaagatcggaagaagggaaagaaattcgctcggtaccagctgggcgacctgctgctgcacctggaaaagaagcacggcgaggactggggaaaggtgtacgacgaggcctgggagcggattgacaagaaagtggaaggcctgagcaagcacatcaagctggaagaggaacggagaagcgaggacgcccagagcaaggccgccctgaccgactggctgcgggctaaggccagcttcgtgatcgagggcctgaaggaggccgacaaggacgagttctgcagatgcgagctgaagctgcagaagtggtacggggacctgcggggaaagcccttcgccatcgaagccgagaacagcatcctggacatcagcggcttcagcaagcagtacaactgtgccttcatctggcagaaggacggcgtgaagaagctgaacctgtacctgatcatcaactacttcaagggcggcaagctgcggttcaagaagatcaaacctgaagccttcgaagccaacagattctacaccgtgatcaacaaaaagagcggcgagatcgtgcccatggaggtgaacttcaacttcgacgaccccaacctgatcatcctgcctctggcctttggcaagagacagggcagagaattcatctggaacgacctgctgtccctggaaaccggcagcctgaagctggccaacggaagagtgatcgagaagacactgtacaacagaagaacccggcaggatgagcctgccctgttcgtggccctgaccttcgagcggcgggaggtcctggactcctccaatatcaaaccaatgaacctgatcggcgtggcaagaggcgaaaacatccccgccgtgatcgccctgaccgaccccgagggctgcccactgagccggtttaaggatagcctgggaaacccaacccacatcctgagaatcggcgagagctataaggagaagcagcggaccatccaggccaagaaggaggtggagcagcggagagccggcggctacagccggaagtacgccagcaaagccaagaatctggcagacgatatggtgagaaacaccgctagagatctgctgtactacgccgtgacccaggatgccatgctgatcttcgccaacctgagccggggcttcggccggcagggcaagcggaccttcatggccgagagacagtacacacggatggaggactggctgaccgccaagctggcctacgagggcctgagcaagacctacctgtccaagacactggcccagtacacctccaagacatgcagcaactgtgggtttaccatcaccagcgccgactacgacagggtgctggagaagctgaagaagacagcaacaggctggatgaccacaattaacggcaaggagctgaaggtggagggccagattacctactacaacagatacaagagacagaacgtagtcaaggacctgtccgtcgagctggatagactgagcgaagaatctgtgaacaacgacatctcctcctggacaaagggcagaagcggagaagctctgagcctcctgaagaaaagattctcccatagacccgtgcaggagaagttcgtgtgcctgaactgcggcttcgagacacacgcagccgagcaagccgccctgaacatcgccagatcctggctgttcctgcggagccaggagtacaagaaataccagacaaacaagacaaccggcaacaccgataagagagccttcgtcgagacctggcagtccttttaccggaagaagcttaaggaggtgtggaaacctgccgtgcggtctggcggatctggcggaggctccaccagccccaagaaaaagagaaaagtctaagctgccttctgcggggcttgccttctggccatgcccttcttctctcccttgcacctgtacctcttggtctttgaataaagcctgagtaggaaggctagcaaaaaaaaaaaaaaaaaaaaaaaaaaaaaaaaaaaaaaaaaaaaaaaaaaaaaaaaaaaaaaaaaaaaaaaaaaaaaaaa

SEQ ID NO: 13004 - RNA, 5785 nt, synthetic construct
  source 1..5785: mol_type = other RNA
aggaaataagagagaaaagaagagtaagaagaaatataagagccaccatggcccctaagaagaagcgtaaagtgagccggatggaacgcctcgtctacgaggtgcggcagaagtgcagaaacatcgaggacatctgcatctcctgcggatctctgaacgtgaccctggagcacccactgttcatcggcggcatgtgccagaactgtaaaaactgttttctggagtgtgcctatcaatacgacgatgacggctaccagagctactgcaccatctgttgcggcggaagagaggtgctgatgtgtggaaataacaactgctgccggtgcttctgcgtggaatgcgtggacctgctggtgggccccggcgccgcccaggccgctattaaggaagatccttggaactgctacatgtgcggccacaagggcacatacggcctgctgagacggagagaggactggcctagcagactgcagatgttcttcgccaataaccacgaccaggagttcgacccccctaaggtgtaccctcccgtccccgccgagaagagaaagcccatccgggtcctgagcctgttcgatggcatcgccaccggtctgctggtgctgaaggacctgggcatccaggtggataggtacattgcctccgaggtgtgcgaggactccatcaccgtgggaatggtgcgtcatcagggcaagatcatgtacgtgggcgacgtgcggagcgtgacacagaagcatatccaggagtggggccctttcgacctggtgatcggcggcagcccttgcaatgacctgagcatcgtgaacccagcccggaagggcctgtacgagggaaccggcagactgttcttcgagttttacagactgctgcacgacgcccggcctaaggaaggcgacgaccggcccttcttttggctgttcgagaatgtggtggccatgggagtcagcgacaagcgggatattagccggttcctggagagcaaccccgtgatgatcgatgccaaggaagtgagcgccgcccaccgggccagatacttctggggcaatctgcctggcatgaacagacccctggccagcaccgtgaacgacaagctggagctgcaggagtgcctggagcacggccggatcgccaagttcagcaaggtgagaaccatcaccacccgaagcaacagcatcaaacaaggcaaggaccagcactttcctgtgttcatgaacgagaaggaggacatcctgtggtgtaccgagatggagagagtgttcgggttcccagtccactacacagatgtcagcaacatgtctagactggccagacagagactgctgggaagaagctggtccgtccctgtgatcagacacctgttcgcccctctgaaggagtacttcgcctgcgtgagcagcggcaacagcaacgccaacagccggggccccagcttctctagcggcctggtgccactgtccctgagagggagccacatgggccccatggagatctacaaaaccgtgagcgcctggaagcggcagcctgtgcgcgtgctgagcctgtttcggaatatcgataaagtcctgaaaagcctgggattcctggagagcggctctggctccggcggtggcaccctgaagtacgtggaggatgtgacaaacgtggtcagacgggatgtggagaagtggggccccttcgatctggtgtacggcagcacccaacccctgggcagctcttgtgaccggtgccctggctggtacatgtttcagttccaccggatcctgcagtacgccctgccgagacaggagtcccagcggccattcttttggattttcatggacaacttgctgctgaccgaggatgaccaggaaactaccactcggttcctgcagaccgaagccgtgaccctgcaggacgtgagaggccgggactaccagaacgccatgcgggtgtggtccaacatccctggactgaaaagcaagcacgcacctctgacccctaaagaagaggagtacctgcaggcccaggtgcggagcagaagcaagctggacgcccctaaggtggatctgctggtgaagaattgcctcctgcccctgagagagtacttcaagtatttcagccagaatagtctgcccctgggaggcagcggcggcggcttcggcaacctgctgggcgtgccctgggcccagggcaacagcgccctgcccgagggcctgctgagcttcaaggacatcagcatggagttcacctgggacgagtggcagctgctggacagcacccagaagtacctgtacagggacgtgatcctggagaactaccacaacctgatcagcgtgggctaccacggcaccaagcccgacctgatcttcaagctggagcagggcgaggacccctggatcggcggcccaagcagcggcgcccctcctcccagcggcggcagcccagccggctccccaacctctaccgaggagggcacctctgagtccgccacccccgagagcggccctggcacctccaccgagcccagcgagggcagcgcacccggcagccctgccggcagccccacctccacagaggagggaaccagcaccgagcccagcgaaggcagcgccccaggcaccagcaccgagcctagtgagcaggagattaaacggatcaacaagatcagaagaagacttgtgaaagacagcaacaccaagaaggccggcaagacaggccccatgaaaaccctgctggttagagtgatgacacccgatctgagagagcggctggaaaacctgagaaagaagcctgaaaatatcccccagcccatcagcaatacatctagagccaacctgaataagctgctgaccgattacaccgaaatgaagaaggcgatcctgcatgtgtactgggaagagttccagaaggaccctgtgggcctgatgagccgggtggcccagcctgccagcaagaagatcgatcagaacaagctgaaacctgagatggacgagaagggcaacctgaccaccgccggctttgcctgctctcagtgtggccagcccctgttcgtgtacaagctggagcaggtgtctgagaagggcaaggcttacaccaactacttcggacggtgcaatgtggccgagcacgaaaagctgatcctgctggcccagctgaagcccgagaaggatagcgacgaagccgtgacatatagcctgggaaagtttgggcagagggccctggatttctacagcattcatgtgaccaaggagtccacccaccccgtgaagcccctggcccagatcgccggaaacagatacgcctccggacctgtgggaaaggccctgagcgacgcatgtatgggcacaatcgcctccttcctgtctaagtaccaggacatcatcatcgaacaccagaaggtggtgaagggcaaccagaagagactggagagcctgcgggagctggccggcaaggaaaacctggaataccctagcgtgaccctgccacctcagcctcacaccaaggagggcgttgatgcctacaacgaagtgatcgcccgggtgcgaatgtgggtgaacctgaacctgtggcagaagctgaagctaagcagagatgatgccaagcctctgctgagactgaagggattcccttcctttcctctggtcgagagacaggccaacgaagtggactggtgggacatggtgtgtaacgtgaagaagctgatcaacgagaaaaaggaggatggcaaggtgttttggcagaatctggctggctacaagagacaggaagccctgagaccatacctgagcagcgaggaagatcggaagaagggaaagaaattcgctcggtaccagctgggcgacctgctgctgcacctggaaaagaagcacggcgaggactggggaaaggtgtacgacgaggcctgggagcggattgacaagaaagtggaaggcctgagcaagcacatcaagctggaagaggaacggagaagcgaggacgcccagagcaaggccgccctgaccgactggctgcgggctaaggccagcttcgtgatcgagggcctgaaggaggccgacaaggacgagttctgcagatgcgagctgaagctgcagaagtggtacggggacctgcggggaaagcccttcgccatcgaagccgagaacagcatcctggacatcagcggcttcagcaagcagtacaactgtgccttcatctggcagaaggacggcgtgaagaagctgaacctgtacctgatcatcaactacttcaagggcggcaagctgcggttcaagaagatcaaacctgaagccttcgaagccaacagattctacaccgtgatcaacaaaaagagcggcgagatcgtgcccatggaggtgaacttcaacttcgacgaccccaacctgatcatcctgcctctggcctttggcaagagacagggcagagaattcatctggaacgacctgctgtccctggaaaccggcagcctgaagctggccaacggaagagtgatcgagaagacactgtacaacagaagaacccggcaggatgagcctgccctgttcgtggccctgaccttcgagcggcgggaggtcctggactcctccaatatcaaaccaatgaacctgatcggcgtggcaagaggcgaaaacatccccgccgtgatcgccctgaccgaccccgagggctgcccactgagccggtttaaggatagcctgggaaacccaacccacatcctgagaatcggcgagagctataaggagaagcagcggaccatccaggccaagaaggaggtggagcagcggagagccggcggctacagccggaagtacgccagcaaagccaagaatctggcagacgatatggtgagaaacaccgctagagatctgctgtactacgccgtgacccaggatgccatgctgatcttcgccaacctgagccggggcttcggccggcagggcaagcggaccttcatggccgagagacagtacacacggatggaggactggctgaccgccaagctggcctacgagggcctgagcaagacctacctgtccaagacactggcccagtacacctccaagacatgcagcaactgtgggtttaccatcaccagcgccgactacgacagggtgctggagaagctgaagaagacagcaacaggctggatgaccacaattaacggcaaggagctgaaggtggagggccagattacctactacaacagatacaagagacagaacgtagtcaaggacctgtccgtcgagctggatagactgagcgaagaatctgtgaacaacgacatctcctcctggacaaagggcagaagcggagaagctctgagcctcctgaagaaaagattctcccatagacccgtgcaggagaagttcgtgtgcctgaactgcggcttcgagacacacgcagccgagcaagccgccctgaacatcgccagatcctggctgttcctgcggagccaggagtacaagaaataccagacaaacaagacaaccggcaacaccgataagagagccttcgtcgagacctggcagtccttttaccggaagaagcttaaggaggtgtggaaacctgccgtgcggtctggcggatctggcggaggctccaccagccccaagaaaaagagaaaagtctaagctgccttctgcggggcttgccttctggccatgcccttcttctctcccttgcacctgtacctcttggtctttgaataaagcctgagtaggaaggctagcaaaaaaaaaaaaaaaaaaaaaaaaaaaaaaaaaaaaaaaaaaaaaaaaaaaaaaaaaaaaaaaaaaaaaaaaaaaaaaaa

SEQ ID NO: 13005 - RNA, 5785 nt, synthetic construct
  source 1..5785: mol_type = other RNA
aggaaataagagagaaaagaagagtaagaagaaatataagagccaccatggcccctaagaagaagcgtaaagtgagccggatggaacgcctcgtctacgaggtgcggcagaagtgcagaaacatcgaggacatctgcatctcctgcggatctctgaacgtgaccctggagcacccactgttcatcggcggcatgtgccagaactgtaaaaactgttttctggagtgtgcctatcaatacgacgatgacggctaccagagctactgcaccatctgttgcggcggaagagaggtgctgatgtgtggaaataacaactgctgccggtgcttctgcgtggaatgcgtggacctgctggtgggccccggcgccgcccaggccgctattaaggaagatccttggaactgctacatgtgcggccacaagggcacatacggcctgctgagacggagagaggactggcctagcagactgcagatgttcttcgccaataaccacgaccaggagttcgacccccctaaggtgtaccctcccgtccccgccgagaagagaaagcccatccgggtcctgagcctgttcgatggcatcgccaccggtctgctggtgctgaaggacctgggcatccaggtggataggtacattgcctccgaggtgtgcgaggactccatcaccgtgggaatggtgcgtcatcagggcaagatcatgtacgtgggcgacgtgcggagcgtgacacagaagcatatccaggagtggggccctttcgacctggtgatcggcggcagcccttgcaatgacctgagcatcgtgaacccagcccggaagggcctgtacgagggaaccggcagactgttcttcgagttttacagactgctgcacgacgcccggcctaaggaaggcgacgaccggcccttcttttggctgttcgagaatgtggtggccatgggagtcagcgacaagcgggatattagccggttcctggagagcaaccccgtgatgatcgatgccaaggaagtgagcgccgcccaccgggccagatacttctggggcaatctgcctggcatgaacagacccctggccagcaccgtgaacgacaagctggagctgcaggagtgcctggagcacggccggatcgccaagttcagcaaggtgagaaccatcaccacccgaagcaacagcatcaaacaaggcaaggaccagcactttcctgtgttcatgaacgagaaggaggacatcctgtggtgtaccgagatggagagagtgttcgggttcccagtccactacacagatgtcagcaacatgtctagactggccagacagagactgctgggaagaagctggtccgtccctgtgatcagacacctgttcgcccctctgaaggagtacttcgcctgcgtgagcagcggcaacagcaacgccaacagccggggccccagcttctctagcggcctggtgccactgtccctgagagggagccacatgggccccatggagatctacaaaaccgtgagcgcctggaagcggcagcctgtgcgcgtgctgagcctgtttcggaatatcgataaagtcctgaaaagcctgggattcctggagagcggctctggctccggcggtggcaccctgaagtacgtggaggatgtgacaaacgtggtcagacgggatgtggagaagtggggccccttcgatctggtgtacggcagcacccaacccctgggcagctcttgtgaccggtgccctggctggtacatgtttcagttccaccggatcctgcagtacgccctgccgagacaggagtcccagcggccattcttttggattttcatggacaacttgctgctgaccgaggatgaccaggaaactaccactcggttcctgcagaccgaagccgtgaccctgcaggacgtgagaggccgggactaccagaacgccatgcgggtgtggtccaacatccctggactgaaaagcaagcacgcacctctgacccctaaagaagaggagtacctgcaggcccaggtgcggagcagaagcaagctggacgcccctaaggtggatctgctggtgaagaattgcctcctgcccctgagagagtacttcaagtatttcagccagaatagtctgcccctgggaggcagcggcggcggcatgggcagcgtgagcttcgaggacatcagcctggacttcacctgggacgagtggcaggacctggacagcgcccagaggaccctgtacagggacgtgatgctggagaactacagcagcctgatgttcctgggccactgcaccaccaagcccgagctgatcttcaagctggagcacggcttcggcccctggagcctggccgaggccagcatccagagcctgcccggcgtgcacaagatgaccgtgggcggcccaagcagcggcgcccctcctcccagcggcggcagcccagccggctccccaacctctaccgaggagggcacctctgagtccgccacccccgagagcggccctggcacctccaccgagcccagcgagggcagcgcacccggcagccctgccggcagccccacctccacagaggagggaaccagcaccgagcccagcgaaggcagcgccccaggcaccagcaccgagcctagtgagcaggagattaaacggatcaacaagatcagaagaagacttgtgaaagacagcaacaccaagaaggccggcaagacaggccccatgaaaaccctgctggttagagtgatgacacccgatctgagagagcggctggaaaacctgagaaagaagcctgaaaatatcccccagcccatcagcaatacatctagagccaacctgaataagctgctgaccgattacaccgaaatgaagaaggcgatcctgcatgtgtactgggaagagttccagaaggaccctgtgggcctgatgagccgggtggcccagcctgccagcaagaagatcgatcagaacaagctgaaacctgagatggacgagaagggcaacctgaccaccgccggctttgcctgctctcagtgtggccagcccctgttcgtgtacaagctggagcaggtgtctgagaagggcaaggcttacaccaactacttcggacggtgcaatgtggccgagcacgaaaagctgatcctgctggcccagctgaagcccgagaaggatagcgacgaagccgtgacatatagcctgggaaagtttgggcagagggccctggatttctacagcattcatgtgaccaaggagtccacccaccccgtgaagcccctggcccagatcgccggaaacagatacgcctccggacctgtgggaaaggccctgagcgacgcatgtatgggcacaatcgcctccttcctgtctaagtaccaggacatcatcatcgaacaccagaaggtggtgaagggcaaccagaagagactggagagcctgcgggagctggccggcaaggaaaacctggaataccctagcgtgaccctgccacctcagcctcacaccaaggagggcgttgatgcctacaacgaagtgatcgcccgggtgcgaatgtgggtgaacctgaacctgtggcagaagctgaagctaagcagagatgatgccaagcctctgctgagactgaagggattcccttcctttcctctggtcgagagacaggccaacgaagtggactggtgggacatggtgtgtaacgtgaagaagctgatcaacgagaaaaaggaggatggcaaggtgttttggcagaatctggctggctacaagagacaggaagccctgagaccatacctgagcagcgaggaagatcggaagaagggaaagaaattcgctcggtaccagctgggcgacctgctgctgcacctggaaaagaagcacggcgaggactggggaaaggtgtacgacgaggcctgggagcggattgacaagaaagtggaaggcctgagcaagcacatcaagctggaagaggaacggagaagcgaggacgcccagagcaaggccgccctgaccgactggctgcgggctaaggccagcttcgtgatcgagggcctgaaggaggccgacaaggacgagttctgcagatgcgagctgaagctgcagaagtggtacggggacctgcggggaaagcccttcgccatcgaagccgagaacagcatcctggacatcagcggcttcagcaagcagtacaactgtgccttcatctggcagaaggacggcgtgaagaagctgaacctgtacctgatcatcaactacttcaagggcggcaagctgcggttcaagaagatcaaacctgaagccttcgaagccaacagattctacaccgtgatcaacaaaaagagcggcgagatcgtgcccatggaggtgaacttcaacttcgacgaccccaacctgatcatcctgcctctggcctttggcaagagacagggcagagaattcatctggaacgacctgctgtccctggaaaccggcagcctgaagctggccaacggaagagtgatcgagaagacactgtacaacagaagaacccggcaggatgagcctgccctgttcgtggccctgaccttcgagcggcgggaggtcctggactcctccaatatcaaaccaatgaacctgatcggcgtggcaagaggcgaaaacatccccgccgtgatcgccctgaccgaccccgagggctgcccactgagccggtttaaggatagcctgggaaacccaacccacatcctgagaatcggcgagagctataaggagaagcagcggaccatccaggccaagaaggaggtggagcagcggagagccggcggctacagccggaagtacgccagcaaagccaagaatctggcagacgatatggtgagaaacaccgctagagatctgctgtactacgccgtgacccaggatgccatgctgatcttcgccaacctgagccggggcttcggccggcagggcaagcggaccttcatggccgagagacagtacacacggatggaggactggctgaccgccaagctggcctacgagggcctgagcaagacctacctgtccaagacactggcccagtacacctccaagacatgcagcaactgtgggtttaccatcaccagcgccgactacgacagggtgctggagaagctgaagaagacagcaacaggctggatgaccacaattaacggcaaggagctgaaggtggagggccagattacctactacaacagatacaagagacagaacgtagtcaaggacctgtccgtcgagctggatagactgagcgaagaatctgtgaacaacgacatctcctcctggacaaagggcagaagcggagaagctctgagcctcctgaagaaaagattctcccatagacccgtgcaggagaagttcgtgtgcctgaactgcggcttcgagacacacgcagccgagcaagccgccctgaacatcgccagatcctggctgttcctgcggagccaggagtacaagaaataccagacaaacaagacaaccggcaacaccgataagagagccttcgtcgagacctggcagtccttttaccggaagaagcttaaggaggtgtggaaacctgccgtgcggtctggcggatctggcggaggctccaccagccccaagaaaaagagaaaagtctaagctgccttctgcggggcttgccttctggccatgcccttcttctctcccttgcacctgtacctcttggtctttgaataaagcctgagtaggaaggctagcaaaaaaaaaaaaaaaaaaaaaaaaaaaaaaaaaaaaaaaaaaaaaaaaaaaaaaaaaaaaaaaaaaaaaaaaaaaaaaaa

SEQ ID NO: 13006 - RNA, 5785 nt, synthetic construct
  source 1..5785: mol_type = other RNA
aggaaataagagagaaaagaagagtaagaagaaatataagagccaccatggcccctaagaagaagcgtaaagtgagccggatggaacgcctcgtctacgaggtgcggcagaagtgcagaaacatcgaggacatctgcatctcctgcggatctctgaacgtgaccctggagcacccactgttcatcggcggcatgtgccagaactgtaaaaactgttttctggagtgtgcctatcaatacgacgatgacggctaccagagctactgcaccatctgttgcggcggaagagaggtgctgatgtgtggaaataacaactgctgccggtgcttctgcgtggaatgcgtggacctgctggtgggccccggcgccgcccaggccgctattaaggaagatccttggaactgctacatgtgcggccacaagggcacatacggcctgctgagacggagagaggactggcctagcagactgcagatgttcttcgccaataaccacgaccaggagttcgacccccctaaggtgtaccctcccgtccccgccgagaagagaaagcccatccgggtcctgagcctgttcgatggcatcgccaccggtctgctggtgctgaaggacctgggcatccaggtggataggtacattgcctccgaggtgtgcgaggactccatcaccgtgggaatggtgcgtcatcagggcaagatcatgtacgtgggcgacgtgcggagcgtgacacagaagcatatccaggagtggggccctttcgacctggtgatcggcggcagcccttgcaatgacctgagcatcgtgaacccagcccggaagggcctgtacgagggaaccggcagactgttcttcgagttttacagactgctgcacgacgcccggcctaaggaaggcgacgaccggcccttcttttggctgttcgagaatgtggtggccatgggagtcagcgacaagcgggatattagccggttcctggagagcaaccccgtgatgatcgatgccaaggaagtgagcgccgcccaccgggccagatacttctggggcaatctgcctggcatgaacagacccctggccagcaccgtgaacgacaagctggagctgcaggagtgcctggagcacggccggatcgccaagttcagcaaggtgagaaccatcaccacccgaagcaacagcatcaaacaaggcaaggaccagcactttcctgtgttcatgaacgagaaggaggacatcctgtggtgtaccgagatggagagagtgttcgggttcccagtccactacacagatgtcagcaacatgtctagactggccagacagagactgctgggaagaagctggtccgtccctgtgatcagacacctgttcgcccctctgaaggagtacttcgcctgcgtgagcagcggcaacagcaacgccaacagccggggccccagcttctctagcggcctggtgccactgtccctgagagggagccacatgggccccatggagatctacaaaaccgtgagcgcctggaagcggcagcctgtgcgcgtgctgagcctgtttcggaatatcgataaagtcctgaaaagcctgggattcctggagagcggctctggctccggcggtggcaccctgaagtacgtggaggatgtgacaaacgtggtcagacgggatgtggagaagtggggccccttcgatctggtgtacggcagcacccaacccctgggcagctcttgtgaccggtgccctggctggtacatgtttcagttccaccggatcctgcagtacgccctgccgagacaggagtcccagcggccattcttttggattttcatggacaacttgctgctgaccgaggatgaccaggaaactaccactcggttcctgcagaccgaagccgtgaccctgcaggacgtgagaggccgggactaccagaacgccatgcgggtgtggtccaacatccctggactgaaaagcaagcacgcacctctgacccctaaagaagaggagtacctgcaggcccaggtgcggagcagaagcaagctggacgcccctaaggtggatctgctggtgaagaattgcctcctgcccctgagagagtacttcaagtatttcagccagaatagtctgcccctgggaggcagcggcggcggcgtgcccgagcccgtgaccttcgaggacgtggccgtggacttcacccaggaggagtggggccagctggacctggtgcagaggaccctgtacagggacgtgatgctggagacctacggccacctgctgagcgtgggcaaccagatcgccaagcccgaggtgatcagcctgctggagcagggcgaggagccctggctggtggagcagacctgccccgagagcagctgccccgagtggatgagggacggcggcccaagcagcggcgcccctcctcccagcggcggcagcccagccggctccccaacctctaccgaggagggcacctctgagtccgccacccccgagagcggccctggcacctccaccgagcccagcgagggcagcgcacccggcagccctgccggcagccccacctccacagaggagggaaccagcaccgagcccagcgaaggcagcgccccaggcaccagcaccgagcctagtgagcaggagattaaacggatcaacaagatcagaagaagacttgtgaaagacagcaacaccaagaaggccggcaagacaggccccatgaaaaccctgctggttagagtgatgacacccgatctgagagagcggctggaaaacctgagaaagaagcctgaaaatatcccccagcccatcagcaatacatctagagccaacctgaataagctgctgaccgattacaccgaaatgaagaaggcgatcctgcatgtgtactgggaagagttccagaaggaccctgtgggcctgatgagccgggtggcccagcctgccagcaagaagatcgatcagaacaagctgaaacctgagatggacgagaagggcaacctgaccaccgccggctttgcctgctctcagtgtggccagcccctgttcgtgtacaagctggagcaggtgtctgagaagggcaaggcttacaccaactacttcggacggtgcaatgtggccgagcacgaaaagctgatcctgctggcccagctgaagcccgagaaggatagcgacgaagccgtgacatatagcctgggaaagtttgggcagagggccctggatttctacagcattcatgtgaccaaggagtccacccaccccgtgaagcccctggcccagatcgccggaaacagatacgcctccggacctgtgggaaaggccctgagcgacgcatgtatgggcacaatcgcctccttcctgtctaagtaccaggacatcatcatcgaacaccagaaggtggtgaagggcaaccagaagagactggagagcctgcgggagctggccggcaaggaaaacctggaataccctagcgtgaccctgccacctcagcctcacaccaaggagggcgttgatgcctacaacgaagtgatcgcccgggtgcgaatgtgggtgaacctgaacctgtggcagaagctgaagctaagcagagatgatgccaagcctctgctgagactgaagggattcccttcctttcctctggtcgagagacaggccaacgaagtggactggtgggacatggtgtgtaacgtgaagaagctgatcaacgagaaaaaggaggatggcaaggtgttttggcagaatctggctggctacaagagacaggaagccctgagaccatacctgagcagcgaggaagatcggaagaagggaaagaaattcgctcggtaccagctgggcgacctgctgctgcacctggaaaagaagcacggcgaggactggggaaaggtgtacgacgaggcctgggagcggattgacaagaaagtggaaggcctgagcaagcacatcaagctggaagaggaacggagaagcgaggacgcccagagcaaggccgccctgaccgactggctgcgggctaaggccagcttcgtgatcgagggcctgaaggaggccgacaaggacgagttctgcagatgcgagctgaagctgcagaagtggtacggggacctgcggggaaagcccttcgccatcgaagccgagaacagcatcctggacatcagcggcttcagcaagcagtacaactgtgccttcatctggcagaaggacggcgtgaagaagctgaacctgtacctgatcatcaactacttcaagggcggcaagctgcggttcaagaagatcaaacctgaagccttcgaagccaacagattctacaccgtgatcaacaaaaagagcggcgagatcgtgcccatggaggtgaacttcaacttcgacgaccccaacctgatcatcctgcctctggcctttggcaagagacagggcagagaattcatctggaacgacctgctgtccctggaaaccggcagcctgaagctggccaacggaagagtgatcgagaagacactgtacaacagaagaacccggcaggatgagcctgccctgttcgtggccctgaccttcgagcggcgggaggtcctggactcctccaatatcaaaccaatgaacctgatcggcgtggcaagaggcgaaaacatccccgccgtgatcgccctgaccgaccccgagggctgcccactgagccggtttaaggatagcctgggaaacccaacccacatcctgagaatcggcgagagctataaggagaagcagcggaccatccaggccaagaaggaggtggagcagcggagagccggcggctacagccggaagtacgccagcaaagccaagaatctggcagacgatatggtgagaaacaccgctagagatctgctgtactacgccgtgacccaggatgccatgctgatcttcgccaacctgagccggggcttcggccggcagggcaagcggaccttcatggccgagagacagtacacacggatggaggactggctgaccgccaagctggcctacgagggcctgagcaagacctacctgtccaagacactggcccagtacacctccaagacatgcagcaactgtgggtttaccatcaccagcgccgactacgacagggtgctggagaagctgaagaagacagcaacaggctggatgaccacaattaacggcaaggagctgaaggtggagggccagattacctactacaacagatacaagagacagaacgtagtcaaggacctgtccgtcgagctggatagactgagcgaagaatctgtgaacaacgacatctcctcctggacaaagggcagaagcggagaagctctgagcctcctgaagaaaagattctcccatagacccgtgcaggagaagttcgtgtgcctgaactgcggcttcgagacacacgcagccgagcaagccgccctgaacatcgccagatcctggctgttcctgcggagccaggagtacaagaaataccagacaaacaagacaaccggcaacaccgataagagagccttcgtcgagacctggcagtccttttaccggaagaagcttaaggaggtgtggaaacctgccgtgcggtctggcggatctggcggaggctccaccagccccaagaaaaagagaaaagtctaagctgccttctgcggggcttgccttctggccatgcccttcttctctcccttgcacctgtacctcttggtctttgaataaagcctgagtaggaaggctagcaaaaaaaaaaaaaaaaaaaaaaaaaaaaaaaaaaaaaaaaaaaaaaaaaaaaaaaaaaaaaaaaaaaaaaaaaaaaaaaa

SEQ ID NO: 13007 - RNA, 5785 nt, synthetic construct
  source 1..5785: mol_type = other RNA
aggaaataagagagaaaagaagagtaagaagaaatataagagccaccatggcccctaagaagaagcgtaaagtgagccggatggaacgcctcgtctacgaggtgcggcagaagtgcagaaacatcgaggacatctgcatctcctgcggatctctgaacgtgaccctggagcacccactgttcatcggcggcatgtgccagaactgtaaaaactgttttctggagtgtgcctatcaatacgacgatgacggctaccagagctactgcaccatctgttgcggcggaagagaggtgctgatgtgtggaaataacaactgctgccggtgcttctgcgtggaatgcgtggacctgctggtgggccccggcgccgcccaggccgctattaaggaagatccttggaactgctacatgtgcggccacaagggcacatacggcctgctgagacggagagaggactggcctagcagactgcagatgttcttcgccaataaccacgaccaggagttcgacccccctaaggtgtaccctcccgtccccgccgagaagagaaagcccatccgggtcctgagcctgttcgatggcatcgccaccggtctgctggtgctgaaggacctgggcatccaggtggataggtacattgcctccgaggtgtgcgaggactccatcaccgtgggaatggtgcgtcatcagggcaagatcatgtacgtgggcgacgtgcggagcgtgacacagaagcatatccaggagtggggccctttcgacctggtgatcggcggcagcccttgcaatgacctgagcatcgtgaacccagcccggaagggcctgtacgagggaaccggcagactgttcttcgagttttacagactgctgcacgacgcccggcctaaggaaggcgacgaccggcccttcttttggctgttcgagaatgtggtggccatgggagtcagcgacaagcgggatattagccggttcctggagagcaaccccgtgatgatcgatgccaaggaagtgagcgccgcccaccgggccagatacttctggggcaatctgcctggcatgaacagacccctggccagcaccgtgaacgacaagctggagctgcaggagtgcctggagcacggccggatcgccaagttcagcaaggtgagaaccatcaccacccgaagcaacagcatcaaacaaggcaaggaccagcactttcctgtgttcatgaacgagaaggaggacatcctgtggtgtaccgagatggagagagtgttcgggttcccagtccactacacagatgtcagcaacatgtctagactggccagacagagactgctgggaagaagctggtccgtccctgtgatcagacacctgttcgcccctctgaaggagtacttcgcctgcgtgagcagcggcaacagcaacgccaacagccggggccccagcttctctagcggcctggtgccactgtccctgagagggagccacatgggccccatggagatctacaaaaccgtgagcgcctggaagcggcagcctgtgcgcgtgctgagcctgtttcggaatatcgataaagtcctgaaaagcctgggattcctggagagcggctctggctccggcggtggcaccctgaagtacgtggaggatgtgacaaacgtggtcagacgggatgtggagaagtggggccccttcgatctggtgtacggcagcacccaacccctgggcagctcttgtgaccggtgccctggctggtacatgtttcagttccaccggatcctgcagtacgccctgccgagacaggagtcccagcggccattcttttggattttcatggacaacttgctgctgaccgaggatgaccaggaaactaccactcggttcctgcagaccgaagccgtgaccctgcaggacgtgagaggccgggactaccagaacgccatgcgggtgtggtccaacatccctggactgaaaagcaagcacgcacctctgacccctaaagaagaggagtacctgcaggcccaggtgcggagcagaagcaagctggacgcccctaaggtggatctgctggtgaagaattgcctcctgcccctgagagagtacttcaagtatttcagccagaatagtctgcccctgggaggcagcggcggcggcttccaggagagcgtgaccttcaaggacgtggccgtggagttcaccggcgaggagtggaggcagctggacagggcccagaggagcctgttcagggacgtgatgctggagaactacaggaacctggtgagcctgggcctgaccgtggccaagcccaacctgatcttcctgctggagaggggcgaggccccctggaccctgcagaggcagatccccggcggcaccagcagcgactgcccctgctggggcggcccaagcagcggcgcccctcctcccagcggcggcagcccagccggctccccaacctctaccgaggagggcacctctgagtccgccacccccgagagcggccctggcacctccaccgagcccagcgagggcagcgcacccggcagccctgccggcagccccacctccacagaggagggaaccagcaccgagcccagcgaaggcagcgccccaggcaccagcaccgagcctagtgagcaggagattaaacggatcaacaagatcagaagaagacttgtgaaagacagcaacaccaagaaggccggcaagacaggccccatgaaaaccctgctggttagagtgatgacacccgatctgagagagcggctggaaaacctgagaaagaagcctgaaaatatcccccagcccatcagcaatacatctagagccaacctgaataagctgctgaccgattacaccgaaatgaagaaggcgatcctgcatgtgtactgggaagagttccagaaggaccctgtgggcctgatgagccgggtggcccagcctgccagcaagaagatcgatcagaacaagctgaaacctgagatggacgagaagggcaacctgaccaccgccggctttgcctgctctcagtgtggccagcccctgttcgtgtacaagctggagcaggtgtctgagaagggcaaggcttacaccaactacttcggacggtgcaatgtggccgagcacgaaaagctgatcctgctggcccagctgaagcccgagaaggatagcgacgaagccgtgacatatagcctgggaaagtttgggcagagggccctggatttctacagcattcatgtgaccaaggagtccacccaccccgtgaagcccctggcccagatcgccggaaacagatacgcctccggacctgtgggaaaggccctgagcgacgcatgtatgggcacaatcgcctccttcctgtctaagtaccaggacatcatcatcgaacaccagaaggtggtgaagggcaaccagaagagactggagagcctgcgggagctggccggcaaggaaaacctggaataccctagcgtgaccctgccacctcagcctcacaccaaggagggcgttgatgcctacaacgaagtgatcgcccgggtgcgaatgtgggtgaacctgaacctgtggcagaagctgaagctaagcagagatgatgccaagcctctgctgagactgaagggattcccttcctttcctctggtcgagagacaggccaacgaagtggactggtgggacatggtgtgtaacgtgaagaagctgatcaacgagaaaaaggaggatggcaaggtgttttggcagaatctggctggctacaagagacaggaagccctgagaccatacctgagcagcgaggaagatcggaagaagggaaagaaattcgctcggtaccagctgggcgacctgctgctgcacctggaaaagaagcacggcgaggactggggaaaggtgtacgacgaggcctgggagcggattgacaagaaagtggaaggcctgagcaagcacatcaagctggaagaggaacggagaagcgaggacgcccagagcaaggccgccctgaccgactggctgcgggctaaggccagcttcgtgatcgagggcctgaaggaggccgacaaggacgagttctgcagatgcgagctgaagctgcagaagtggtacggggacctgcggggaaagcccttcgccatcgaagccgagaacagcatcctggacatcagcggcttcagcaagcagtacaactgtgccttcatctggcagaaggacggcgtgaagaagctgaacctgtacctgatcatcaactacttcaagggcggcaagctgcggttcaagaagatcaaacctgaagccttcgaagccaacagattctacaccgtgatcaacaaaaagagcggcgagatcgtgcccatggaggtgaacttcaacttcgacgaccccaacctgatcatcctgcctctggcctttggcaagagacagggcagagaattcatctggaacgacctgctgtccctggaaaccggcagcctgaagctggccaacggaagagtgatcgagaagacactgtacaacagaagaacccggcaggatgagcctgccctgttcgtggccctgaccttcgagcggcgggaggtcctggactcctccaatatcaaaccaatgaacctgatcggcgtggcaagaggcgaaaacatccccgccgtgatcgccctgaccgaccccgagggctgcccactgagccggtttaaggatagcctgggaaacccaacccacatcctgagaatcggcgagagctataaggagaagcagcggaccatccaggccaagaaggaggtggagcagcggagagccggcggctacagccggaagtacgccagcaaagccaagaatctggcagacgatatggtgagaaacaccgctagagatctgctgtactacgccgtgacccaggatgccatgctgatcttcgccaacctgagccggggcttcggccggcagggcaagcggaccttcatggccgagagacagtacacacggatggaggactggctgaccgccaagctggcctacgagggcctgagcaagacctacctgtccaagacactggcccagtacacctccaagacatgcagcaactgtgggtttaccatcaccagcgccgactacgacagggtgctggagaagctgaagaagacagcaacaggctggatgaccacaattaacggcaaggagctgaaggtggagggccagattacctactacaacagatacaagagacagaacgtagtcaaggacctgtccgtcgagctggatagactgagcgaagaatctgtgaacaacgacatctcctcctggacaaagggcagaagcggagaagctctgagcctcctgaagaaaagattctcccatagacccgtgcaggagaagttcgtgtgcctgaactgcggcttcgagacacacgcagccgagcaagccgccctgaacatcgccagatcctggctgttcctgcggagccaggagtacaagaaataccagacaaacaagacaaccggcaacaccgataagagagccttcgtcgagacctggcagtccttttaccggaagaagcttaaggaggtgtggaaacctgccgtgcggtctggcggatctggcggaggctccaccagccccaagaaaaagagaaaagtctaagctgccttctgcggggcttgccttctggccatgcccttcttctctcccttgcacctgtacctcttggtctttgaataaagcctgagtaggaaggctagcaaaaaaaaaaaaaaaaaaaaaaaaaaaaaaaaaaaaaaaaaaaaaaaaaaaaaaaaaaaaaaaaaaaaaaaaaaaaaaaa

SEQ ID NO: 13008 - RNA, 5785 nt, synthetic construct
  source 1..5785: mol_type = other RNA
aggaaataagagagaaaagaagagtaagaagaaatataagagccaccatggcccctaagaagaagcgtaaagtgagccggatggaacgcctcgtctacgaggtgcggcagaagtgcagaaacatcgaggacatctgcatctcctgcggatctctgaacgtgaccctggagcacccactgttcatcggcggcatgtgccagaactgtaaaaactgttttctggagtgtgcctatcaatacgacgatgacggctaccagagctactgcaccatctgttgcggcggaagagaggtgctgatgtgtggaaataacaactgctgccggtgcttctgcgtggaatgcgtggacctgctggtgggccccggcgccgcccaggccgctattaaggaagatccttggaactgctacatgtgcggccacaagggcacatacggcctgctgagacggagagaggactggcctagcagactgcagatgttcttcgccaataaccacgaccaggagttcgacccccctaaggtgtaccctcccgtccccgccgagaagagaaagcccatccgggtcctgagcctgttcgatggcatcgccaccggtctgctggtgctgaaggacctgggcatccaggtggataggtacattgcctccgaggtgtgcgaggactccatcaccgtgggaatggtgcgtcatcagggcaagatcatgtacgtgggcgacgtgcggagcgtgacacagaagcatatccaggagtggggccctttcgacctggtgatcggcggcagcccttgcaatgacctgagcatcgtgaacccagcccggaagggcctgtacgagggaaccggcagactgttcttcgagttttacagactgctgcacgacgcccggcctaaggaaggcgacgaccggcccttcttttggctgttcgagaatgtggtggccatgggagtcagcgacaagcgggatattagccggttcctggagagcaaccccgtgatgatcgatgccaaggaagtgagcgccgcccaccgggccagatacttctggggcaatctgcctggcatgaacagacccctggccagcaccgtgaacgacaagctggagctgcaggagtgcctggagcacggccggatcgccaagttcagcaaggtgagaaccatcaccacccgaagcaacagcatcaaacaaggcaaggaccagcactttcctgtgttcatgaacgagaaggaggacatcctgtggtgtaccgagatggagagagtgttcgggttcccagtccactacacagatgtcagcaacatgtctagactggccagacagagactgctgggaagaagctggtccgtccctgtgatcagacacctgttcgcccctctgaaggagtacttcgcctgcgtgagcagcggcaacagcaacgccaacagccggggccccagcttctctagcggcctggtgccactgtccctgagagggagccacatgggccccatggagatctacaaaaccgtgagcgcctggaagcggcagcctgtgcgcgtgctgagcctgtttcggaatatcgataaagtcctgaaaagcctgggattcctggagagcggctctggctccggcggtggcaccctgaagtacgtggaggatgtgacaaacgtggtcagacgggatgtggagaagtggggccccttcgatctggtgtacggcagcacccaacccctgggcagctcttgtgaccggtgccctggctggtacatgtttcagttccaccggatcctgcagtacgccctgccgagacaggagtcccagcggccattcttttggattttcatggacaacttgctgctgaccgaggatgaccaggaaactaccactcggttcctgcagaccgaagccgtgaccctgcaggacgtgagaggccgggactaccagaacgccatgcgggtgtggtccaacatccctggactgaaaagcaagcacgcacctctgacccctaaagaagaggagtacctgcaggcccaggtgcggagcagaagcaagctggacgcccctaaggtggatctgctggtgaagaattgcctcctgcccctgagagagtacttcaagtatttcagccagaatagtctgcccctgggaggcagcggcggcggcctgcagggcagcgtgagcttcaaggacgtgaccgtggacttcacccaggaggagtggcaccagctgaaccccgcccagaaggccctgtacagggacgtgatgctggagaactactgccacttcatcagcgtgggcttccacatgaccaagcccgacatgatcaggaagctggagcagggcgaggagctgtggaccgagaggatcttcagcaggcagagccacctggaggaggacggcaaggccggcggcccaagcagcggcgcccctcctcccagcggcggcagcccagccggctccccaacctctaccgaggagggcacctctgagtccgccacccccgagagcggccctggcacctccaccgagcccagcgagggcagcgcacccggcagccctgccggcagccccacctccacagaggagggaaccagcaccgagcccagcgaaggcagcgccccaggcaccagcaccgagcctagtgagcaggagattaaacggatcaacaagatcagaagaagacttgtgaaagacagcaacaccaagaaggccggcaagacaggccccatgaaaaccctgctggttagagtgatgacacccgatctgagagagcggctggaaaacctgagaaagaagcctgaaaatatcccccagcccatcagcaatacatctagagccaacctgaataagctgctgaccgattacaccgaaatgaagaaggcgatcctgcatgtgtactgggaagagttccagaaggaccctgtgggcctgatgagccgggtggcccagcctgccagcaagaagatcgatcagaacaagctgaaacctgagatggacgagaagggcaacctgaccaccgccggctttgcctgctctcagtgtggccagcccctgttcgtgtacaagctggagcaggtgtctgagaagggcaaggcttacaccaactacttcggacggtgcaatgtggccgagcacgaaaagctgatcctgctggcccagctgaagcccgagaaggatagcgacgaagccgtgacatatagcctgggaaagtttgggcagagggccctggatttctacagcattcatgtgaccaaggagtccacccaccccgtgaagcccctggcccagatcgccggaaacagatacgcctccggacctgtgggaaaggccctgagcgacgcatgtatgggcacaatcgcctccttcctgtctaagtaccaggacatcatcatcgaacaccagaaggtggtgaagggcaaccagaagagactggagagcctgcgggagctggccggcaaggaaaacctggaataccctagcgtgaccctgccacctcagcctcacaccaaggagggcgttgatgcctacaacgaagtgatcgcccgggtgcgaatgtgggtgaacctgaacctgtggcagaagctgaagctaagcagagatgatgccaagcctctgctgagactgaagggattcccttcctttcctctggtcgagagacaggccaacgaagtggactggtgggacatggtgtgtaacgtgaagaagctgatcaacgagaaaaaggaggatggcaaggtgttttggcagaatctggctggctacaagagacaggaagccctgagaccatacctgagcagcgaggaagatcggaagaagggaaagaaattcgctcggtaccagctgggcgacctgctgctgcacctggaaaagaagcacggcgaggactggggaaaggtgtacgacgaggcctgggagcggattgacaagaaagtggaaggcctgagcaagcacatcaagctggaagaggaacggagaagcgaggacgcccagagcaaggccgccctgaccgactggctgcgggctaaggccagcttcgtgatcgagggcctgaaggaggccgacaaggacgagttctgcagatgcgagctgaagctgcagaagtggtacggggacctgcggggaaagcccttcgccatcgaagccgagaacagcatcctggacatcagcggcttcagcaagcagtacaactgtgccttcatctggcagaaggacggcgtgaagaagctgaacctgtacctgatcatcaactacttcaagggcggcaagctgcggttcaagaagatcaaacctgaagccttcgaagccaacagattctacaccgtgatcaacaaaaagagcggcgagatcgtgcccatggaggtgaacttcaacttcgacgaccccaacctgatcatcctgcctctggcctttggcaagagacagggcagagaattcatctggaacgacctgctgtccctggaaaccggcagcctgaagctggccaacggaagagtgatcgagaagacactgtacaacagaagaacccggcaggatgagcctgccctgttcgtggccctgaccttcgagcggcgggaggtcctggactcctccaatatcaaaccaatgaacctgatcggcgtggcaagaggcgaaaacatccccgccgtgatcgccctgaccgaccccgagggctgcccactgagccggtttaaggatagcctgggaaacccaacccacatcctgagaatcggcgagagctataaggagaagcagcggaccatccaggccaagaaggaggtggagcagcggagagccggcggctacagccggaagtacgccagcaaagccaagaatctggcagacgatatggtgagaaacaccgctagagatctgctgtactacgccgtgacccaggatgccatgctgatcttcgccaacctgagccggggcttcggccggcagggcaagcggaccttcatggccgagagacagtacacacggatggaggactggctgaccgccaagctggcctacgagggcctgagcaagacctacctgtccaagacactggcccagtacacctccaagacatgcagcaactgtgggtttaccatcaccagcgccgactacgacagggtgctggagaagctgaagaagacagcaacaggctggatgaccacaattaacggcaaggagctgaaggtggagggccagattacctactacaacagatacaagagacagaacgtagtcaaggacctgtccgtcgagctggatagactgagcgaagaatctgtgaacaacgacatctcctcctggacaaagggcagaagcggagaagctctgagcctcctgaagaaaagattctcccatagacccgtgcaggagaagttcgtgtgcctgaactgcggcttcgagacacacgcagccgagcaagccgccctgaacatcgccagatcctggctgttcctgcggagccaggagtacaagaaataccagacaaacaagacaaccggcaacaccgataagagagccttcgtcgagacctggcagtccttttaccggaagaagcttaaggaggtgtggaaacctgccgtgcggtctggcggatctggcggaggctccaccagccccaagaaaaagagaaaagtctaagctgccttctgcggggcttgccttctggccatgcccttcttctctcccttgcacctgtacctcttggtctttgaataaagcctgagtaggaaggctagcaaaaaaaaaaaaaaaaaaaaaaaaaaaaaaaaaaaaaaaaaaaaaaaaaaaaaaaaaaaaaaaaaaaaaaaaaaaaaaaa

SEQ ID NO: 13009 - RNA, 5785 nt, synthetic construct
  source 1..5785: mol_type = other RNA
aggaaataagagagaaaagaagagtaagaagaaatataagagccaccatggcccctaagaagaagcgtaaagtgagccggatggaacgcctcgtctacgaggtgcggcagaagtgcagaaacatcgaggacatctgcatctcctgcggatctctgaacgtgaccctggagcacccactgttcatcggcggcatgtgccagaactgtaaaaactgttttctggagtgtgcctatcaatacgacgatgacggctaccagagctactgcaccatctgttgcggcggaagagaggtgctgatgtgtggaaataacaactgctgccggtgcttctgcgtggaatgcgtggacctgctggtgggccccggcgccgcccaggccgctattaaggaagatccttggaactgctacatgtgcggccacaagggcacatacggcctgctgagacggagagaggactggcctagcagactgcagatgttcttcgccaataaccacgaccaggagttcgacccccctaaggtgtaccctcccgtccccgccgagaagagaaagcccatccgggtcctgagcctgttcgatggcatcgccaccggtctgctggtgctgaaggacctgggcatccaggtggataggtacattgcctccgaggtgtgcgaggactccatcaccgtgggaatggtgcgtcatcagggcaagatcatgtacgtgggcgacgtgcggagcgtgacacagaagcatatccaggagtggggccctttcgacctggtgatcggcggcagcccttgcaatgacctgagcatcgtgaacccagcccggaagggcctgtacgagggaaccggcagactgttcttcgagttttacagactgctgcacgacgcccggcctaaggaaggcgacgaccggcccttcttttggctgttcgagaatgtggtggccatgggagtcagcgacaagcgggatattagccggttcctggagagcaaccccgtgatgatcgatgccaaggaagtgagcgccgcccaccgggccagatacttctggggcaatctgcctggcatgaacagacccctggccagcaccgtgaacgacaagctggagctgcaggagtgcctggagcacggccggatcgccaagttcagcaaggtgagaaccatcaccacccgaagcaacagcatcaaacaaggcaaggaccagcactttcctgtgttcatgaacgagaaggaggacatcctgtggtgtaccgagatggagagagtgttcgggttcccagtccactacacagatgtcagcaacatgtctagactggccagacagagactgctgggaagaagctggtccgtccctgtgatcagacacctgttcgcccctctgaaggagtacttcgcctgcgtgagcagcggcaacagcaacgccaacagccggggccccagcttctctagcggcctggtgccactgtccctgagagggagccacatgggccccatggagatctacaaaaccgtgagcgcctggaagcggcagcctgtgcgcgtgctgagcctgtttcggaatatcgataaagtcctgaaaagcctgggattcctggagagcggctctggctccggcggtggcaccctgaagtacgtggaggatgtgacaaacgtggtcagacgggatgtggagaagtggggccccttcgatctggtgtacggcagcacccaacccctgggcagctcttgtgaccggtgccctggctggtacatgtttcagttccaccggatcctgcagtacgccctgccgagacaggagtcccagcggccattcttttggattttcatggacaacttgctgctgaccgaggatgaccaggaaactaccactcggttcctgcagaccgaagccgtgaccctgcaggacgtgagaggccgggactaccagaacgccatgcgggtgtggtccaacatccctggactgaaaagcaagcacgcacctctgacccctaaagaagaggagtacctgcaggcccaggtgcggagcagaagcaagctggacgcccctaaggtggatctgctggtgaagaattgcctcctgcccctgagagagtacttcaagtatttcagccagaatagtctgcccctgggaggcagcggcggcggcgccagcgtggtgttcgaggacgtggccgtgaacttcacccccgaggagtgggccctgctgaaccccggccagaggaagctgtacagggacgtgatgctggagacctgcaggaacctgagcgccgtgggctgcaggagccagggcaacaccagcacccccaggccccagtggagcatcctgctgaacgagccccccggcgaggacaagaccggcatcttcaccaggaaggacagctgcagcgtgggcggcccaagcagcggcgcccctcctcccagcggcggcagcccagccggctccccaacctctaccgaggagggcacctctgagtccgccacccccgagagcggccctggcacctccaccgagcccagcgagggcagcgcacccggcagccctgccggcagccccacctccacagaggagggaaccagcaccgagcccagcgaaggcagcgccccaggcaccagcaccgagcctagtgagcaggagattaaacggatcaacaagatcagaagaagacttgtgaaagacagcaacaccaagaaggccggcaagacaggccccatgaaaaccctgctggttagagtgatgacacccgatctgagagagcggctggaaaacctgagaaagaagcctgaaaatatcccccagcccatcagcaatacatctagagccaacctgaataagctgctgaccgattacaccgaaatgaagaaggcgatcctgcatgtgtactgggaagagttccagaaggaccctgtgggcctgatgagccgggtggcccagcctgccagcaagaagatcgatcagaacaagctgaaacctgagatggacgagaagggcaacctgaccaccgccggctttgcctgctctcagtgtggccagcccctgttcgtgtacaagctggagcaggtgtctgagaagggcaaggcttacaccaactacttcggacggtgcaatgtggccgagcacgaaaagctgatcctgctggcccagctgaagcccgagaaggatagcgacgaagccgtgacatatagcctgggaaagtttgggcagagggccctggatttctacagcattcatgtgaccaaggagtccacccaccccgtgaagcccctggcccagatcgccggaaacagatacgcctccggacctgtgggaaaggccctgagcgacgcatgtatgggcacaatcgcctccttcctgtctaagtaccaggacatcatcatcgaacaccagaaggtggtgaagggcaaccagaagagactggagagcctgcgggagctggccggcaaggaaaacctggaataccctagcgtgaccctgccacctcagcctcacaccaaggagggcgttgatgcctacaacgaagtgatcgcccgggtgcgaatgtgggtgaacctgaacctgtggcagaagctgaagctaagcagagatgatgccaagcctctgctgagactgaagggattcccttcctttcctctggtcgagagacaggccaacgaagtggactggtgggacatggtgtgtaacgtgaagaagctgatcaacgagaaaaaggaggatggcaaggtgttttggcagaatctggctggctacaagagacaggaagccctgagaccatacctgagcagcgaggaagatcggaagaagggaaagaaattcgctcggtaccagctgggcgacctgctgctgcacctggaaaagaagcacggcgaggactggggaaaggtgtacgacgaggcctgggagcggattgacaagaaagtggaaggcctgagcaagcacatcaagctggaagaggaacggagaagcgaggacgcccagagcaaggccgccctgaccgactggctgcgggctaaggccagcttcgtgatcgagggcctgaaggaggccgacaaggacgagttctgcagatgcgagctgaagctgcagaagtggtacggggacctgcggggaaagcccttcgccatcgaagccgagaacagcatcctggacatcagcggcttcagcaagcagtacaactgtgccttcatctggcagaaggacggcgtgaagaagctgaacctgtacctgatcatcaactacttcaagggcggcaagctgcggttcaagaagatcaaacctgaagccttcgaagccaacagattctacaccgtgatcaacaaaaagagcggcgagatcgtgcccatggaggtgaacttcaacttcgacgaccccaacctgatcatcctgcctctggcctttggcaagagacagggcagagaattcatctggaacgacctgctgtccctggaaaccggcagcctgaagctggccaacggaagagtgatcgagaagacactgtacaacagaagaacccggcaggatgagcctgccctgttcgtggccctgaccttcgagcggcgggaggtcctggactcctccaatatcaaaccaatgaacctgatcggcgtggcaagaggcgaaaacatccccgccgtgatcgccctgaccgaccccgagggctgcccactgagccggtttaaggatagcctgggaaacccaacccacatcctgagaatcggcgagagctataaggagaagcagcggaccatccaggccaagaaggaggtggagcagcggagagccggcggctacagccggaagtacgccagcaaagccaagaatctggcagacgatatggtgagaaacaccgctagagatctgctgtactacgccgtgacccaggatgccatgctgatcttcgccaacctgagccggggcttcggccggcagggcaagcggaccttcatggccgagagacagtacacacggatggaggactggctgaccgccaagctggcctacgagggcctgagcaagacctacctgtccaagacactggcccagtacacctccaagacatgcagcaactgtgggtttaccatcaccagcgccgactacgacagggtgctggagaagctgaagaagacagcaacaggctggatgaccacaattaacggcaaggagctgaaggtggagggccagattacctactacaacagatacaagagacagaacgtagtcaaggacctgtccgtcgagctggatagactgagcgaagaatctgtgaacaacgacatctcctcctggacaaagggcagaagcggagaagctctgagcctcctgaagaaaagattctcccatagacccgtgcaggagaagttcgtgtgcctgaactgcggcttcgagacacacgcagccgagcaagccgccctgaacatcgccagatcctggctgttcctgcggagccaggagtacaagaaataccagacaaacaagacaaccggcaacaccgataagagagccttcgtcgagacctggcagtccttttaccggaagaagcttaaggaggtgtggaaacctgccgtgcggtctggcggatctggcggaggctccaccagccccaagaaaaagagaaaagtctaagctgccttctgcggggcttgccttctggccatgcccttcttctctcccttgcacctgtacctcttggtctttgaataaagcctgagtaggaaggctagcaaaaaaaaaaaaaaaaaaaaaaaaaaaaaaaaaaaaaaaaaaaaaaaaaaaaaaaaaaaaaaaaaaaaaaaaaaaaaaaa

SEQ ID NO: 13010 - RNA, 5785 nt, synthetic construct
  source 1..5785: mol_type = other RNA
aggaaataagagagaaaagaagagtaagaagaaatataagagccaccatggcccctaagaagaagcgtaaagtgagccggatggaacgcctcgtctacgaggtgcggcagaagtgcagaaacatcgaggacatctgcatctcctgcggatctctgaacgtgaccctggagcacccactgttcatcggcggcatgtgccagaactgtaaaaactgttttctggagtgtgcctatcaatacgacgatgacggctaccagagctactgcaccatctgttgcggcggaagagaggtgctgatgtgtggaaataacaactgctgccggtgcttctgcgtggaatgcgtggacctgctggtgggccccggcgccgcccaggccgctattaaggaagatccttggaactgctacatgtgcggccacaagggcacatacggcctgctgagacggagagaggactggcctagcagactgcagatgttcttcgccaataaccacgaccaggagttcgacccccctaaggtgtaccctcccgtccccgccgagaagagaaagcccatccgggtcctgagcctgttcgatggcatcgccaccggtctgctggtgctgaaggacctgggcatccaggtggataggtacattgcctccgaggtgtgcgaggactccatcaccgtgggaatggtgcgtcatcagggcaagatcatgtacgtgggcgacgtgcggagcgtgacacagaagcatatccaggagtggggccctttcgacctggtgatcggcggcagcccttgcaatgacctgagcatcgtgaacccagcccggaagggcctgtacgagggaaccggcagactgttcttcgagttttacagactgctgcacgacgcccggcctaaggaaggcgacgaccggcccttcttttggctgttcgagaatgtggtggccatgggagtcagcgacaagcgggatattagccggttcctggagagcaaccccgtgatgatcgatgccaaggaagtgagcgccgcccaccgggccagatacttctggggcaatctgcctggcatgaacagacccctggccagcaccgtgaacgacaagctggagctgcaggagtgcctggagcacggccggatcgccaagttcagcaaggtgagaaccatcaccacccgaagcaacagcatcaaacaaggcaaggaccagcactttcctgtgttcatgaacgagaaggaggacatcctgtggtgtaccgagatggagagagtgttcgggttcccagtccactacacagatgtcagcaacatgtctagactggccagacagagactgctgggaagaagctggtccgtccctgtgatcagacacctgttcgcccctctgaaggagtacttcgcctgcgtgagcagcggcaacagcaacgccaacagccggggccccagcttctctagcggcctggtgccactgtccctgagagggagccacatgggccccatggagatctacaaaaccgtgagcgcctggaagcggcagcctgtgcgcgtgctgagcctgtttcggaatatcgataaagtcctgaaaagcctgggattcctggagagcggctctggctccggcggtggcaccctgaagtacgtggaggatgtgacaaacgtggtcagacgggatgtggagaagtggggccccttcgatctggtgtacggcagcacccaacccctgggcagctcttgtgaccggtgccctggctggtacatgtttcagttccaccggatcctgcagtacgccctgccgagacaggagtcccagcggccattcttttggattttcatggacaacttgctgctgaccgaggatgaccaggaaactaccactcggttcctgcagaccgaagccgtgaccctgcaggacgtgagaggccgggactaccagaacgccatgcgggtgtggtccaacatccctggactgaaaagcaagcacgcacctctgacccctaaagaagaggagtacctgcaggcccaggtgcggagcagaagcaagctggacgcccctaaggtggatctgctggtgaagaattgcctcctgcccctgagagagtacttcaagtatttcagccagaatagtctgcccctgggaggcagcggcggcggcagcctgaccctggaggacgtggccgtggacttcacctgggaggagtggcagctgctgggccccgcccagaaggacctgtacagggacgtgatgctggagaactacagcaacctggtggccgtgggctaccaggccagcaagcccgacgccctgagcaagctggagcagggcgaggagccctgcaccaccgaggacgagatctacaccaggatctgctgcggcggccagccccagacctgcagcggcggcccaagcagcggcgcccctcctcccagcggcggcagcccagccggctccccaacctctaccgaggagggcacctctgagtccgccacccccgagagcggccctggcacctccaccgagcccagcgagggcagcgcacccggcagccctgccggcagccccacctccacagaggagggaaccagcaccgagcccagcgaaggcagcgccccaggcaccagcaccgagcctagtgagcaggagattaaacggatcaacaagatcagaagaagacttgtgaaagacagcaacaccaagaaggccggcaagacaggccccatgaaaaccctgctggttagagtgatgacacccgatctgagagagcggctggaaaacctgagaaagaagcctgaaaatatcccccagcccatcagcaatacatctagagccaacctgaataagctgctgaccgattacaccgaaatgaagaaggcgatcctgcatgtgtactgggaagagttccagaaggaccctgtgggcctgatgagccgggtggcccagcctgccagcaagaagatcgatcagaacaagctgaaacctgagatggacgagaagggcaacctgaccaccgccggctttgcctgctctcagtgtggccagcccctgttcgtgtacaagctggagcaggtgtctgagaagggcaaggcttacaccaactacttcggacggtgcaatgtggccgagcacgaaaagctgatcctgctggcccagctgaagcccgagaaggatagcgacgaagccgtgacatatagcctgggaaagtttgggcagagggccctggatttctacagcattcatgtgaccaaggagtccacccaccccgtgaagcccctggcccagatcgccggaaacagatacgcctccggacctgtgggaaaggccctgagcgacgcatgtatgggcacaatcgcctccttcctgtctaagtaccaggacatcatcatcgaacaccagaaggtggtgaagggcaaccagaagagactggagagcctgcgggagctggccggcaaggaaaacctggaataccctagcgtgaccctgccacctcagcctcacaccaaggagggcgttgatgcctacaacgaagtgatcgcccgggtgcgaatgtgggtgaacctgaacctgtggcagaagctgaagctaagcagagatgatgccaagcctctgctgagactgaagggattcccttcctttcctctggtcgagagacaggccaacgaagtggactggtgggacatggtgtgtaacgtgaagaagctgatcaacgagaaaaaggaggatggcaaggtgttttggcagaatctggctggctacaagagacaggaagccctgagaccatacctgagcagcgaggaagatcggaagaagggaaagaaattcgctcggtaccagctgggcgacctgctgctgcacctggaaaagaagcacggcgaggactggggaaaggtgtacgacgaggcctgggagcggattgacaagaaagtggaaggcctgagcaagcacatcaagctggaagaggaacggagaagcgaggacgcccagagcaaggccgccctgaccgactggctgcgggctaaggccagcttcgtgatcgagggcctgaaggaggccgacaaggacgagttctgcagatgcgagctgaagctgcagaagtggtacggggacctgcggggaaagcccttcgccatcgaagccgagaacagcatcctggacatcagcggcttcagcaagcagtacaactgtgccttcatctggcagaaggacggcgtgaagaagctgaacctgtacctgatcatcaactacttcaagggcggcaagctgcggttcaagaagatcaaacctgaagccttcgaagccaacagattctacaccgtgatcaacaaaaagagcggcgagatcgtgcccatggaggtgaacttcaacttcgacgaccccaacctgatcatcctgcctctggcctttggcaagagacagggcagagaattcatctggaacgacctgctgtccctggaaaccggcagcctgaagctggccaacggaagagtgatcgagaagacactgtacaacagaagaacccggcaggatgagcctgccctgttcgtggccctgaccttcgagcggcgggaggtcctggactcctccaatatcaaaccaatgaacctgatcggcgtggcaagaggcgaaaacatccccgccgtgatcgccctgaccgaccccgagggctgcccactgagccggtttaaggatagcctgggaaacccaacccacatcctgagaatcggcgagagctataaggagaagcagcggaccatccaggccaagaaggaggtggagcagcggagagccggcggctacagccggaagtacgccagcaaagccaagaatctggcagacgatatggtgagaaacaccgctagagatctgctgtactacgccgtgacccaggatgccatgctgatcttcgccaacctgagccggggcttcggccggcagggcaagcggaccttcatggccgagagacagtacacacggatggaggactggctgaccgccaagctggcctacgagggcctgagcaagacctacctgtccaagacactggcccagtacacctccaagacatgcagcaactgtgggtttaccatcaccagcgccgactacgacagggtgctggagaagctgaagaagacagcaacaggctggatgaccacaattaacggcaaggagctgaaggtggagggccagattacctactacaacagatacaagagacagaacgtagtcaaggacctgtccgtcgagctggatagactgagcgaagaatctgtgaacaacgacatctcctcctggacaaagggcagaagcggagaagctctgagcctcctgaagaaaagattctcccatagacccgtgcaggagaagttcgtgtgcctgaactgcggcttcgagacacacgcagccgagcaagccgccctgaacatcgccagatcctggctgttcctgcggagccaggagtacaagaaataccagacaaacaagacaaccggcaacaccgataagagagccttcgtcgagacctggcagtccttttaccggaagaagcttaaggaggtgtggaaacctgccgtgcggtctggcggatctggcggaggctccaccagccccaagaaaaagagaaaagtctaagctgccttctgcggggcttgccttctggccatgcccttcttctctcccttgcacctgtacctcttggtctttgaataaagcctgagtaggaaggctagcaaaaaaaaaaaaaaaaaaaaaaaaaaaaaaaaaaaaaaaaaaaaaaaaaaaaaaaaaaaaaaaaaaaaaaaaaaaaaaaa

SEQ ID NO: 13011 - RNA, 5785 nt, synthetic construct
  source 1..5785: mol_type = other RNA
aggaaataagagagaaaagaagagtaagaagaaatataagagccaccatggcccctaagaagaagcgtaaagtgagccggatggaacgcctcgtctacgaggtgcggcagaagtgcagaaacatcgaggacatctgcatctcctgcggatctctgaacgtgaccctggagcacccactgttcatcggcggcatgtgccagaactgtaaaaactgttttctggagtgtgcctatcaatacgacgatgacggctaccagagctactgcaccatctgttgcggcggaagagaggtgctgatgtgtggaaataacaactgctgccggtgcttctgcgtggaatgcgtggacctgctggtgggccccggcgccgcccaggccgctattaaggaagatccttggaactgctacatgtgcggccacaagggcacatacggcctgctgagacggagagaggactggcctagcagactgcagatgttcttcgccaataaccacgaccaggagttcgacccccctaaggtgtaccctcccgtccccgccgagaagagaaagcccatccgggtcctgagcctgttcgatggcatcgccaccggtctgctggtgctgaaggacctgggcatccaggtggataggtacattgcctccgaggtgtgcgaggactccatcaccgtgggaatggtgcgtcatcagggcaagatcatgtacgtgggcgacgtgcggagcgtgacacagaagcatatccaggagtggggccctttcgacctggtgatcggcggcagcccttgcaatgacctgagcatcgtgaacccagcccggaagggcctgtacgagggaaccggcagactgttcttcgagttttacagactgctgcacgacgcccggcctaaggaaggcgacgaccggcccttcttttggctgttcgagaatgtggtggccatgggagtcagcgacaagcgggatattagccggttcctggagagcaaccccgtgatgatcgatgccaaggaagtgagcgccgcccaccgggccagatacttctggggcaatctgcctggcatgaacagacccctggccagcaccgtgaacgacaagctggagctgcaggagtgcctggagcacggccggatcgccaagttcagcaaggtgagaaccatcaccacccgaagcaacagcatcaaacaaggcaaggaccagcactttcctgtgttcatgaacgagaaggaggacatcctgtggtgtaccgagatggagagagtgttcgggttcccagtccactacacagatgtcagcaacatgtctagactggccagacagagactgctgggaagaagctggtccgtccctgtgatcagacacctgttcgcccctctgaaggagtacttcgcctgcgtgagcagcggcaacagcaacgccaacagccggggccccagcttctctagcggcctggtgccactgtccctgagagggagccacatgggccccatggagatctacaaaaccgtgagcgcctggaagcggcagcctgtgcgcgtgctgagcctgtttcggaatatcgataaagtcctgaaaagcctgggattcctggagagcggctctggctccggcggtggcaccctgaagtacgtggaggatgtgacaaacgtggtcagacgggatgtggagaagtggggccccttcgatctggtgtacggcagcacccaacccctgggcagctcttgtgaccggtgccctggctggtacatgtttcagttccaccggatcctgcagtacgccctgccgagacaggagtcccagcggccattcttttggattttcatggacaacttgctgctgaccgaggatgaccaggaaactaccactcggttcctgcagaccgaagccgtgaccctgcaggacgtgagaggccgggactaccagaacgccatgcgggtgtggtccaacatccctggactgaaaagcaagcacgcacctctgacccctaaagaagaggagtacctgcaggcccaggtgcggagcagaagcaagctggacgcccctaaggtggatctgctggtgaagaattgcctcctgcccctgagagagtacttcaagtatttcagccagaatagtctgcccctgggaggcagcggcggcggcttccaggccagcgtgagcttccaggacgtgaccgtggagttcagccaggaggagtggcagcacctgggccccgtggagaggaccctgtacagggacgtgatgctggagaactacagccacctggtgagcgtgggctactgcttcaccaagcccgagctgatcttcaccctggagcagggcgaggacccctggctgctggagaaggagaagggcttcctgagcaggaacagccccgaggacagcggcggcccaagcagcggcgcccctcctcccagcggcggcagcccagccggctccccaacctctaccgaggagggcacctctgagtccgccacccccgagagcggccctggcacctccaccgagcccagcgagggcagcgcacccggcagccctgccggcagccccacctccacagaggagggaaccagcaccgagcccagcgaaggcagcgccccaggcaccagcaccgagcctagtgagcaggagattaaacggatcaacaagatcagaagaagacttgtgaaagacagcaacaccaagaaggccggcaagacaggccccatgaaaaccctgctggttagagtgatgacacccgatctgagagagcggctggaaaacctgagaaagaagcctgaaaatatcccccagcccatcagcaatacatctagagccaacctgaataagctgctgaccgattacaccgaaatgaagaaggcgatcctgcatgtgtactgggaagagttccagaaggaccctgtgggcctgatgagccgggtggcccagcctgccagcaagaagatcgatcagaacaagctgaaacctgagatggacgagaagggcaacctgaccaccgccggctttgcctgctctcagtgtggccagcccctgttcgtgtacaagctggagcaggtgtctgagaagggcaaggcttacaccaactacttcggacggtgcaatgtggccgagcacgaaaagctgatcctgctggcccagctgaagcccgagaaggatagcgacgaagccgtgacatatagcctgggaaagtttgggcagagggccctggatttctacagcattcatgtgaccaaggagtccacccaccccgtgaagcccctggcccagatcgccggaaacagatacgcctccggacctgtgggaaaggccctgagcgacgcatgtatgggcacaatcgcctccttcctgtctaagtaccaggacatcatcatcgaacaccagaaggtggtgaagggcaaccagaagagactggagagcctgcgggagctggccggcaaggaaaacctggaataccctagcgtgaccctgccacctcagcctcacaccaaggagggcgttgatgcctacaacgaagtgatcgcccgggtgcgaatgtgggtgaacctgaacctgtggcagaagctgaagctaagcagagatgatgccaagcctctgctgagactgaagggattcccttcctttcctctggtcgagagacaggccaacgaagtggactggtgggacatggtgtgtaacgtgaagaagctgatcaacgagaaaaaggaggatggcaaggtgttttggcagaatctggctggctacaagagacaggaagccctgagaccatacctgagcagcgaggaagatcggaagaagggaaagaaattcgctcggtaccagctgggcgacctgctgctgcacctggaaaagaagcacggcgaggactggggaaaggtgtacgacgaggcctgggagcggattgacaagaaagtggaaggcctgagcaagcacatcaagctggaagaggaacggagaagcgaggacgcccagagcaaggccgccctgaccgactggctgcgggctaaggccagcttcgtgatcgagggcctgaaggaggccgacaaggacgagttctgcagatgcgagctgaagctgcagaagtggtacggggacctgcggggaaagcccttcgccatcgaagccgagaacagcatcctggacatcagcggcttcagcaagcagtacaactgtgccttcatctggcagaaggacggcgtgaagaagctgaacctgtacctgatcatcaactacttcaagggcggcaagctgcggttcaagaagatcaaacctgaagccttcgaagccaacagattctacaccgtgatcaacaaaaagagcggcgagatcgtgcccatggaggtgaacttcaacttcgacgaccccaacctgatcatcctgcctctggcctttggcaagagacagggcagagaattcatctggaacgacctgctgtccctggaaaccggcagcctgaagctggccaacggaagagtgatcgagaagacactgtacaacagaagaacccggcaggatgagcctgccctgttcgtggccctgaccttcgagcggcgggaggtcctggactcctccaatatcaaaccaatgaacctgatcggcgtggcaagaggcgaaaacatccccgccgtgatcgccctgaccgaccccgagggctgcccactgagccggtttaaggatagcctgggaaacccaacccacatcctgagaatcggcgagagctataaggagaagcagcggaccatccaggccaagaaggaggtggagcagcggagagccggcggctacagccggaagtacgccagcaaagccaagaatctggcagacgatatggtgagaaacaccgctagagatctgctgtactacgccgtgacccaggatgccatgctgatcttcgccaacctgagccggggcttcggccggcagggcaagcggaccttcatggccgagagacagtacacacggatggaggactggctgaccgccaagctggcctacgagggcctgagcaagacctacctgtccaagacactggcccagtacacctccaagacatgcagcaactgtgggtttaccatcaccagcgccgactacgacagggtgctggagaagctgaagaagacagcaacaggctggatgaccacaattaacggcaaggagctgaaggtggagggccagattacctactacaacagatacaagagacagaacgtagtcaaggacctgtccgtcgagctggatagactgagcgaagaatctgtgaacaacgacatctcctcctggacaaagggcagaagcggagaagctctgagcctcctgaagaaaagattctcccatagacccgtgcaggagaagttcgtgtgcctgaactgcggcttcgagacacacgcagccgagcaagccgccctgaacatcgccagatcctggctgttcctgcggagccaggagtacaagaaataccagacaaacaagacaaccggcaacaccgataagagagccttcgtcgagacctggcagtccttttaccggaagaagcttaaggaggtgtggaaacctgccgtgcggtctggcggatctggcggaggctccaccagccccaagaaaaagagaaaagtctaagctgccttctgcggggcttgccttctggccatgcccttcttctctcccttgcacctgtacctcttggtctttgaataaagcctgagtaggaaggctagcaaaaaaaaaaaaaaaaaaaaaaaaaaaaaaaaaaaaaaaaaaaaaaaaaaaaaaaaaaaaaaaaaaaaaaaaaaaaaaaa

SEQ ID NO: 13012 - RNA, 5785 nt, synthetic construct
  source 1..5785: mol_type = other RNA
aggaaataagagagaaaagaagagtaagaagaaatataagagccaccatggcccctaagaagaagcgtaaagtgagccggatggaacgcctcgtctacgaggtgcggcagaagtgcagaaacatcgaggacatctgcatctcctgcggatctctgaacgtgaccctggagcacccactgttcatcggcggcatgtgccagaactgtaaaaactgttttctggagtgtgcctatcaatacgacgatgacggctaccagagctactgcaccatctgttgcggcggaagagaggtgctgatgtgtggaaataacaactgctgccggtgcttctgcgtggaatgcgtggacctgctggtgggccccggcgccgcccaggccgctattaaggaagatccttggaactgctacatgtgcggccacaagggcacatacggcctgctgagacggagagaggactggcctagcagactgcagatgttcttcgccaataaccacgaccaggagttcgacccccctaaggtgtaccctcccgtccccgccgagaagagaaagcccatccgggtcctgagcctgttcgatggcatcgccaccggtctgctggtgctgaaggacctgggcatccaggtggataggtacattgcctccgaggtgtgcgaggactccatcaccgtgggaatggtgcgtcatcagggcaagatcatgtacgtgggcgacgtgcggagcgtgacacagaagcatatccaggagtggggccctttcgacctggtgatcggcggcagcccttgcaatgacctgagcatcgtgaacccagcccggaagggcctgtacgagggaaccggcagactgttcttcgagttttacagactgctgcacgacgcccggcctaaggaaggcgacgaccggcccttcttttggctgttcgagaatgtggtggccatgggagtcagcgacaagcgggatattagccggttcctggagagcaaccccgtgatgatcgatgccaaggaagtgagcgccgcccaccgggccagatacttctggggcaatctgcctggcatgaacagacccctggccagcaccgtgaacgacaagctggagctgcaggagtgcctggagcacggccggatcgccaagttcagcaaggtgagaaccatcaccacccgaagcaacagcatcaaacaaggcaaggaccagcactttcctgtgttcatgaacgagaaggaggacatcctgtggtgtaccgagatggagagagtgttcgggttcccagtccactacacagatgtcagcaacatgtctagactggccagacagagactgctgggaagaagctggtccgtccctgtgatcagacacctgttcgcccctctgaaggagtacttcgcctgcgtgagcagcggcaacagcaacgccaacagccggggccccagcttctctagcggcctggtgccactgtccctgagagggagccacatgggccccatggagatctacaaaaccgtgagcgcctggaagcggcagcctgtgcgcgtgctgagcctgtttcggaatatcgataaagtcctgaaaagcctgggattcctggagagcggctctggctccggcggtggcaccctgaagtacgtggaggatgtgacaaacgtggtcagacgggatgtggagaagtggggccccttcgatctggtgtacggcagcacccaacccctgggcagctcttgtgaccggtgccctggctggtacatgtttcagttccaccggatcctgcagtacgccctgccgagacaggagtcccagcggccattcttttggattttcatggacaacttgctgctgaccgaggatgaccaggaaactaccactcggttcctgcagaccgaagccgtgaccctgcaggacgtgagaggccgggactaccagaacgccatgcgggtgtggtccaacatccctggactgaaaagcaagcacgcacctctgacccctaaagaagaggagtacctgcaggcccaggtgcggagcagaagcaagctggacgcccctaaggtggatctgctggtgaagaattgcctcctgcccctgagagagtacttcaagtatttcagccagaatagtctgcccctgggaggcagcggcggcggcccccaggtgagcctgaccttcgaggacgtggccgtgctgttcaccagggacgagtggaggaagctggcccccagccagaggaacctgtacagggacgtgatgctggagaactacaggaacctggtgagcctgggcctgcccttcaccaagcccaaggtgatcagcctgctgcagcagggcgaggacccctggaaggtggagaaggactgcttcggcggcagcttcctgggctgcaagagcaacggcggcccaagcagcggcgcccctcctcccagcggcggcagcccagccggctccccaacctctaccgaggagggcacctctgagtccgccacccccgagagcggccctggcacctccaccgagcccagcgagggcagcgcacccggcagccctgccggcagccccacctccacagaggagggaaccagcaccgagcccagcgaaggcagcgccccaggcaccagcaccgagcctagtgagcaggagattaaacggatcaacaagatcagaagaagacttgtgaaagacagcaacaccaagaaggccggcaagacaggccccatgaaaaccctgctggttagagtgatgacacccgatctgagagagcggctggaaaacctgagaaagaagcctgaaaatatcccccagcccatcagcaatacatctagagccaacctgaataagctgctgaccgattacaccgaaatgaagaaggcgatcctgcatgtgtactgggaagagttccagaaggaccctgtgggcctgatgagccgggtggcccagcctgccagcaagaagatcgatcagaacaagctgaaacctgagatggacgagaagggcaacctgaccaccgccggctttgcctgctctcagtgtggccagcccctgttcgtgtacaagctggagcaggtgtctgagaagggcaaggcttacaccaactacttcggacggtgcaatgtggccgagcacgaaaagctgatcctgctggcccagctgaagcccgagaaggatagcgacgaagccgtgacatatagcctgggaaagtttgggcagagggccctggatttctacagcattcatgtgaccaaggagtccacccaccccgtgaagcccctggcccagatcgccggaaacagatacgcctccggacctgtgggaaaggccctgagcgacgcatgtatgggcacaatcgcctccttcctgtctaagtaccaggacatcatcatcgaacaccagaaggtggtgaagggcaaccagaagagactggagagcctgcgggagctggccggcaaggaaaacctggaataccctagcgtgaccctgccacctcagcctcacaccaaggagggcgttgatgcctacaacgaagtgatcgcccgggtgcgaatgtgggtgaacctgaacctgtggcagaagctgaagctaagcagagatgatgccaagcctctgctgagactgaagggattcccttcctttcctctggtcgagagacaggccaacgaagtggactggtgggacatggtgtgtaacgtgaagaagctgatcaacgagaaaaaggaggatggcaaggtgttttggcagaatctggctggctacaagagacaggaagccctgagaccatacctgagcagcgaggaagatcggaagaagggaaagaaattcgctcggtaccagctgggcgacctgctgctgcacctggaaaagaagcacggcgaggactggggaaaggtgtacgacgaggcctgggagcggattgacaagaaagtggaaggcctgagcaagcacatcaagctggaagaggaacggagaagcgaggacgcccagagcaaggccgccctgaccgactggctgcgggctaaggccagcttcgtgatcgagggcctgaaggaggccgacaaggacgagttctgcagatgcgagctgaagctgcagaagtggtacggggacctgcggggaaagcccttcgccatcgaagccgagaacagcatcctggacatcagcggcttcagcaagcagtacaactgtgccttcatctggcagaaggacggcgtgaagaagctgaacctgtacctgatcatcaactacttcaagggcggcaagctgcggttcaagaagatcaaacctgaagccttcgaagccaacagattctacaccgtgatcaacaaaaagagcggcgagatcgtgcccatggaggtgaacttcaacttcgacgaccccaacctgatcatcctgcctctggcctttggcaagagacagggcagagaattcatctggaacgacctgctgtccctggaaaccggcagcctgaagctggccaacggaagagtgatcgagaagacactgtacaacagaagaacccggcaggatgagcctgccctgttcgtggccctgaccttcgagcggcgggaggtcctggactcctccaatatcaaaccaatgaacctgatcggcgtggcaagaggcgaaaacatccccgccgtgatcgccctgaccgaccccgagggctgcccactgagccggtttaaggatagcctgggaaacccaacccacatcctgagaatcggcgagagctataaggagaagcagcggaccatccaggccaagaaggaggtggagcagcggagagccggcggctacagccggaagtacgccagcaaagccaagaatctggcagacgatatggtgagaaacaccgctagagatctgctgtactacgccgtgacccaggatgccatgctgatcttcgccaacctgagccggggcttcggccggcagggcaagcggaccttcatggccgagagacagtacacacggatggaggactggctgaccgccaagctggcctacgagggcctgagcaagacctacctgtccaagacactggcccagtacacctccaagacatgcagcaactgtgggtttaccatcaccagcgccgactacgacagggtgctggagaagctgaagaagacagcaacaggctggatgaccacaattaacggcaaggagctgaaggtggagggccagattacctactacaacagatacaagagacagaacgtagtcaaggacctgtccgtcgagctggatagactgagcgaagaatctgtgaacaacgacatctcctcctggacaaagggcagaagcggagaagctctgagcctcctgaagaaaagattctcccatagacccgtgcaggagaagttcgtgtgcctgaactgcggcttcgagacacacgcagccgagcaagccgccctgaacatcgccagatcctggctgttcctgcggagccaggagtacaagaaataccagacaaacaagacaaccggcaacaccgataagagagccttcgtcgagacctggcagtccttttaccggaagaagcttaaggaggtgtggaaacctgccgtgcggtctggcggatctggcggaggctccaccagccccaagaaaaagagaaaagtctaagctgccttctgcggggcttgccttctggccatgcccttcttctctcccttgcacctgtacctcttggtctttgaataaagcctgagtaggaaggctagcaaaaaaaaaaaaaaaaaaaaaaaaaaaaaaaaaaaaaaaaaaaaaaaaaaaaaaaaaaaaaaaaaaaaaaaaaaaaaaaa

SEQ ID NO: 13013 - RNA, 5782 nt, synthetic construct
  source 1..5782: mol_type = other RNA
aggaaataagagagaaaagaagagtaagaagaaatataagagccaccatggcccctaagaagaagcgtaaagtgagccggatggaacgcctcgtctacgaggtgcggcagaagtgcagaaacatcgaggacatctgcatctcctgcggatctctgaacgtgaccctggagcacccactgttcatcggcggcatgtgccagaactgtaaaaactgttttctggagtgtgcctatcaatacgacgatgacggctaccagagctactgcaccatctgttgcggcggaagagaggtgctgatgtgtggaaataacaactgctgccggtgcttctgcgtggaatgcgtggacctgctggtgggccccggcgccgcccaggccgctattaaggaagatccttggaactgctacatgtgcggccacaagggcacatacggcctgctgagacggagagaggactggcctagcagactgcagatgttcttcgccaataaccacgaccaggagttcgacccccctaaggtgtaccctcccgtccccgccgagaagagaaagcccatccgggtcctgagcctgttcgatggcatcgccaccggtctgctggtgctgaaggacctgggcatccaggtggataggtacattgcctccgaggtgtgcgaggactccatcaccgtgggaatggtgcgtcatcagggcaagatcatgtacgtgggcgacgtgcggagcgtgacacagaagcatatccaggagtggggccctttcgacctggtgatcggcggcagcccttgcaatgacctgagcatcgtgaacccagcccggaagggcctgtacgagggaaccggcagactgttcttcgagttttacagactgctgcacgacgcccggcctaaggaaggcgacgaccggcccttcttttggctgttcgagaatgtggtggccatgggagtcagcgacaagcgggatattagccggttcctggagagcaaccccgtgatgatcgatgccaaggaagtgagcgccgcccaccgggccagatacttctggggcaatctgcctggcatgaacagacccctggccagcaccgtgaacgacaagctggagctgcaggagtgcctggagcacggccggatcgccaagttcagcaaggtgagaaccatcaccacccgaagcaacagcatcaaacaaggcaaggaccagcactttcctgtgttcatgaacgagaaggaggacatcctgtggtgtaccgagatggagagagtgttcgggttcccagtccactacacagatgtcagcaacatgtctagactggccagacagagactgctgggaagaagctggtccgtccctgtgatcagacacctgttcgcccctctgaaggagtacttcgcctgcgtgagcagcggcaacagcaacgccaacagccggggccccagcttctctagcggcctggtgccactgtccctgagagggagccacatgggccccatggagatctacaaaaccgtgagcgcctggaagcggcagcctgtgcgcgtgctgagcctgtttcggaatatcgataaagtcctgaaaagcctgggattcctggagagcggctctggctccggcggtggcaccctgaagtacgtggaggatgtgacaaacgtggtcagacgggatgtggagaagtggggccccttcgatctggtgtacggcagcacccaacccctgggcagctcttgtgaccggtgccctggctggtacatgtttcagttccaccggatcctgcagtacgccctgccgagacaggagtcccagcggccattcttttggattttcatggacaacttgctgctgaccgaggatgaccaggaaactaccactcggttcctgcagaccgaagccgtgaccctgcaggacgtgagaggccgggactaccagaacgccatgcgggtgtggtccaacatccctggactgaaaagcaagcacgcacctctgacccctaaagaagaggagtacctgcaggcccaggtgcggagcagaagcaagctggacgcccctaaggtggatctgctggtgaagaattgcctcctgcccctgagagagtacttcaagtatttcagccagaatagtctgcccctgggaggcagcggcggcggcgacagcgtggccttcgaggacgtggccgtgaacttcacccaggaggagtgggccctgctgagccccagccagaagaacctgtacagagacgtgaccctggagaccttcagaaacctggccagcgtgggcatccagtggaaggaccaggacatcgagaacctgtaccagaacctgggcatcaagctgagaagcctggtggagagactgtgcggcagaaaggagggcaacgagcacagagagggcggcccaagcagcggcgcccctcctcccagcggcggcagcccagccggctccccaacctctaccgaggagggcacctctgagtccgccacccccgagagcggccctggcacctccaccgagcccagcgagggcagcgcacccggcagccctgccggcagccccacctccacagaggagggaaccagcaccgagcccagcgaaggcagcgccccaggcaccagcaccgagcctagtgagcaggagattaaacggatcaacaagatcagaagaagacttgtgaaagacagcaacaccaagaaggccggcaagacaggccccatgaaaaccctgctggttagagtgatgacacccgatctgagagagcggctggaaaacctgagaaagaagcctgaaaatatcccccagcccatcagcaatacatctagagccaacctgaataagctgctgaccgattacaccgaaatgaagaaggcgatcctgcatgtgtactgggaagagttccagaaggaccctgtgggcctgatgagccgggtggcccagcctgccagcaagaagatcgatcagaacaagctgaaacctgagatggacgagaagggcaacctgaccaccgccggctttgcctgctctcagtgtggccagcccctgttcgtgtacaagctggagcaggtgtctgagaagggcaaggcttacaccaactacttcggacggtgcaatgtggccgagcacgaaaagctgatcctgctggcccagctgaagcccgagaaggatagcgacgaagccgtgacatatagcctgggaaagtttgggcagagggccctggatttctacagcattcatgtgaccaaggagtccacccaccccgtgaagcccctggcccagatcgccggaaacagatacgcctccggacctgtgggaaaggccctgagcgacgcatgtatgggcacaatcgcctccttcctgtctaagtaccaggacatcatcatcgaacaccagaaggtggtgaagggcaaccagaagagactggagagcctgcgggagctggccggcaaggaaaacctggaataccctagcgtgaccctgccacctcagcctcacaccaaggagggcgttgatgcctacaacgaagtgatcgcccgggtgcgaatgtgggtgaacctgaacctgtggcagaagctgaagctaagcagagatgatgccaagcctctgctgagactgaagggattcccttcctttcctctggtcgagagacaggccaacgaagtggactggtgggacatggtgtgtaacgtgaagaagctgatcaacgagaaaaaggaggatggcaaggtgttttggcagaatctggctggctacaagagacaggaagccctgagaccatacctgagcagcgaggaagatcggaagaagggaaagaaattcgctcggtaccagctgggcgacctgctgctgcacctggaaaagaagcacggcgaggactggggaaaggtgtacgacgaggcctgggagcggattgacaagaaagtggaaggcctgagcaagcacatcaagctggaagaggaacggagaagcgaggacgcccagagcaaggccgccctgaccgactggctgcgggctaaggccagcttcgtgatcgagggcctgaaggaggccgacaaggacgagttctgcagatgcgagctgaagctgcagaagtggtacggggacctgcggggaaagcccttcgccatcgaagccgagaacagcatcctggacatcagcggcttcagcaagcagtacaactgtgccttcatctggcagaaggacggcgtgaagaagctgaacctgtacctgatcatcaactacttcaagggcggcaagctgcggttcaagaagatcaaacctgaagccttcgaagccaacagattctacaccgtgatcaacaaaaagagcggcgagatcgtgcccatggaggtgaacttcaacttcgacgaccccaacctgatcatcctgcctctggcctttggcaagagacagggcagagaattcatctggaacgacctgctgtccctggaaaccggcagcctgaagctggccaacggaagagtgatcgagaagacactgtacaacagaagaacccggcaggatgagcctgccctgttcgtggccctgaccttcgagcggcgggaggtcctggactcctccaatatcaaaccaatgaacctgatcggcgtggcaagaggcgaaaacatccccgccgtgatcgccctgaccgaccccgagggctgcccactgagccggtttaaggatagcctgggaaacccaacccacatcctgagaatcggcgagagctataaggagaagcagcggaccatccaggccaagaaggaggtggagcagcggagagccggcggctacagccggaagtacgccagcaaagccaagaatctggcagacgatatggtgagaaacaccgctagagatctgctgtactacgccgtgacccaggatgccatgctgatcttcgccaacctgagccggggcttcggccggcagggcaagcggaccttcatggccgagagacagtacacacggatggaggactggctgaccgccaagctggcctacgagggcctgagcaagacctacctgtccaagacactggcccagtacacctccaagacatgcagcaactgtgggtttaccatcaccagcgccgactacgacagggtgctggagaagctgaagaagacagcaacaggctggatgaccacaattaacggcaaggagctgaaggtggagggccagattacctactacaacagatacaagagacagaacgtagtcaaggacctgtccgtcgagctggatagactgagcgaagaatctgtgaacaacgacatctcctcctggacaaagggcagaagcggagaagctctgagcctcctgaagaaaagattctcccatagacccgtgcaggagaagttcgtgtgcctgaactgcggcttcgagacacacgcagccgagcaagccgccctgaacatcgccagatcctggctgttcctgcggagccaggagtacaagaaataccagacaaacaagacaaccggcaacaccgataagagagccttcgtcgagacctggcagtccttttaccggaagaagcttaaggaggtgtggaaacctgccgtgcggtctggcggatctggcggaggctccaccagccccaagaaaaagagaaaagtctaagctgccttctgcggggcttgccttctggccatgcccttcttctctcccttgcacctgtacctcttggtctttgaataaagcctgagtaggaaggctagcaaaaaaaaaaaaaaaaaaaaaaaaaaaaaaaaaaaaaaaaaaaaaaaaaaaaaaaaaaaaaaaaaaaaaaaaaaaaaaaa

SEQ ID NO: 13014 - RNA, 5785 nt, synthetic construct
  source 1..5785: mol_type = other RNA
aggaaataagagagaaaagaagagtaagaagaaatataagagccaccatggcccctaagaagaagcgtaaagtgagccggatggaacgcctcgtctacgaggtgcggcagaagtgcagaaacatcgaggacatctgcatctcctgcggatctctgaacgtgaccctggagcacccactgttcatcggcggcatgtgccagaactgtaaaaactgttttctggagtgtgcctatcaatacgacgatgacggctaccagagctactgcaccatctgttgcggcggaagagaggtgctgatgtgtggaaataacaactgctgccggtgcttctgcgtggaatgcgtggacctgctggtgggccccggcgccgcccaggccgctattaaggaagatccttggaactgctacatgtgcggccacaagggcacatacggcctgctgagacggagagaggactggcctagcagactgcagatgttcttcgccaataaccacgaccaggagttcgacccccctaaggtgtaccctcccgtccccgccgagaagagaaagcccatccgggtcctgagcctgttcgatggcatcgccaccggtctgctggtgctgaaggacctgggcatccaggtggataggtacattgcctccgaggtgtgcgaggactccatcaccgtgggaatggtgcgtcatcagggcaagatcatgtacgtgggcgacgtgcggagcgtgacacagaagcatatccaggagtggggccctttcgacctggtgatcggcggcagcccttgcaatgacctgagcatcgtgaacccagcccggaagggcctgtacgagggaaccggcagactgttcttcgagttttacagactgctgcacgacgcccggcctaaggaaggcgacgaccggcccttcttttggctgttcgagaatgtggtggccatgggagtcagcgacaagcgggatattagccggttcctggagagcaaccccgtgatgatcgatgccaaggaagtgagcgccgcccaccgggccagatacttctggggcaatctgcctggcatgaacagacccctggccagcaccgtgaacgacaagctggagctgcaggagtgcctggagcacggccggatcgccaagttcagcaaggtgagaaccatcaccacccgaagcaacagcatcaaacaaggcaaggaccagcactttcctgtgttcatgaacgagaaggaggacatcctgtggtgtaccgagatggagagagtgttcgggttcccagtccactacacagatgtcagcaacatgtctagactggccagacagagactgctgggaagaagctggtccgtccctgtgatcagacacctgttcgcccctctgaaggagtacttcgcctgcgtgagcagcggcaacagcaacgccaacagccggggccccagcttctctagcggcctggtgccactgtccctgagagggagccacatgggccccatggagatctacaaaaccgtgagcgcctggaagcggcagcctgtgcgcgtgctgagcctgtttcggaatatcgataaagtcctgaaaagcctgggattcctggagagcggctctggctccggcggtggcaccctgaagtacgtggaggatgtgacaaacgtggtcagacgggatgtggagaagtggggccccttcgatctggtgtacggcagcacccaacccctgggcagctcttgtgaccggtgccctggctggtacatgtttcagttccaccggatcctgcagtacgccctgccgagacaggagtcccagcggccattcttttggattttcatggacaacttgctgctgaccgaggatgaccaggaaactaccactcggttcctgcagaccgaagccgtgaccctgcaggacgtgagaggccgggactaccagaacgccatgcgggtgtggtccaacatccctggactgaaaagcaagcacgcacctctgacccctaaagaagaggagtacctgcaggcccaggtgcggagcagaagcaagctggacgcccctaaggtggatctgctggtgaagaattgcctcctgcccctgagagagtacttcaagtatttcagccagaatagtctgcccctgggaggcagcggcggcggcatggccgccgccgccctgagggagcccgcccagggctacgtgaccttcgaggacgtggccgtgtacttcagccaggaggagtggaggctgctggacgaggcccagaggctgctgtacaggaacgtgatgctggagaacttcagcctgatggccagcctgggcctggccagcagcaagacccacgagatcacccagctggagagctgggaggagcccttcgtgcccgcctgggacgtgatgaccggcggcccaagcagcggcgcccctcctcccagcggcggcagcccagccggctccccaacctctaccgaggagggcacctctgagtccgccacccccgagagcggccctggcacctccaccgagcccagcgagggcagcgcacccggcagccctgccggcagccccacctccacagaggagggaaccagcaccgagcccagcgaaggcagcgccccaggcaccagcaccgagcctagtgagcaggagattaaacggatcaacaagatcagaagaagacttgtgaaagacagcaacaccaagaaggccggcaagacaggccccatgaaaaccctgctggttagagtgatgacacccgatctgagagagcggctggaaaacctgagaaagaagcctgaaaatatcccccagcccatcagcaatacatctagagccaacctgaataagctgctgaccgattacaccgaaatgaagaaggcgatcctgcatgtgtactgggaagagttccagaaggaccctgtgggcctgatgagccgggtggcccagcctgccagcaagaagatcgatcagaacaagctgaaacctgagatggacgagaagggcaacctgaccaccgccggctttgcctgctctcagtgtggccagcccctgttcgtgtacaagctggagcaggtgtctgagaagggcaaggcttacaccaactacttcggacggtgcaatgtggccgagcacgaaaagctgatcctgctggcccagctgaagcccgagaaggatagcgacgaagccgtgacatatagcctgggaaagtttgggcagagggccctggatttctacagcattcatgtgaccaaggagtccacccaccccgtgaagcccctggcccagatcgccggaaacagatacgcctccggacctgtgggaaaggccctgagcgacgcatgtatgggcacaatcgcctccttcctgtctaagtaccaggacatcatcatcgaacaccagaaggtggtgaagggcaaccagaagagactggagagcctgcgggagctggccggcaaggaaaacctggaataccctagcgtgaccctgccacctcagcctcacaccaaggagggcgttgatgcctacaacgaagtgatcgcccgggtgcgaatgtgggtgaacctgaacctgtggcagaagctgaagctaagcagagatgatgccaagcctctgctgagactgaagggattcccttcctttcctctggtcgagagacaggccaacgaagtggactggtgggacatggtgtgtaacgtgaagaagctgatcaacgagaaaaaggaggatggcaaggtgttttggcagaatctggctggctacaagagacaggaagccctgagaccatacctgagcagcgaggaagatcggaagaagggaaagaaattcgctcggtaccagctgggcgacctgctgctgcacctggaaaagaagcacggcgaggactggggaaaggtgtacgacgaggcctgggagcggattgacaagaaagtggaaggcctgagcaagcacatcaagctggaagaggaacggagaagcgaggacgcccagagcaaggccgccctgaccgactggctgcgggctaaggccagcttcgtgatcgagggcctgaaggaggccgacaaggacgagttctgcagatgcgagctgaagctgcagaagtggtacggggacctgcggggaaagcccttcgccatcgaagccgagaacagcatcctggacatcagcggcttcagcaagcagtacaactgtgccttcatctggcagaaggacggcgtgaagaagctgaacctgtacctgatcatcaactacttcaagggcggcaagctgcggttcaagaagatcaaacctgaagccttcgaagccaacagattctacaccgtgatcaacaaaaagagcggcgagatcgtgcccatggaggtgaacttcaacttcgacgaccccaacctgatcatcctgcctctggcctttggcaagagacagggcagagaattcatctggaacgacctgctgtccctggaaaccggcagcctgaagctggccaacggaagagtgatcgagaagacactgtacaacagaagaacccggcaggatgagcctgccctgttcgtggccctgaccttcgagcggcgggaggtcctggactcctccaatatcaaaccaatgaacctgatcggcgtggcaagaggcgaaaacatccccgccgtgatcgccctgaccgaccccgagggctgcccactgagccggtttaaggatagcctgggaaacccaacccacatcctgagaatcggcgagagctataaggagaagcagcggaccatccaggccaagaaggaggtggagcagcggagagccggcggctacagccggaagtacgccagcaaagccaagaatctggcagacgatatggtgagaaacaccgctagagatctgctgtactacgccgtgacccaggatgccatgctgatcttcgccaacctgagccggggcttcggccggcagggcaagcggaccttcatggccgagagacagtacacacggatggaggactggctgaccgccaagctggcctacgagggcctgagcaagacctacctgtccaagacactggcccagtacacctccaagacatgcagcaactgtgggtttaccatcaccagcgccgactacgacagggtgctggagaagctgaagaagacagcaacaggctggatgaccacaattaacggcaaggagctgaaggtggagggccagattacctactacaacagatacaagagacagaacgtagtcaaggacctgtccgtcgagctggatagactgagcgaagaatctgtgaacaacgacatctcctcctggacaaagggcagaagcggagaagctctgagcctcctgaagaaaagattctcccatagacccgtgcaggagaagttcgtgtgcctgaactgcggcttcgagacacacgcagccgagcaagccgccctgaacatcgccagatcctggctgttcctgcggagccaggagtacaagaaataccagacaaacaagacaaccggcaacaccgataagagagccttcgtcgagacctggcagtccttttaccggaagaagcttaaggaggtgtggaaacctgccgtgcggtctggcggatctggcggaggctccaccagccccaagaaaaagagaaaagtctaagctgccttctgcggggcttgccttctggccatgcccttcttctctcccttgcacctgtacctcttggtctttgaataaagcctgagtaggaaggctagcaaaaaaaaaaaaaaaaaaaaaaaaaaaaaaaaaaaaaaaaaaaaaaaaaaaaaaaaaaaaaaaaaaaaaaaaaaaaaaaa

SEQ ID NO: 13015 - RNA, 5785 nt, synthetic construct
  source 1..5785: mol_type = other RNA
aggaaataagagagaaaagaagagtaagaagaaatataagagccaccatggcccctaagaagaagcgtaaagtgagccggatggaacgcctcgtctacgaggtgcggcagaagtgcagaaacatcgaggacatctgcatctcctgcggatctctgaacgtgaccctggagcacccactgttcatcggcggcatgtgccagaactgtaaaaactgttttctggagtgtgcctatcaatacgacgatgacggctaccagagctactgcaccatctgttgcggcggaagagaggtgctgatgtgtggaaataacaactgctgccggtgcttctgcgtggaatgcgtggacctgctggtgggccccggcgccgcccaggccgctattaaggaagatccttggaactgctacatgtgcggccacaagggcacatacggcctgctgagacggagagaggactggcctagcagactgcagatgttcttcgccaataaccacgaccaggagttcgacccccctaaggtgtaccctcccgtccccgccgagaagagaaagcccatccgggtcctgagcctgttcgatggcatcgccaccggtctgctggtgctgaaggacctgggcatccaggtggataggtacattgcctccgaggtgtgcgaggactccatcaccgtgggaatggtgcgtcatcagggcaagatcatgtacgtgggcgacgtgcggagcgtgacacagaagcatatccaggagtggggccctttcgacctggtgatcggcggcagcccttgcaatgacctgagcatcgtgaacccagcccggaagggcctgtacgagggaaccggcagactgttcttcgagttttacagactgctgcacgacgcccggcctaaggaaggcgacgaccggcccttcttttggctgttcgagaatgtggtggccatgggagtcagcgacaagcgggatattagccggttcctggagagcaaccccgtgatgatcgatgccaaggaagtgagcgccgcccaccgggccagatacttctggggcaatctgcctggcatgaacagacccctggccagcaccgtgaacgacaagctggagctgcaggagtgcctggagcacggccggatcgccaagttcagcaaggtgagaaccatcaccacccgaagcaacagcatcaaacaaggcaaggaccagcactttcctgtgttcatgaacgagaaggaggacatcctgtggtgtaccgagatggagagagtgttcgggttcccagtccactacacagatgtcagcaacatgtctagactggccagacagagactgctgggaagaagctggtccgtccctgtgatcagacacctgttcgcccctctgaaggagtacttcgcctgcgtgagcagcggcaacagcaacgccaacagccggggccccagcttctctagcggcctggtgccactgtccctgagagggagccacatgggccccatggagatctacaaaaccgtgagcgcctggaagcggcagcctgtgcgcgtgctgagcctgtttcggaatatcgataaagtcctgaaaagcctgggattcctggagagcggctctggctccggcggtggcaccctgaagtacgtggaggatgtgacaaacgtggtcagacgggatgtggagaagtggggccccttcgatctggtgtacggcagcacccaacccctgggcagctcttgtgaccggtgccctggctggtacatgtttcagttccaccggatcctgcagtacgccctgccgagacaggagtcccagcggccattcttttggattttcatggacaacttgctgctgaccgaggatgaccaggaaactaccactcggttcctgcagaccgaagccgtgaccctgcaggacgtgagaggccgggactaccagaacgccatgcgggtgtggtccaacatccctggactgaaaagcaagcacgcacctctgacccctaaagaagaggagtacctgcaggcccaggtgcggagcagaagcaagctggacgcccctaaggtggatctgctggtgaagaattgcctcctgcccctgagagagtacttcaagtatttcagccagaatagtctgcccctgggaggcagcggcggcggcctgcagggcggcgtgaccttcgaggacgtggccgtggacttcacccaggaggagtggcagaggctgagccccgagcagagggacctgtacagggacgtgaccctggagaactacaggaacctggtgagcatgggcgagcaggacagcaccaagcccgaggtgatcctgaggctggagaacggcgaggagccctggatggtgggcacccaggagctgaggagctgcagccccgccggcaaggacggcggcccaagcagcggcgcccctcctcccagcggcggcagcccagccggctccccaacctctaccgaggagggcacctctgagtccgccacccccgagagcggccctggcacctccaccgagcccagcgagggcagcgcacccggcagccctgccggcagccccacctccacagaggagggaaccagcaccgagcccagcgaaggcagcgccccaggcaccagcaccgagcctagtgagcaggagattaaacggatcaacaagatcagaagaagacttgtgaaagacagcaacaccaagaaggccggcaagacaggccccatgaaaaccctgctggttagagtgatgacacccgatctgagagagcggctggaaaacctgagaaagaagcctgaaaatatcccccagcccatcagcaatacatctagagccaacctgaataagctgctgaccgattacaccgaaatgaagaaggcgatcctgcatgtgtactgggaagagttccagaaggaccctgtgggcctgatgagccgggtggcccagcctgccagcaagaagatcgatcagaacaagctgaaacctgagatggacgagaagggcaacctgaccaccgccggctttgcctgctctcagtgtggccagcccctgttcgtgtacaagctggagcaggtgtctgagaagggcaaggcttacaccaactacttcggacggtgcaatgtggccgagcacgaaaagctgatcctgctggcccagctgaagcccgagaaggatagcgacgaagccgtgacatatagcctgggaaagtttgggcagagggccctggatttctacagcattcatgtgaccaaggagtccacccaccccgtgaagcccctggcccagatcgccggaaacagatacgcctccggacctgtgggaaaggccctgagcgacgcatgtatgggcacaatcgcctccttcctgtctaagtaccaggacatcatcatcgaacaccagaaggtggtgaagggcaaccagaagagactggagagcctgcgggagctggccggcaaggaaaacctggaataccctagcgtgaccctgccacctcagcctcacaccaaggagggcgttgatgcctacaacgaagtgatcgcccgggtgcgaatgtgggtgaacctgaacctgtggcagaagctgaagctaagcagagatgatgccaagcctctgctgagactgaagggattcccttcctttcctctggtcgagagacaggccaacgaagtggactggtgggacatggtgtgtaacgtgaagaagctgatcaacgagaaaaaggaggatggcaaggtgttttggcagaatctggctggctacaagagacaggaagccctgagaccatacctgagcagcgaggaagatcggaagaagggaaagaaattcgctcggtaccagctgggcgacctgctgctgcacctggaaaagaagcacggcgaggactggggaaaggtgtacgacgaggcctgggagcggattgacaagaaagtggaaggcctgagcaagcacatcaagctggaagaggaacggagaagcgaggacgcccagagcaaggccgccctgaccgactggctgcgggctaaggccagcttcgtgatcgagggcctgaaggaggccgacaaggacgagttctgcagatgcgagctgaagctgcagaagtggtacggggacctgcggggaaagcccttcgccatcgaagccgagaacagcatcctggacatcagcggcttcagcaagcagtacaactgtgccttcatctggcagaaggacggcgtgaagaagctgaacctgtacctgatcatcaactacttcaagggcggcaagctgcggttcaagaagatcaaacctgaagccttcgaagccaacagattctacaccgtgatcaacaaaaagagcggcgagatcgtgcccatggaggtgaacttcaacttcgacgaccccaacctgatcatcctgcctctggcctttggcaagagacagggcagagaattcatctggaacgacctgctgtccctggaaaccggcagcctgaagctggccaacggaagagtgatcgagaagacactgtacaacagaagaacccggcaggatgagcctgccctgttcgtggccctgaccttcgagcggcgggaggtcctggactcctccaatatcaaaccaatgaacctgatcggcgtggcaagaggcgaaaacatccccgccgtgatcgccctgaccgaccccgagggctgcccactgagccggtttaaggatagcctgggaaacccaacccacatcctgagaatcggcgagagctataaggagaagcagcggaccatccaggccaagaaggaggtggagcagcggagagccggcggctacagccggaagtacgccagcaaagccaagaatctggcagacgatatggtgagaaacaccgctagagatctgctgtactacgccgtgacccaggatgccatgctgatcttcgccaacctgagccggggcttcggccggcagggcaagcggaccttcatggccgagagacagtacacacggatggaggactggctgaccgccaagctggcctacgagggcctgagcaagacctacctgtccaagacactggcccagtacacctccaagacatgcagcaactgtgggtttaccatcaccagcgccgactacgacagggtgctggagaagctgaagaagacagcaacaggctggatgaccacaattaacggcaaggagctgaaggtggagggccagattacctactacaacagatacaagagacagaacgtagtcaaggacctgtccgtcgagctggatagactgagcgaagaatctgtgaacaacgacatctcctcctggacaaagggcagaagcggagaagctctgagcctcctgaagaaaagattctcccatagacccgtgcaggagaagttcgtgtgcctgaactgcggcttcgagacacacgcagccgagcaagccgccctgaacatcgccagatcctggctgttcctgcggagccaggagtacaagaaataccagacaaacaagacaaccggcaacaccgataagagagccttcgtcgagacctggcagtccttttaccggaagaagcttaaggaggtgtggaaacctgccgtgcggtctggcggatctggcggaggctccaccagccccaagaaaaagagaaaagtctaagctgccttctgcggggcttgccttctggccatgcccttcttctctcccttgcacctgtacctcttggtctttgaataaagcctgagtaggaaggctagcaaaaaaaaaaaaaaaaaaaaaaaaaaaaaaaaaaaaaaaaaaaaaaaaaaaaaaaaaaaaaaaaaaaaaaaaaaaaaaaa

SEQ ID NO: 13016 - RNA, 5785 nt, synthetic construct
  source 1..5785: mol_type = other RNA
aggaaataagagagaaaagaagagtaagaagaaatataagagccaccatggcccctaagaagaagcgtaaagtgagccggatggaacgcctcgtctacgaggtgcggcagaagtgcagaaacatcgaggacatctgcatctcctgcggatctctgaacgtgaccctggagcacccactgttcatcggcggcatgtgccagaactgtaaaaactgttttctggagtgtgcctatcaatacgacgatgacggctaccagagctactgcaccatctgttgcggcggaagagaggtgctgatgtgtggaaataacaactgctgccggtgcttctgcgtggaatgcgtggacctgctggtgggccccggcgccgcccaggccgctattaaggaagatccttggaactgctacatgtgcggccacaagggcacatacggcctgctgagacggagagaggactggcctagcagactgcagatgttcttcgccaataaccacgaccaggagttcgacccccctaaggtgtaccctcccgtccccgccgagaagagaaagcccatccgggtcctgagcctgttcgatggcatcgccaccggtctgctggtgctgaaggacctgggcatccaggtggataggtacattgcctccgaggtgtgcgaggactccatcaccgtgggaatggtgcgtcatcagggcaagatcatgtacgtgggcgacgtgcggagcgtgacacagaagcatatccaggagtggggccctttcgacctggtgatcggcggcagcccttgcaatgacctgagcatcgtgaacccagcccggaagggcctgtacgagggaaccggcagactgttcttcgagttttacagactgctgcacgacgcccggcctaaggaaggcgacgaccggcccttcttttggctgttcgagaatgtggtggccatgggagtcagcgacaagcgggatattagccggttcctggagagcaaccccgtgatgatcgatgccaaggaagtgagcgccgcccaccgggccagatacttctggggcaatctgcctggcatgaacagacccctggccagcaccgtgaacgacaagctggagctgcaggagtgcctggagcacggccggatcgccaagttcagcaaggtgagaaccatcaccacccgaagcaacagcatcaaacaaggcaaggaccagcactttcctgtgttcatgaacgagaaggaggacatcctgtggtgtaccgagatggagagagtgttcgggttcccagtccactacacagatgtcagcaacatgtctagactggccagacagagactgctgggaagaagctggtccgtccctgtgatcagacacctgttcgcccctctgaaggagtacttcgcctgcgtgagcagcggcaacagcaacgccaacagccggggccccagcttctctagcggcctggtgccactgtccctgagagggagccacatgggccccatggagatctacaaaaccgtgagcgcctggaagcggcagcctgtgcgcgtgctgagcctgtttcggaatatcgataaagtcctgaaaagcctgggattcctggagagcggctctggctccggcggtggcaccctgaagtacgtggaggatgtgacaaacgtggtcagacgggatgtggagaagtggggccccttcgatctggtgtacggcagcacccaacccctgggcagctcttgtgaccggtgccctggctggtacatgtttcagttccaccggatcctgcagtacgccctgccgagacaggagtcccagcggccattcttttggattttcatggacaacttgctgctgaccgaggatgaccaggaaactaccactcggttcctgcagaccgaagccgtgaccctgcaggacgtgagaggccgggactaccagaacgccatgcgggtgtggtccaacatccctggactgaaaagcaagcacgcacctctgacccctaaagaagaggagtacctgcaggcccaggtgcggagcagaagcaagctggacgcccctaaggtggatctgctggtgaagaattgcctcctgcccctgagagagtacttcaagtatttcagccagaatagtctgcccctgggaggcagcggcggcggctaccagacccccgtgagcttcaaggacgtggtggtgggcttcacccaggaggagtggcactggctgagccccgcccagagggccctgtacagggacgtgatgctggagacctacagcaacctggtgagcgtgggctacgagggcaccaagcccgacgtgatcctgaggctggagcaggaggaggccccctggatcggcgaggccgcctgccccggctgccactgctggggcatcagcaagctgggcggcccaagcagcggcgcccctcctcccagcggcggcagcccagccggctccccaacctctaccgaggagggcacctctgagtccgccacccccgagagcggccctggcacctccaccgagcccagcgagggcagcgcacccggcagccctgccggcagccccacctccacagaggagggaaccagcaccgagcccagcgaaggcagcgccccaggcaccagcaccgagcctagtgagcaggagattaaacggatcaacaagatcagaagaagacttgtgaaagacagcaacaccaagaaggccggcaagacaggccccatgaaaaccctgctggttagagtgatgacacccgatctgagagagcggctggaaaacctgagaaagaagcctgaaaatatcccccagcccatcagcaatacatctagagccaacctgaataagctgctgaccgattacaccgaaatgaagaaggcgatcctgcatgtgtactgggaagagttccagaaggaccctgtgggcctgatgagccgggtggcccagcctgccagcaagaagatcgatcagaacaagctgaaacctgagatggacgagaagggcaacctgaccaccgccggctttgcctgctctcagtgtggccagcccctgttcgtgtacaagctggagcaggtgtctgagaagggcaaggcttacaccaactacttcggacggtgcaatgtggccgagcacgaaaagctgatcctgctggcccagctgaagcccgagaaggatagcgacgaagccgtgacatatagcctgggaaagtttgggcagagggccctggatttctacagcattcatgtgaccaaggagtccacccaccccgtgaagcccctggcccagatcgccggaaacagatacgcctccggacctgtgggaaaggccctgagcgacgcatgtatgggcacaatcgcctccttcctgtctaagtaccaggacatcatcatcgaacaccagaaggtggtgaagggcaaccagaagagactggagagcctgcgggagctggccggcaaggaaaacctggaataccctagcgtgaccctgccacctcagcctcacaccaaggagggcgttgatgcctacaacgaagtgatcgcccgggtgcgaatgtgggtgaacctgaacctgtggcagaagctgaagctaagcagagatgatgccaagcctctgctgagactgaagggattcccttcctttcctctggtcgagagacaggccaacgaagtggactggtgggacatggtgtgtaacgtgaagaagctgatcaacgagaaaaaggaggatggcaaggtgttttggcagaatctggctggctacaagagacaggaagccctgagaccatacctgagcagcgaggaagatcggaagaagggaaagaaattcgctcggtaccagctgggcgacctgctgctgcacctggaaaagaagcacggcgaggactggggaaaggtgtacgacgaggcctgggagcggattgacaagaaagtggaaggcctgagcaagcacatcaagctggaagaggaacggagaagcgaggacgcccagagcaaggccgccctgaccgactggctgcgggctaaggccagcttcgtgatcgagggcctgaaggaggccgacaaggacgagttctgcagatgcgagctgaagctgcagaagtggtacggggacctgcggggaaagcccttcgccatcgaagccgagaacagcatcctggacatcagcggcttcagcaagcagtacaactgtgccttcatctggcagaaggacggcgtgaagaagctgaacctgtacctgatcatcaactacttcaagggcggcaagctgcggttcaagaagatcaaacctgaagccttcgaagccaacagattctacaccgtgatcaacaaaaagagcggcgagatcgtgcccatggaggtgaacttcaacttcgacgaccccaacctgatcatcctgcctctggcctttggcaagagacagggcagagaattcatctggaacgacctgctgtccctggaaaccggcagcctgaagctggccaacggaagagtgatcgagaagacactgtacaacagaagaacccggcaggatgagcctgccctgttcgtggccctgaccttcgagcggcgggaggtcctggactcctccaatatcaaaccaatgaacctgatcggcgtggcaagaggcgaaaacatccccgccgtgatcgccctgaccgaccccgagggctgcccactgagccggtttaaggatagcctgggaaacccaacccacatcctgagaatcggcgagagctataaggagaagcagcggaccatccaggccaagaaggaggtggagcagcggagagccggcggctacagccggaagtacgccagcaaagccaagaatctggcagacgatatggtgagaaacaccgctagagatctgctgtactacgccgtgacccaggatgccatgctgatcttcgccaacctgagccggggcttcggccggcagggcaagcggaccttcatggccgagagacagtacacacggatggaggactggctgaccgccaagctggcctacgagggcctgagcaagacctacctgtccaagacactggcccagtacacctccaagacatgcagcaactgtgggtttaccatcaccagcgccgactacgacagggtgctggagaagctgaagaagacagcaacaggctggatgaccacaattaacggcaaggagctgaaggtggagggccagattacctactacaacagatacaagagacagaacgtagtcaaggacctgtccgtcgagctggatagactgagcgaagaatctgtgaacaacgacatctcctcctggacaaagggcagaagcggagaagctctgagcctcctgaagaaaagattctcccatagacccgtgcaggagaagttcgtgtgcctgaactgcggcttcgagacacacgcagccgagcaagccgccctgaacatcgccagatcctggctgttcctgcggagccaggagtacaagaaataccagacaaacaagacaaccggcaacaccgataagagagccttcgtcgagacctggcagtccttttaccggaagaagcttaaggaggtgtggaaacctgccgtgcggtctggcggatctggcggaggctccaccagccccaagaaaaagagaaaagtctaagctgccttctgcggggcttgccttctggccatgcccttcttctctcccttgcacctgtacctcttggtctttgaataaagcctgagtaggaaggctagcaaaaaaaaaaaaaaaaaaaaaaaaaaaaaaaaaaaaaaaaaaaaaaaaaaaaaaaaaaaaaaaaaaaaaaaaaaaaaaaa

SEQ ID NO: 13017 - RNA, 5785 nt, synthetic construct
  source 1..5785: mol_type = other RNA
aggaaataagagagaaaagaagagtaagaagaaatataagagccaccatggcccctaagaagaagcgtaaagtgagccggatggaacgcctcgtctacgaggtgcggcagaagtgcagaaacatcgaggacatctgcatctcctgcggatctctgaacgtgaccctggagcacccactgttcatcggcggcatgtgccagaactgtaaaaactgttttctggagtgtgcctatcaatacgacgatgacggctaccagagctactgcaccatctgttgcggcggaagagaggtgctgatgtgtggaaataacaactgctgccggtgcttctgcgtggaatgcgtggacctgctggtgggccccggcgccgcccaggccgctattaaggaagatccttggaactgctacatgtgcggccacaagggcacatacggcctgctgagacggagagaggactggcctagcagactgcagatgttcttcgccaataaccacgaccaggagttcgacccccctaaggtgtaccctcccgtccccgccgagaagagaaagcccatccgggtcctgagcctgttcgatggcatcgccaccggtctgctggtgctgaaggacctgggcatccaggtggataggtacattgcctccgaggtgtgcgaggactccatcaccgtgggaatggtgcgtcatcagggcaagatcatgtacgtgggcgacgtgcggagcgtgacacagaagcatatccaggagtggggccctttcgacctggtgatcggcggcagcccttgcaatgacctgagcatcgtgaacccagcccggaagggcctgtacgagggaaccggcagactgttcttcgagttttacagactgctgcacgacgcccggcctaaggaaggcgacgaccggcccttcttttggctgttcgagaatgtggtggccatgggagtcagcgacaagcgggatattagccggttcctggagagcaaccccgtgatgatcgatgccaaggaagtgagcgccgcccaccgggccagatacttctggggcaatctgcctggcatgaacagacccctggccagcaccgtgaacgacaagctggagctgcaggagtgcctggagcacggccggatcgccaagttcagcaaggtgagaaccatcaccacccgaagcaacagcatcaaacaaggcaaggaccagcactttcctgtgttcatgaacgagaaggaggacatcctgtggtgtaccgagatggagagagtgttcgggttcccagtccactacacagatgtcagcaacatgtctagactggccagacagagactgctgggaagaagctggtccgtccctgtgatcagacacctgttcgcccctctgaaggagtacttcgcctgcgtgagcagcggcaacagcaacgccaacagccggggccccagcttctctagcggcctggtgccactgtccctgagagggagccacatgggccccatggagatctacaaaaccgtgagcgcctggaagcggcagcctgtgcgcgtgctgagcctgtttcggaatatcgataaagtcctgaaaagcctgggattcctggagagcggctctggctccggcggtggcaccctgaagtacgtggaggatgtgacaaacgtggtcagacgggatgtggagaagtggggccccttcgatctggtgtacggcagcacccaacccctgggcagctcttgtgaccggtgccctggctggtacatgtttcagttccaccggatcctgcagtacgccctgccgagacaggagtcccagcggccattcttttggattttcatggacaacttgctgctgaccgaggatgaccaggaaactaccactcggttcctgcagaccgaagccgtgaccctgcaggacgtgagaggccgggactaccagaacgccatgcgggtgtggtccaacatccctggactgaaaagcaagcacgcacctctgacccctaaagaagaggagtacctgcaggcccaggtgcggagcagaagcaagctggacgcccctaaggtggatctgctggtgaagaattgcctcctgcccctgagagagtacttcaagtatttcagccagaatagtctgcccctgggaggcagcggcggcggcgtgcacggcagcgtgaccttcagggacgtggccatcgacttcagccaggaggagtgggagtgcctgcagcccgagcagaggaccctgtacagggacgtgatgctggagaactacagccacctgatcagcctgggcagcagcgtgagcaagcccgacgtgatcaccctgctggagcaggagaaggagccctggatcgtggtgaggaaggagaccagcaggtggtaccccgacctggagagcaagggcggcccaagcagcggcgcccctcctcccagcggcggcagcccagccggctccccaacctctaccgaggagggcacctctgagtccgccacccccgagagcggccctggcacctccaccgagcccagcgagggcagcgcacccggcagccctgccggcagccccacctccacagaggagggaaccagcaccgagcccagcgaaggcagcgccccaggcaccagcaccgagcctagtgagcaggagattaaacggatcaacaagatcagaagaagacttgtgaaagacagcaacaccaagaaggccggcaagacaggccccatgaaaaccctgctggttagagtgatgacacccgatctgagagagcggctggaaaacctgagaaagaagcctgaaaatatcccccagcccatcagcaatacatctagagccaacctgaataagctgctgaccgattacaccgaaatgaagaaggcgatcctgcatgtgtactgggaagagttccagaaggaccctgtgggcctgatgagccgggtggcccagcctgccagcaagaagatcgatcagaacaagctgaaacctgagatggacgagaagggcaacctgaccaccgccggctttgcctgctctcagtgtggccagcccctgttcgtgtacaagctggagcaggtgtctgagaagggcaaggcttacaccaactacttcggacggtgcaatgtggccgagcacgaaaagctgatcctgctggcccagctgaagcccgagaaggatagcgacgaagccgtgacatatagcctgggaaagtttgggcagagggccctggatttctacagcattcatgtgaccaaggagtccacccaccccgtgaagcccctggcccagatcgccggaaacagatacgcctccggacctgtgggaaaggccctgagcgacgcatgtatgggcacaatcgcctccttcctgtctaagtaccaggacatcatcatcgaacaccagaaggtggtgaagggcaaccagaagagactggagagcctgcgggagctggccggcaaggaaaacctggaataccctagcgtgaccctgccacctcagcctcacaccaaggagggcgttgatgcctacaacgaagtgatcgcccgggtgcgaatgtgggtgaacctgaacctgtggcagaagctgaagctaagcagagatgatgccaagcctctgctgagactgaagggattcccttcctttcctctggtcgagagacaggccaacgaagtggactggtgggacatggtgtgtaacgtgaagaagctgatcaacgagaaaaaggaggatggcaaggtgttttggcagaatctggctggctacaagagacaggaagccctgagaccatacctgagcagcgaggaagatcggaagaagggaaagaaattcgctcggtaccagctgggcgacctgctgctgcacctggaaaagaagcacggcgaggactggggaaaggtgtacgacgaggcctgggagcggattgacaagaaagtggaaggcctgagcaagcacatcaagctggaagaggaacggagaagcgaggacgcccagagcaaggccgccctgaccgactggctgcgggctaaggccagcttcgtgatcgagggcctgaaggaggccgacaaggacgagttctgcagatgcgagctgaagctgcagaagtggtacggggacctgcggggaaagcccttcgccatcgaagccgagaacagcatcctggacatcagcggcttcagcaagcagtacaactgtgccttcatctggcagaaggacggcgtgaagaagctgaacctgtacctgatcatcaactacttcaagggcggcaagctgcggttcaagaagatcaaacctgaagccttcgaagccaacagattctacaccgtgatcaacaaaaagagcggcgagatcgtgcccatggaggtgaacttcaacttcgacgaccccaacctgatcatcctgcctctggcctttggcaagagacagggcagagaattcatctggaacgacctgctgtccctggaaaccggcagcctgaagctggccaacggaagagtgatcgagaagacactgtacaacagaagaacccggcaggatgagcctgccctgttcgtggccctgaccttcgagcggcgggaggtcctggactcctccaatatcaaaccaatgaacctgatcggcgtggcaagaggcgaaaacatccccgccgtgatcgccctgaccgaccccgagggctgcccactgagccggtttaaggatagcctgggaaacccaacccacatcctgagaatcggcgagagctataaggagaagcagcggaccatccaggccaagaaggaggtggagcagcggagagccggcggctacagccggaagtacgccagcaaagccaagaatctggcagacgatatggtgagaaacaccgctagagatctgctgtactacgccgtgacccaggatgccatgctgatcttcgccaacctgagccggggcttcggccggcagggcaagcggaccttcatggccgagagacagtacacacggatggaggactggctgaccgccaagctggcctacgagggcctgagcaagacctacctgtccaagacactggcccagtacacctccaagacatgcagcaactgtgggtttaccatcaccagcgccgactacgacagggtgctggagaagctgaagaagacagcaacaggctggatgaccacaattaacggcaaggagctgaaggtggagggccagattacctactacaacagatacaagagacagaacgtagtcaaggacctgtccgtcgagctggatagactgagcgaagaatctgtgaacaacgacatctcctcctggacaaagggcagaagcggagaagctctgagcctcctgaagaaaagattctcccatagacccgtgcaggagaagttcgtgtgcctgaactgcggcttcgagacacacgcagccgagcaagccgccctgaacatcgccagatcctggctgttcctgcggagccaggagtacaagaaataccagacaaacaagacaaccggcaacaccgataagagagccttcgtcgagacctggcagtccttttaccggaagaagcttaaggaggtgtggaaacctgccgtgcggtctggcggatctggcggaggctccaccagccccaagaaaaagagaaaagtctaagctgccttctgcggggcttgccttctggccatgcccttcttctctcccttgcacctgtacctcttggtctttgaataaagcctgagtaggaaggctagcaaaaaaaaaaaaaaaaaaaaaaaaaaaaaaaaaaaaaaaaaaaaaaaaaaaaaaaaaaaaaaaaaaaaaaaaaaaaaaaa

SEQ ID NO: 13018 - RNA, 5785 nt, synthetic construct
  source 1..5785: mol_type = other RNA
aggaaataagagagaaaagaagagtaagaagaaatataagagccaccatggcccctaagaagaagcgtaaagtgagccggatggaacgcctcgtctacgaggtgcggcagaagtgcagaaacatcgaggacatctgcatctcctgcggatctctgaacgtgaccctggagcacccactgttcatcggcggcatgtgccagaactgtaaaaactgttttctggagtgtgcctatcaatacgacgatgacggctaccagagctactgcaccatctgttgcggcggaagagaggtgctgatgtgtggaaataacaactgctgccggtgcttctgcgtggaatgcgtggacctgctggtgggccccggcgccgcccaggccgctattaaggaagatccttggaactgctacatgtgcggccacaagggcacatacggcctgctgagacggagagaggactggcctagcagactgcagatgttcttcgccaataaccacgaccaggagttcgacccccctaaggtgtaccctcccgtccccgccgagaagagaaagcccatccgggtcctgagcctgttcgatggcatcgccaccggtctgctggtgctgaaggacctgggcatccaggtggataggtacattgcctccgaggtgtgcgaggactccatcaccgtgggaatggtgcgtcatcagggcaagatcatgtacgtgggcgacgtgcggagcgtgacacagaagcatatccaggagtggggccctttcgacctggtgatcggcggcagcccttgcaatgacctgagcatcgtgaacccagcccggaagggcctgtacgagggaaccggcagactgttcttcgagttttacagactgctgcacgacgcccggcctaaggaaggcgacgaccggcccttcttttggctgttcgagaatgtggtggccatgggagtcagcgacaagcgggatattagccggttcctggagagcaaccccgtgatgatcgatgccaaggaagtgagcgccgcccaccgggccagatacttctggggcaatctgcctggcatgaacagacccctggccagcaccgtgaacgacaagctggagctgcaggagtgcctggagcacggccggatcgccaagttcagcaaggtgagaaccatcaccacccgaagcaacagcatcaaacaaggcaaggaccagcactttcctgtgttcatgaacgagaaggaggacatcctgtggtgtaccgagatggagagagtgttcgggttcccagtccactacacagatgtcagcaacatgtctagactggccagacagagactgctgggaagaagctggtccgtccctgtgatcagacacctgttcgcccctctgaaggagtacttcgcctgcgtgagcagcggcaacagcaacgccaacagccggggccccagcttctctagcggcctggtgccactgtccctgagagggagccacatgggccccatggagatctacaaaaccgtgagcgcctggaagcggcagcctgtgcgcgtgctgagcctgtttcggaatatcgataaagtcctgaaaagcctgggattcctggagagcggctctggctccggcggtggcaccctgaagtacgtggaggatgtgacaaacgtggtcagacgggatgtggagaagtggggccccttcgatctggtgtacggcagcacccaacccctgggcagctcttgtgaccggtgccctggctggtacatgtttcagttccaccggatcctgcagtacgccctgccgagacaggagtcccagcggccattcttttggattttcatggacaacttgctgctgaccgaggatgaccaggaaactaccactcggttcctgcagaccgaagccgtgaccctgcaggacgtgagaggccgggactaccagaacgccatgcgggtgtggtccaacatccctggactgaaaagcaagcacgcacctctgacccctaaagaagaggagtacctgcaggcccaggtgcggagcagaagcaagctggacgcccctaaggtggatctgctggtgaagaattgcctcctgcccctgagagagtacttcaagtatttcagccagaatagtctgcccctgggaggcagcggcggcggcttccaggagctggtgagcttcaacgacgtgaccgtgggcttcacccaggaggagtggcagcacctggaccccagccagaggagcctgtacagggaggtgatgctggagaactacagccacctggtgagcgtgggctactgcgtgaccaagcccgaggtgatcttcaggctggagcagggcgaggagccctggatcagcgaggccgagttccccagccagagcttccccgagctgtggaaggccggcggcccaagcagcggcgcccctcctcccagcggcggcagcccagccggctccccaacctctaccgaggagggcacctctgagtccgccacccccgagagcggccctggcacctccaccgagcccagcgagggcagcgcacccggcagccctgccggcagccccacctccacagaggagggaaccagcaccgagcccagcgaaggcagcgccccaggcaccagcaccgagcctagtgagcaggagattaaacggatcaacaagatcagaagaagacttgtgaaagacagcaacaccaagaaggccggcaagacaggccccatgaaaaccctgctggttagagtgatgacacccgatctgagagagcggctggaaaacctgagaaagaagcctgaaaatatcccccagcccatcagcaatacatctagagccaacctgaataagctgctgaccgattacaccgaaatgaagaaggcgatcctgcatgtgtactgggaagagttccagaaggaccctgtgggcctgatgagccgggtggcccagcctgccagcaagaagatcgatcagaacaagctgaaacctgagatggacgagaagggcaacctgaccaccgccggctttgcctgctctcagtgtggccagcccctgttcgtgtacaagctggagcaggtgtctgagaagggcaaggcttacaccaactacttcggacggtgcaatgtggccgagcacgaaaagctgatcctgctggcccagctgaagcccgagaaggatagcgacgaagccgtgacatatagcctgggaaagtttgggcagagggccctggatttctacagcattcatgtgaccaaggagtccacccaccccgtgaagcccctggcccagatcgccggaaacagatacgcctccggacctgtgggaaaggccctgagcgacgcatgtatgggcacaatcgcctccttcctgtctaagtaccaggacatcatcatcgaacaccagaaggtggtgaagggcaaccagaagagactggagagcctgcgggagctggccggcaaggaaaacctggaataccctagcgtgaccctgccacctcagcctcacaccaaggagggcgttgatgcctacaacgaagtgatcgcccgggtgcgaatgtgggtgaacctgaacctgtggcagaagctgaagctaagcagagatgatgccaagcctctgctgagactgaagggattcccttcctttcctctggtcgagagacaggccaacgaagtggactggtgggacatggtgtgtaacgtgaagaagctgatcaacgagaaaaaggaggatggcaaggtgttttggcagaatctggctggctacaagagacaggaagccctgagaccatacctgagcagcgaggaagatcggaagaagggaaagaaattcgctcggtaccagctgggcgacctgctgctgcacctggaaaagaagcacggcgaggactggggaaaggtgtacgacgaggcctgggagcggattgacaagaaagtggaaggcctgagcaagcacatcaagctggaagaggaacggagaagcgaggacgcccagagcaaggccgccctgaccgactggctgcgggctaaggccagcttcgtgatcgagggcctgaaggaggccgacaaggacgagttctgcagatgcgagctgaagctgcagaagtggtacggggacctgcggggaaagcccttcgccatcgaagccgagaacagcatcctggacatcagcggcttcagcaagcagtacaactgtgccttcatctggcagaaggacggcgtgaagaagctgaacctgtacctgatcatcaactacttcaagggcggcaagctgcggttcaagaagatcaaacctgaagccttcgaagccaacagattctacaccgtgatcaacaaaaagagcggcgagatcgtgcccatggaggtgaacttcaacttcgacgaccccaacctgatcatcctgcctctggcctttggcaagagacagggcagagaattcatctggaacgacctgctgtccctggaaaccggcagcctgaagctggccaacggaagagtgatcgagaagacactgtacaacagaagaacccggcaggatgagcctgccctgttcgtggccctgaccttcgagcggcgggaggtcctggactcctccaatatcaaaccaatgaacctgatcggcgtggcaagaggcgaaaacatccccgccgtgatcgccctgaccgaccccgagggctgcccactgagccggtttaaggatagcctgggaaacccaacccacatcctgagaatcggcgagagctataaggagaagcagcggaccatccaggccaagaaggaggtggagcagcggagagccggcggctacagccggaagtacgccagcaaagccaagaatctggcagacgatatggtgagaaacaccgctagagatctgctgtactacgccgtgacccaggatgccatgctgatcttcgccaacctgagccggggcttcggccggcagggcaagcggaccttcatggccgagagacagtacacacggatggaggactggctgaccgccaagctggcctacgagggcctgagcaagacctacctgtccaagacactggcccagtacacctccaagacatgcagcaactgtgggtttaccatcaccagcgccgactacgacagggtgctggagaagctgaagaagacagcaacaggctggatgaccacaattaacggcaaggagctgaaggtggagggccagattacctactacaacagatacaagagacagaacgtagtcaaggacctgtccgtcgagctggatagactgagcgaagaatctgtgaacaacgacatctcctcctggacaaagggcagaagcggagaagctctgagcctcctgaagaaaagattctcccatagacccgtgcaggagaagttcgtgtgcctgaactgcggcttcgagacacacgcagccgagcaagccgccctgaacatcgccagatcctggctgttcctgcggagccaggagtacaagaaataccagacaaacaagacaaccggcaacaccgataagagagccttcgtcgagacctggcagtccttttaccggaagaagcttaaggaggtgtggaaacctgccgtgcggtctggcggatctggcggaggctccaccagccccaagaaaaagagaaaagtctaagctgccttctgcggggcttgccttctggccatgcccttcttctctcccttgcacctgtacctcttggtctttgaataaagcctgagtaggaaggctagcaaaaaaaaaaaaaaaaaaaaaaaaaaaaaaaaaaaaaaaaaaaaaaaaaaaaaaaaaaaaaaaaaaaaaaaaaaaaaaaa

SEQ ID NO: 13019 - RNA, 5785 nt, synthetic construct
  source 1..5785: mol_type = other RNA
aggaaataagagagaaaagaagagtaagaagaaatataagagccaccatggcccctaagaagaagcgtaaagtgagccggatggaacgcctcgtctacgaggtgcggcagaagtgcagaaacatcgaggacatctgcatctcctgcggatctctgaacgtgaccctggagcacccactgttcatcggcggcatgtgccagaactgtaaaaactgttttctggagtgtgcctatcaatacgacgatgacggctaccagagctactgcaccatctgttgcggcggaagagaggtgctgatgtgtggaaataacaactgctgccggtgcttctgcgtggaatgcgtggacctgctggtgggccccggcgccgcccaggccgctattaaggaagatccttggaactgctacatgtgcggccacaagggcacatacggcctgctgagacggagagaggactggcctagcagactgcagatgttcttcgccaataaccacgaccaggagttcgacccccctaaggtgtaccctcccgtccccgccgagaagagaaagcccatccgggtcctgagcctgttcgatggcatcgccaccggtctgctggtgctgaaggacctgggcatccaggtggataggtacattgcctccgaggtgtgcgaggactccatcaccgtgggaatggtgcgtcatcagggcaagatcatgtacgtgggcgacgtgcggagcgtgacacagaagcatatccaggagtggggccctttcgacctggtgatcggcggcagcccttgcaatgacctgagcatcgtgaacccagcccggaagggcctgtacgagggaaccggcagactgttcttcgagttttacagactgctgcacgacgcccggcctaaggaaggcgacgaccggcccttcttttggctgttcgagaatgtggtggccatgggagtcagcgacaagcgggatattagccggttcctggagagcaaccccgtgatgatcgatgccaaggaagtgagcgccgcccaccgggccagatacttctggggcaatctgcctggcatgaacagacccctggccagcaccgtgaacgacaagctggagctgcaggagtgcctggagcacggccggatcgccaagttcagcaaggtgagaaccatcaccacccgaagcaacagcatcaaacaaggcaaggaccagcactttcctgtgttcatgaacgagaaggaggacatcctgtggtgtaccgagatggagagagtgttcgggttcccagtccactacacagatgtcagcaacatgtctagactggccagacagagactgctgggaagaagctggtccgtccctgtgatcagacacctgttcgcccctctgaaggagtacttcgcctgcgtgagcagcggcaacagcaacgccaacagccggggccccagcttctctagcggcctggtgccactgtccctgagagggagccacatgggccccatggagatctacaaaaccgtgagcgcctggaagcggcagcctgtgcgcgtgctgagcctgtttcggaatatcgataaagtcctgaaaagcctgggattcctggagagcggctctggctccggcggtggcaccctgaagtacgtggaggatgtgacaaacgtggtcagacgggatgtggagaagtggggccccttcgatctggtgtacggcagcacccaacccctgggcagctcttgtgaccggtgccctggctggtacatgtttcagttccaccggatcctgcagtacgccctgccgagacaggagtcccagcggccattcttttggattttcatggacaacttgctgctgaccgaggatgaccaggaaactaccactcggttcctgcagaccgaagccgtgaccctgcaggacgtgagaggccgggactaccagaacgccatgcgggtgtggtccaacatccctggactgaaaagcaagcacgcacctctgacccctaaagaagaggagtacctgcaggcccaggtgcggagcagaagcaagctggacgcccctaaggtggatctgctggtgaagaattgcctcctgcccctgagagagtacttcaagtatttcagccagaatagtctgcccctgggaggcagcggcggcggcagccaggagagcgtgagcttcaaggacgtgaccgtgggcttcacccaggaggagtggcagcacctggaccccagccagagggccctgtacagggacgtgatgctggagaactacagcaacctggtgagcgtgggctactgcgtgcacaagcccgaggtgatcttcaggctgcagcagggcgaggagccctggaagctggaggaggagttccccagccagagcttccccgaggtgtggaccgccggcggcccaagcagcggcgcccctcctcccagcggcggcagcccagccggctccccaacctctaccgaggagggcacctctgagtccgccacccccgagagcggccctggcacctccaccgagcccagcgagggcagcgcacccggcagccctgccggcagccccacctccacagaggagggaaccagcaccgagcccagcgaaggcagcgccccaggcaccagcaccgagcctagtgagcaggagattaaacggatcaacaagatcagaagaagacttgtgaaagacagcaacaccaagaaggccggcaagacaggccccatgaaaaccctgctggttagagtgatgacacccgatctgagagagcggctggaaaacctgagaaagaagcctgaaaatatcccccagcccatcagcaatacatctagagccaacctgaataagctgctgaccgattacaccgaaatgaagaaggcgatcctgcatgtgtactgggaagagttccagaaggaccctgtgggcctgatgagccgggtggcccagcctgccagcaagaagatcgatcagaacaagctgaaacctgagatggacgagaagggcaacctgaccaccgccggctttgcctgctctcagtgtggccagcccctgttcgtgtacaagctggagcaggtgtctgagaagggcaaggcttacaccaactacttcggacggtgcaatgtggccgagcacgaaaagctgatcctgctggcccagctgaagcccgagaaggatagcgacgaagccgtgacatatagcctgggaaagtttgggcagagggccctggatttctacagcattcatgtgaccaaggagtccacccaccccgtgaagcccctggcccagatcgccggaaacagatacgcctccggacctgtgggaaaggccctgagcgacgcatgtatgggcacaatcgcctccttcctgtctaagtaccaggacatcatcatcgaacaccagaaggtggtgaagggcaaccagaagagactggagagcctgcgggagctggccggcaaggaaaacctggaataccctagcgtgaccctgccacctcagcctcacaccaaggagggcgttgatgcctacaacgaagtgatcgcccgggtgcgaatgtgggtgaacctgaacctgtggcagaagctgaagctaagcagagatgatgccaagcctctgctgagactgaagggattcccttcctttcctctggtcgagagacaggccaacgaagtggactggtgggacatggtgtgtaacgtgaagaagctgatcaacgagaaaaaggaggatggcaaggtgttttggcagaatctggctggctacaagagacaggaagccctgagaccatacctgagcagcgaggaagatcggaagaagggaaagaaattcgctcggtaccagctgggcgacctgctgctgcacctggaaaagaagcacggcgaggactggggaaaggtgtacgacgaggcctgggagcggattgacaagaaagtggaaggcctgagcaagcacatcaagctggaagaggaacggagaagcgaggacgcccagagcaaggccgccctgaccgactggctgcgggctaaggccagcttcgtgatcgagggcctgaaggaggccgacaaggacgagttctgcagatgcgagctgaagctgcagaagtggtacggggacctgcggggaaagcccttcgccatcgaagccgagaacagcatcctggacatcagcggcttcagcaagcagtacaactgtgccttcatctggcagaaggacggcgtgaagaagctgaacctgtacctgatcatcaactacttcaagggcggcaagctgcggttcaagaagatcaaacctgaagccttcgaagccaacagattctacaccgtgatcaacaaaaagagcggcgagatcgtgcccatggaggtgaacttcaacttcgacgaccccaacctgatcatcctgcctctggcctttggcaagagacagggcagagaattcatctggaacgacctgctgtccctggaaaccggcagcctgaagctggccaacggaagagtgatcgagaagacactgtacaacagaagaacccggcaggatgagcctgccctgttcgtggccctgaccttcgagcggcgggaggtcctggactcctccaatatcaaaccaatgaacctgatcggcgtggcaagaggcgaaaacatccccgccgtgatcgccctgaccgaccccgagggctgcccactgagccggtttaaggatagcctgggaaacccaacccacatcctgagaatcggcgagagctataaggagaagcagcggaccatccaggccaagaaggaggtggagcagcggagagccggcggctacagccggaagtacgccagcaaagccaagaatctggcagacgatatggtgagaaacaccgctagagatctgctgtactacgccgtgacccaggatgccatgctgatcttcgccaacctgagccggggcttcggccggcagggcaagcggaccttcatggccgagagacagtacacacggatggaggactggctgaccgccaagctggcctacgagggcctgagcaagacctacctgtccaagacactggcccagtacacctccaagacatgcagcaactgtgggtttaccatcaccagcgccgactacgacagggtgctggagaagctgaagaagacagcaacaggctggatgaccacaattaacggcaaggagctgaaggtggagggccagattacctactacaacagatacaagagacagaacgtagtcaaggacctgtccgtcgagctggatagactgagcgaagaatctgtgaacaacgacatctcctcctggacaaagggcagaagcggagaagctctgagcctcctgaagaaaagattctcccatagacccgtgcaggagaagttcgtgtgcctgaactgcggcttcgagacacacgcagccgagcaagccgccctgaacatcgccagatcctggctgttcctgcggagccaggagtacaagaaataccagacaaacaagacaaccggcaacaccgataagagagccttcgtcgagacctggcagtccttttaccggaagaagcttaaggaggtgtggaaacctgccgtgcggtctggcggatctggcggaggctccaccagccccaagaaaaagagaaaagtctaagctgccttctgcggggcttgccttctggccatgcccttcttctctcccttgcacctgtacctcttggtctttgaataaagcctgagtaggaaggctagcaaaaaaaaaaaaaaaaaaaaaaaaaaaaaaaaaaaaaaaaaaaaaaaaaaaaaaaaaaaaaaaaaaaaaaaaaaaaaaaa

SEQ ID NO: 13020 - RNA, 5785 nt, synthetic construct
  source 1..5785: mol_type = other RNA
aggaaataagagagaaaagaagagtaagaagaaatataagagccaccatggcccctaagaagaagcgtaaagtgagccggatggaacgcctcgtctacgaggtgcggcagaagtgcagaaacatcgaggacatctgcatctcctgcggatctctgaacgtgaccctggagcacccactgttcatcggcggcatgtgccagaactgtaaaaactgttttctggagtgtgcctatcaatacgacgatgacggctaccagagctactgcaccatctgttgcggcggaagagaggtgctgatgtgtggaaataacaactgctgccggtgcttctgcgtggaatgcgtggacctgctggtgggccccggcgccgcccaggccgctattaaggaagatccttggaactgctacatgtgcggccacaagggcacatacggcctgctgagacggagagaggactggcctagcagactgcagatgttcttcgccaataaccacgaccaggagttcgacccccctaaggtgtaccctcccgtccccgccgagaagagaaagcccatccgggtcctgagcctgttcgatggcatcgccaccggtctgctggtgctgaaggacctgggcatccaggtggataggtacattgcctccgaggtgtgcgaggactccatcaccgtgggaatggtgcgtcatcagggcaagatcatgtacgtgggcgacgtgcggagcgtgacacagaagcatatccaggagtggggccctttcgacctggtgatcggcggcagcccttgcaatgacctgagcatcgtgaacccagcccggaagggcctgtacgagggaaccggcagactgttcttcgagttttacagactgctgcacgacgcccggcctaaggaaggcgacgaccggcccttcttttggctgttcgagaatgtggtggccatgggagtcagcgacaagcgggatattagccggttcctggagagcaaccccgtgatgatcgatgccaaggaagtgagcgccgcccaccgggccagatacttctggggcaatctgcctggcatgaacagacccctggccagcaccgtgaacgacaagctggagctgcaggagtgcctggagcacggccggatcgccaagttcagcaaggtgagaaccatcaccacccgaagcaacagcatcaaacaaggcaaggaccagcactttcctgtgttcatgaacgagaaggaggacatcctgtggtgtaccgagatggagagagtgttcgggttcccagtccactacacagatgtcagcaacatgtctagactggccagacagagactgctgggaagaagctggtccgtccctgtgatcagacacctgttcgcccctctgaaggagtacttcgcctgcgtgagcagcggcaacagcaacgccaacagccggggccccagcttctctagcggcctggtgccactgtccctgagagggagccacatgggccccatggagatctacaaaaccgtgagcgcctggaagcggcagcctgtgcgcgtgctgagcctgtttcggaatatcgataaagtcctgaaaagcctgggattcctggagagcggctctggctccggcggtggcaccctgaagtacgtggaggatgtgacaaacgtggtcagacgggatgtggagaagtggggccccttcgatctggtgtacggcagcacccaacccctgggcagctcttgtgaccggtgccctggctggtacatgtttcagttccaccggatcctgcagtacgccctgccgagacaggagtcccagcggccattcttttggattttcatggacaacttgctgctgaccgaggatgaccaggaaactaccactcggttcctgcagaccgaagccgtgaccctgcaggacgtgagaggccgggactaccagaacgccatgcgggtgtggtccaacatccctggactgaaaagcaagcacgcacctctgacccctaaagaagaggagtacctgcaggcccaggtgcggagcagaagcaagctggacgcccctaaggtggatctgctggtgaagaattgcctcctgcccctgagagagtacttcaagtatttcagccagaatagtctgcccctgggaggcagcggcggcggcgagatggtgaccttcaaggacgtggccgtggtgttcaccgaggaggagctgggcctgctggacagcgcccagaggaagctgtacagggacgtgatgctggagaacttcaggaacctgctgctggtggcccaccagcccttcaagcccgacctgatcagccagctggagagggaggagaagctgctgatggtggagatggagacccccaaggacggctgcagcggcaggaagaaccagcagaagggcggcccaagcagcggcgcccctcctcccagcggcggcagcccagccggctccccaacctctaccgaggagggcacctctgagtccgccacccccgagagcggccctggcacctccaccgagcccagcgagggcagcgcacccggcagccctgccggcagccccacctccacagaggagggaaccagcaccgagcccagcgaaggcagcgccccaggcaccagcaccgagcctagtgagcaggagattaaacggatcaacaagatcagaagaagacttgtgaaagacagcaacaccaagaaggccggcaagacaggccccatgaaaaccctgctggttagagtgatgacacccgatctgagagagcggctggaaaacctgagaaagaagcctgaaaatatcccccagcccatcagcaatacatctagagccaacctgaataagctgctgaccgattacaccgaaatgaagaaggcgatcctgcatgtgtactgggaagagttccagaaggaccctgtgggcctgatgagccgggtggcccagcctgccagcaagaagatcgatcagaacaagctgaaacctgagatggacgagaagggcaacctgaccaccgccggctttgcctgctctcagtgtggccagcccctgttcgtgtacaagctggagcaggtgtctgagaagggcaaggcttacaccaactacttcggacggtgcaatgtggccgagcacgaaaagctgatcctgctggcccagctgaagcccgagaaggatagcgacgaagccgtgacatatagcctgggaaagtttgggcagagggccctggatttctacagcattcatgtgaccaaggagtccacccaccccgtgaagcccctggcccagatcgccggaaacagatacgcctccggacctgtgggaaaggccctgagcgacgcatgtatgggcacaatcgcctccttcctgtctaagtaccaggacatcatcatcgaacaccagaaggtggtgaagggcaaccagaagagactggagagcctgcgggagctggccggcaaggaaaacctggaataccctagcgtgaccctgccacctcagcctcacaccaaggagggcgttgatgcctacaacgaagtgatcgcccgggtgcgaatgtgggtgaacctgaacctgtggcagaagctgaagctaagcagagatgatgccaagcctctgctgagactgaagggattcccttcctttcctctggtcgagagacaggccaacgaagtggactggtgggacatggtgtgtaacgtgaagaagctgatcaacgagaaaaaggaggatggcaaggtgttttggcagaatctggctggctacaagagacaggaagccctgagaccatacctgagcagcgaggaagatcggaagaagggaaagaaattcgctcggtaccagctgggcgacctgctgctgcacctggaaaagaagcacggcgaggactggggaaaggtgtacgacgaggcctgggagcggattgacaagaaagtggaaggcctgagcaagcacatcaagctggaagaggaacggagaagcgaggacgcccagagcaaggccgccctgaccgactggctgcgggctaaggccagcttcgtgatcgagggcctgaaggaggccgacaaggacgagttctgcagatgcgagctgaagctgcagaagtggtacggggacctgcggggaaagcccttcgccatcgaagccgagaacagcatcctggacatcagcggcttcagcaagcagtacaactgtgccttcatctggcagaaggacggcgtgaagaagctgaacctgtacctgatcatcaactacttcaagggcggcaagctgcggttcaagaagatcaaacctgaagccttcgaagccaacagattctacaccgtgatcaacaaaaagagcggcgagatcgtgcccatggaggtgaacttcaacttcgacgaccccaacctgatcatcctgcctctggcctttggcaagagacagggcagagaattcatctggaacgacctgctgtccctggaaaccggcagcctgaagctggccaacggaagagtgatcgagaagacactgtacaacagaagaacccggcaggatgagcctgccctgttcgtggccctgaccttcgagcggcgggaggtcctggactcctccaatatcaaaccaatgaacctgatcggcgtggcaagaggcgaaaacatccccgccgtgatcgccctgaccgaccccgagggctgcccactgagccggtttaaggatagcctgggaaacccaacccacatcctgagaatcggcgagagctataaggagaagcagcggaccatccaggccaagaaggaggtggagcagcggagagccggcggctacagccggaagtacgccagcaaagccaagaatctggcagacgatatggtgagaaacaccgctagagatctgctgtactacgccgtgacccaggatgccatgctgatcttcgccaacctgagccggggcttcggccggcagggcaagcggaccttcatggccgagagacagtacacacggatggaggactggctgaccgccaagctggcctacgagggcctgagcaagacctacctgtccaagacactggcccagtacacctccaagacatgcagcaactgtgggtttaccatcaccagcgccgactacgacagggtgctggagaagctgaagaagacagcaacaggctggatgaccacaattaacggcaaggagctgaaggtggagggccagattacctactacaacagatacaagagacagaacgtagtcaaggacctgtccgtcgagctggatagactgagcgaagaatctgtgaacaacgacatctcctcctggacaaagggcagaagcggagaagctctgagcctcctgaagaaaagattctcccatagacccgtgcaggagaagttcgtgtgcctgaactgcggcttcgagacacacgcagccgagcaagccgccctgaacatcgccagatcctggctgttcctgcggagccaggagtacaagaaataccagacaaacaagacaaccggcaacaccgataagagagccttcgtcgagacctggcagtccttttaccggaagaagcttaaggaggtgtggaaacctgccgtgcggtctggcggatctggcggaggctccaccagccccaagaaaaagagaaaagtctaagctgccttctgcggggcttgccttctggccatgcccttcttctctcccttgcacctgtacctcttggtctttgaataaagcctgagtaggaaggctagcaaaaaaaaaaaaaaaaaaaaaaaaaaaaaaaaaaaaaaaaaaaaaaaaaaaaaaaaaaaaaaaaaaaaaaaaaaaaaaaa

SEQ ID NO: 13021 - RNA, 5785 nt, synthetic construct
  source 1..5785: mol_type = other RNA
aggaaataagagagaaaagaagagtaagaagaaatataagagccaccatggcccctaagaagaagcgtaaagtgagccggatggaacgcctcgtctacgaggtgcggcagaagtgcagaaacatcgaggacatctgcatctcctgcggatctctgaacgtgaccctggagcacccactgttcatcggcggcatgtgccagaactgtaaaaactgttttctggagtgtgcctatcaatacgacgatgacggctaccagagctactgcaccatctgttgcggcggaagagaggtgctgatgtgtggaaataacaactgctgccggtgcttctgcgtggaatgcgtggacctgctggtgggccccggcgccgcccaggccgctattaaggaagatccttggaactgctacatgtgcggccacaagggcacatacggcctgctgagacggagagaggactggcctagcagactgcagatgttcttcgccaataaccacgaccaggagttcgacccccctaaggtgtaccctcccgtccccgccgagaagagaaagcccatccgggtcctgagcctgttcgatggcatcgccaccggtctgctggtgctgaaggacctgggcatccaggtggataggtacattgcctccgaggtgtgcgaggactccatcaccgtgggaatggtgcgtcatcagggcaagatcatgtacgtgggcgacgtgcggagcgtgacacagaagcatatccaggagtggggccctttcgacctggtgatcggcggcagcccttgcaatgacctgagcatcgtgaacccagcccggaagggcctgtacgagggaaccggcagactgttcttcgagttttacagactgctgcacgacgcccggcctaaggaaggcgacgaccggcccttcttttggctgttcgagaatgtggtggccatgggagtcagcgacaagcgggatattagccggttcctggagagcaaccccgtgatgatcgatgccaaggaagtgagcgccgcccaccgggccagatacttctggggcaatctgcctggcatgaacagacccctggccagcaccgtgaacgacaagctggagctgcaggagtgcctggagcacggccggatcgccaagttcagcaaggtgagaaccatcaccacccgaagcaacagcatcaaacaaggcaaggaccagcactttcctgtgttcatgaacgagaaggaggacatcctgtggtgtaccgagatggagagagtgttcgggttcccagtccactacacagatgtcagcaacatgtctagactggccagacagagactgctgggaagaagctggtccgtccctgtgatcagacacctgttcgcccctctgaaggagtacttcgcctgcgtgagcagcggcaacagcaacgccaacagccggggccccagcttctctagcggcctggtgccactgtccctgagagggagccacatgggccccatggagatctacaaaaccgtgagcgcctggaagcggcagcctgtgcgcgtgctgagcctgtttcggaatatcgataaagtcctgaaaagcctgggattcctggagagcggctctggctccggcggtggcaccctgaagtacgtggaggatgtgacaaacgtggtcagacgggatgtggagaagtggggccccttcgatctggtgtacggcagcacccaacccctgggcagctcttgtgaccggtgccctggctggtacatgtttcagttccaccggatcctgcagtacgccctgccgagacaggagtcccagcggccattcttttggattttcatggacaacttgctgctgaccgaggatgaccaggaaactaccactcggttcctgcagaccgaagccgtgaccctgcaggacgtgagaggccgggactaccagaacgccatgcgggtgtggtccaacatccctggactgaaaagcaagcacgcacctctgacccctaaagaagaggagtacctgcaggcccaggtgcggagcagaagcaagctggacgcccctaaggtggatctgctggtgaagaattgcctcctgcccctgagagagtacttcaagtatttcagccagaatagtctgcccctgggaggcagcggcggcggcatgcacctgaccgcctggccccagaagagcgtgaccttcgaggacgtggccgtgtacttcacccaggccgagtgggacggcctgagccccgcccagagggccctgtacagggacgtgatgctggagaactacggcaacgtggccagcctgggcttccccctgctgaagcccgccgtgatcagccagctggagggcggcggcgagctgggcggccccagccccctggccgccggcaccggcctgggcggcccaagcagcggcgcccctcctcccagcggcggcagcccagccggctccccaacctctaccgaggagggcacctctgagtccgccacccccgagagcggccctggcacctccaccgagcccagcgagggcagcgcacccggcagccctgccggcagccccacctccacagaggagggaaccagcaccgagcccagcgaaggcagcgccccaggcaccagcaccgagcctagtgagcaggagattaaacggatcaacaagatcagaagaagacttgtgaaagacagcaacaccaagaaggccggcaagacaggccccatgaaaaccctgctggttagagtgatgacacccgatctgagagagcggctggaaaacctgagaaagaagcctgaaaatatcccccagcccatcagcaatacatctagagccaacctgaataagctgctgaccgattacaccgaaatgaagaaggcgatcctgcatgtgtactgggaagagttccagaaggaccctgtgggcctgatgagccgggtggcccagcctgccagcaagaagatcgatcagaacaagctgaaacctgagatggacgagaagggcaacctgaccaccgccggctttgcctgctctcagtgtggccagcccctgttcgtgtacaagctggagcaggtgtctgagaagggcaaggcttacaccaactacttcggacggtgcaatgtggccgagcacgaaaagctgatcctgctggcccagctgaagcccgagaaggatagcgacgaagccgtgacatatagcctgggaaagtttgggcagagggccctggatttctacagcattcatgtgaccaaggagtccacccaccccgtgaagcccctggcccagatcgccggaaacagatacgcctccggacctgtgggaaaggccctgagcgacgcatgtatgggcacaatcgcctccttcctgtctaagtaccaggacatcatcatcgaacaccagaaggtggtgaagggcaaccagaagagactggagagcctgcgggagctggccggcaaggaaaacctggaataccctagcgtgaccctgccacctcagcctcacaccaaggagggcgttgatgcctacaacgaagtgatcgcccgggtgcgaatgtgggtgaacctgaacctgtggcagaagctgaagctaagcagagatgatgccaagcctctgctgagactgaagggattcccttcctttcctctggtcgagagacaggccaacgaagtggactggtgggacatggtgtgtaacgtgaagaagctgatcaacgagaaaaaggaggatggcaaggtgttttggcagaatctggctggctacaagagacaggaagccctgagaccatacctgagcagcgaggaagatcggaagaagggaaagaaattcgctcggtaccagctgggcgacctgctgctgcacctggaaaagaagcacggcgaggactggggaaaggtgtacgacgaggcctgggagcggattgacaagaaagtggaaggcctgagcaagcacatcaagctggaagaggaacggagaagcgaggacgcccagagcaaggccgccctgaccgactggctgcgggctaaggccagcttcgtgatcgagggcctgaaggaggccgacaaggacgagttctgcagatgcgagctgaagctgcagaagtggtacggggacctgcggggaaagcccttcgccatcgaagccgagaacagcatcctggacatcagcggcttcagcaagcagtacaactgtgccttcatctggcagaaggacggcgtgaagaagctgaacctgtacctgatcatcaactacttcaagggcggcaagctgcggttcaagaagatcaaacctgaagccttcgaagccaacagattctacaccgtgatcaacaaaaagagcggcgagatcgtgcccatggaggtgaacttcaacttcgacgaccccaacctgatcatcctgcctctggcctttggcaagagacagggcagagaattcatctggaacgacctgctgtccctggaaaccggcagcctgaagctggccaacggaagagtgatcgagaagacactgtacaacagaagaacccggcaggatgagcctgccctgttcgtggccctgaccttcgagcggcgggaggtcctggactcctccaatatcaaaccaatgaacctgatcggcgtggcaagaggcgaaaacatccccgccgtgatcgccctgaccgaccccgagggctgcccactgagccggtttaaggatagcctgggaaacccaacccacatcctgagaatcggcgagagctataaggagaagcagcggaccatccaggccaagaaggaggtggagcagcggagagccggcggctacagccggaagtacgccagcaaagccaagaatctggcagacgatatggtgagaaacaccgctagagatctgctgtactacgccgtgacccaggatgccatgctgatcttcgccaacctgagccggggcttcggccggcagggcaagcggaccttcatggccgagagacagtacacacggatggaggactggctgaccgccaagctggcctacgagggcctgagcaagacctacctgtccaagacactggcccagtacacctccaagacatgcagcaactgtgggtttaccatcaccagcgccgactacgacagggtgctggagaagctgaagaagacagcaacaggctggatgaccacaattaacggcaaggagctgaaggtggagggccagattacctactacaacagatacaagagacagaacgtagtcaaggacctgtccgtcgagctggatagactgagcgaagaatctgtgaacaacgacatctcctcctggacaaagggcagaagcggagaagctctgagcctcctgaagaaaagattctcccatagacccgtgcaggagaagttcgtgtgcctgaactgcggcttcgagacacacgcagccgagcaagccgccctgaacatcgccagatcctggctgttcctgcggagccaggagtacaagaaataccagacaaacaagacaaccggcaacaccgataagagagccttcgtcgagacctggcagtccttttaccggaagaagcttaaggaggtgtggaaacctgccgtgcggtctggcggatctggcggaggctccaccagccccaagaaaaagagaaaagtctaagctgccttctgcggggcttgccttctggccatgcccttcttctctcccttgcacctgtacctcttggtctttgaataaagcctgagtaggaaggctagcaaaaaaaaaaaaaaaaaaaaaaaaaaaaaaaaaaaaaaaaaaaaaaaaaaaaaaaaaaaaaaaaaaaaaaaaaaaaaaaa

SEQ ID NO: 13022 - RNA, 5785 nt, synthetic construct
  source 1..5785: mol_type = other RNA
aggaaataagagagaaaagaagagtaagaagaaatataagagccaccatggcccctaagaagaagcgtaaagtgagccggatggaacgcctcgtctacgaggtgcggcagaagtgcagaaacatcgaggacatctgcatctcctgcggatctctgaacgtgaccctggagcacccactgttcatcggcggcatgtgccagaactgtaaaaactgttttctggagtgtgcctatcaatacgacgatgacggctaccagagctactgcaccatctgttgcggcggaagagaggtgctgatgtgtggaaataacaactgctgccggtgcttctgcgtggaatgcgtggacctgctggtgggccccggcgccgcccaggccgctattaaggaagatccttggaactgctacatgtgcggccacaagggcacatacggcctgctgagacggagagaggactggcctagcagactgcagatgttcttcgccaataaccacgaccaggagttcgacccccctaaggtgtaccctcccgtccccgccgagaagagaaagcccatccgggtcctgagcctgttcgatggcatcgccaccggtctgctggtgctgaaggacctgggcatccaggtggataggtacattgcctccgaggtgtgcgaggactccatcaccgtgggaatggtgcgtcatcagggcaagatcatgtacgtgggcgacgtgcggagcgtgacacagaagcatatccaggagtggggccctttcgacctggtgatcggcggcagcccttgcaatgacctgagcatcgtgaacccagcccggaagggcctgtacgagggaaccggcagactgttcttcgagttttacagactgctgcacgacgcccggcctaaggaaggcgacgaccggcccttcttttggctgttcgagaatgtggtggccatgggagtcagcgacaagcgggatattagccggttcctggagagcaaccccgtgatgatcgatgccaaggaagtgagcgccgcccaccgggccagatacttctggggcaatctgcctggcatgaacagacccctggccagcaccgtgaacgacaagctggagctgcaggagtgcctggagcacggccggatcgccaagttcagcaaggtgagaaccatcaccacccgaagcaacagcatcaaacaaggcaaggaccagcactttcctgtgttcatgaacgagaaggaggacatcctgtggtgtaccgagatggagagagtgttcgggttcccagtccactacacagatgtcagcaacatgtctagactggccagacagagactgctgggaagaagctggtccgtccctgtgatcagacacctgttcgcccctctgaaggagtacttcgcctgcgtgagcagcggcaacagcaacgccaacagccggggccccagcttctctagcggcctggtgccactgtccctgagagggagccacatgggccccatggagatctacaaaaccgtgagcgcctggaagcggcagcctgtgcgcgtgctgagcctgtttcggaatatcgataaagtcctgaaaagcctgggattcctggagagcggctctggctccggcggtggcaccctgaagtacgtggaggatgtgacaaacgtggtcagacgggatgtggagaagtggggccccttcgatctggtgtacggcagcacccaacccctgggcagctcttgtgaccggtgccctggctggtacatgtttcagttccaccggatcctgcagtacgccctgccgagacaggagtcccagcggccattcttttggattttcatggacaacttgctgctgaccgaggatgaccaggaaactaccactcggttcctgcagaccgaagccgtgaccctgcaggacgtgagaggccgggactaccagaacgccatgcgggtgtggtccaacatccctggactgaaaagcaagcacgcacctctgacccctaaagaagaggagtacctgcaggcccaggtgcggagcagaagcaagctggacgcccctaaggtggatctgctggtgaagaattgcctcctgcccctgagagagtacttcaagtatttcagccagaatagtctgcccctgggaggcagcggcggcggccccctggagagcgtgaccttcaaggacgtggccatcgacttcaccctggaggagtggaggctgatggaccccacccagaggaacctgcacaaggacgtgatgctggagaactacaggaacctggtgagcctgggcctggccgtgagcaagcccgacatgatcagccacctggagaacggcaagggcccctgggtgaccatgaggggcatcagcaggatcccctaccccgacatcgagcccaagggcggcccaagcagcggcgcccctcctcccagcggcggcagcccagccggctccccaacctctaccgaggagggcacctctgagtccgccacccccgagagcggccctggcacctccaccgagcccagcgagggcagcgcacccggcagccctgccggcagccccacctccacagaggagggaaccagcaccgagcccagcgaaggcagcgccccaggcaccagcaccgagcctagtgagcaggagattaaacggatcaacaagatcagaagaagacttgtgaaagacagcaacaccaagaaggccggcaagacaggccccatgaaaaccctgctggttagagtgatgacacccgatctgagagagcggctggaaaacctgagaaagaagcctgaaaatatcccccagcccatcagcaatacatctagagccaacctgaataagctgctgaccgattacaccgaaatgaagaaggcgatcctgcatgtgtactgggaagagttccagaaggaccctgtgggcctgatgagccgggtggcccagcctgccagcaagaagatcgatcagaacaagctgaaacctgagatggacgagaagggcaacctgaccaccgccggctttgcctgctctcagtgtggccagcccctgttcgtgtacaagctggagcaggtgtctgagaagggcaaggcttacaccaactacttcggacggtgcaatgtggccgagcacgaaaagctgatcctgctggcccagctgaagcccgagaaggatagcgacgaagccgtgacatatagcctgggaaagtttgggcagagggccctggatttctacagcattcatgtgaccaaggagtccacccaccccgtgaagcccctggcccagatcgccggaaacagatacgcctccggacctgtgggaaaggccctgagcgacgcatgtatgggcacaatcgcctccttcctgtctaagtaccaggacatcatcatcgaacaccagaaggtggtgaagggcaaccagaagagactggagagcctgcgggagctggccggcaaggaaaacctggaataccctagcgtgaccctgccacctcagcctcacaccaaggagggcgttgatgcctacaacgaagtgatcgcccgggtgcgaatgtgggtgaacctgaacctgtggcagaagctgaagctaagcagagatgatgccaagcctctgctgagactgaagggattcccttcctttcctctggtcgagagacaggccaacgaagtggactggtgggacatggtgtgtaacgtgaagaagctgatcaacgagaaaaaggaggatggcaaggtgttttggcagaatctggctggctacaagagacaggaagccctgagaccatacctgagcagcgaggaagatcggaagaagggaaagaaattcgctcggtaccagctgggcgacctgctgctgcacctggaaaagaagcacggcgaggactggggaaaggtgtacgacgaggcctgggagcggattgacaagaaagtggaaggcctgagcaagcacatcaagctggaagaggaacggagaagcgaggacgcccagagcaaggccgccctgaccgactggctgcgggctaaggccagcttcgtgatcgagggcctgaaggaggccgacaaggacgagttctgcagatgcgagctgaagctgcagaagtggtacggggacctgcggggaaagcccttcgccatcgaagccgagaacagcatcctggacatcagcggcttcagcaagcagtacaactgtgccttcatctggcagaaggacggcgtgaagaagctgaacctgtacctgatcatcaactacttcaagggcggcaagctgcggttcaagaagatcaaacctgaagccttcgaagccaacagattctacaccgtgatcaacaaaaagagcggcgagatcgtgcccatggaggtgaacttcaacttcgacgaccccaacctgatcatcctgcctctggcctttggcaagagacagggcagagaattcatctggaacgacctgctgtccctggaaaccggcagcctgaagctggccaacggaagagtgatcgagaagacactgtacaacagaagaacccggcaggatgagcctgccctgttcgtggccctgaccttcgagcggcgggaggtcctggactcctccaatatcaaaccaatgaacctgatcggcgtggcaagaggcgaaaacatccccgccgtgatcgccctgaccgaccccgagggctgcccactgagccggtttaaggatagcctgggaaacccaacccacatcctgagaatcggcgagagctataaggagaagcagcggaccatccaggccaagaaggaggtggagcagcggagagccggcggctacagccggaagtacgccagcaaagccaagaatctggcagacgatatggtgagaaacaccgctagagatctgctgtactacgccgtgacccaggatgccatgctgatcttcgccaacctgagccggggcttcggccggcagggcaagcggaccttcatggccgagagacagtacacacggatggaggactggctgaccgccaagctggcctacgagggcctgagcaagacctacctgtccaagacactggcccagtacacctccaagacatgcagcaactgtgggtttaccatcaccagcgccgactacgacagggtgctggagaagctgaagaagacagcaacaggctggatgaccacaattaacggcaaggagctgaaggtggagggccagattacctactacaacagatacaagagacagaacgtagtcaaggacctgtccgtcgagctggatagactgagcgaagaatctgtgaacaacgacatctcctcctggacaaagggcagaagcggagaagctctgagcctcctgaagaaaagattctcccatagacccgtgcaggagaagttcgtgtgcctgaactgcggcttcgagacacacgcagccgagcaagccgccctgaacatcgccagatcctggctgttcctgcggagccaggagtacaagaaataccagacaaacaagacaaccggcaacaccgataagagagccttcgtcgagacctggcagtccttttaccggaagaagcttaaggaggtgtggaaacctgccgtgcggtctggcggatctggcggaggctccaccagccccaagaaaaagagaaaagtctaagctgccttctgcggggcttgccttctggccatgcccttcttctctcccttgcacctgtacctcttggtctttgaataaagcctgagtaggaaggctagcaaaaaaaaaaaaaaaaaaaaaaaaaaaaaaaaaaaaaaaaaaaaaaaaaaaaaaaaaaaaaaaaaaaaaaaaaaaaaaaa

SEQ ID NO: 13023 - RNA, 5785 nt, synthetic construct
  source 1..5785: mol_type = other RNA
aggaaataagagagaaaagaagagtaagaagaaatataagagccaccatggcccctaagaagaagcgtaaagtgagccggatggaacgcctcgtctacgaggtgcggcagaagtgcagaaacatcgaggacatctgcatctcctgcggatctctgaacgtgaccctggagcacccactgttcatcggcggcatgtgccagaactgtaaaaactgttttctggagtgtgcctatcaatacgacgatgacggctaccagagctactgcaccatctgttgcggcggaagagaggtgctgatgtgtggaaataacaactgctgccggtgcttctgcgtggaatgcgtggacctgctggtgggccccggcgccgcccaggccgctattaaggaagatccttggaactgctacatgtgcggccacaagggcacatacggcctgctgagacggagagaggactggcctagcagactgcagatgttcttcgccaataaccacgaccaggagttcgacccccctaaggtgtaccctcccgtccccgccgagaagagaaagcccatccgggtcctgagcctgttcgatggcatcgccaccggtctgctggtgctgaaggacctgggcatccaggtggataggtacattgcctccgaggtgtgcgaggactccatcaccgtgggaatggtgcgtcatcagggcaagatcatgtacgtgggcgacgtgcggagcgtgacacagaagcatatccaggagtggggccctttcgacctggtgatcggcggcagcccttgcaatgacctgagcatcgtgaacccagcccggaagggcctgtacgagggaaccggcagactgttcttcgagttttacagactgctgcacgacgcccggcctaaggaaggcgacgaccggcccttcttttggctgttcgagaatgtggtggccatgggagtcagcgacaagcgggatattagccggttcctggagagcaaccccgtgatgatcgatgccaaggaagtgagcgccgcccaccgggccagatacttctggggcaatctgcctggcatgaacagacccctggccagcaccgtgaacgacaagctggagctgcaggagtgcctggagcacggccggatcgccaagttcagcaaggtgagaaccatcaccacccgaagcaacagcatcaaacaaggcaaggaccagcactttcctgtgttcatgaacgagaaggaggacatcctgtggtgtaccgagatggagagagtgttcgggttcccagtccactacacagatgtcagcaacatgtctagactggccagacagagactgctgggaagaagctggtccgtccctgtgatcagacacctgttcgcccctctgaaggagtacttcgcctgcgtgagcagcggcaacagcaacgccaacagccggggccccagcttctctagcggcctggtgccactgtccctgagagggagccacatgggccccatggagatctacaaaaccgtgagcgcctggaagcggcagcctgtgcgcgtgctgagcctgtttcggaatatcgataaagtcctgaaaagcctgggattcctggagagcggctctggctccggcggtggcaccctgaagtacgtggaggatgtgacaaacgtggtcagacgggatgtggagaagtggggccccttcgatctggtgtacggcagcacccaacccctgggcagctcttgtgaccggtgccctggctggtacatgtttcagttccaccggatcctgcagtacgccctgccgagacaggagtcccagcggccattcttttggattttcatggacaacttgctgctgaccgaggatgaccaggaaactaccactcggttcctgcagaccgaagccgtgaccctgcaggacgtgagaggccgggactaccagaacgccatgcgggtgtggtccaacatccctggactgaaaagcaagcacgcacctctgacccctaaagaagaggagtacctgcaggcccaggtgcggagcagaagcaagctggacgcccctaaggtggatctgctggtgaagaattgcctcctgcccctgagagagtacttcaagtatttcagccagaatagtctgcccctgggaggcagcggcggcggcagggccctgacccccgtgagcatgaccgccgaggccaagtgcaccggcttcacccagggcagcgtgaccttcgaggacgtggccatctacttcagccaggaggagtggggcctgctggacgaggcccagaggctgctgtacagggacgtgatgctggagaacttcgccctgctgaccagcctggtgtgctggcacggcatggaggacgaggagacccccgagcagagcgtgagcgtgaacggcggcggcccaagcagcggcgcccctcctcccagcggcggcagcccagccggctccccaacctctaccgaggagggcacctctgagtccgccacccccgagagcggccctggcacctccaccgagcccagcgagggcagcgcacccggcagccctgccggcagccccacctccacagaggagggaaccagcaccgagcccagcgaaggcagcgccccaggcaccagcaccgagcctagtgagcaggagattaaacggatcaacaagatcagaagaagacttgtgaaagacagcaacaccaagaaggccggcaagacaggccccatgaaaaccctgctggttagagtgatgacacccgatctgagagagcggctggaaaacctgagaaagaagcctgaaaatatcccccagcccatcagcaatacatctagagccaacctgaataagctgctgaccgattacaccgaaatgaagaaggcgatcctgcatgtgtactgggaagagttccagaaggaccctgtgggcctgatgagccgggtggcccagcctgccagcaagaagatcgatcagaacaagctgaaacctgagatggacgagaagggcaacctgaccaccgccggctttgcctgctctcagtgtggccagcccctgttcgtgtacaagctggagcaggtgtctgagaagggcaaggcttacaccaactacttcggacggtgcaatgtggccgagcacgaaaagctgatcctgctggcccagctgaagcccgagaaggatagcgacgaagccgtgacatatagcctgggaaagtttgggcagagggccctggatttctacagcattcatgtgaccaaggagtccacccaccccgtgaagcccctggcccagatcgccggaaacagatacgcctccggacctgtgggaaaggccctgagcgacgcatgtatgggcacaatcgcctccttcctgtctaagtaccaggacatcatcatcgaacaccagaaggtggtgaagggcaaccagaagagactggagagcctgcgggagctggccggcaaggaaaacctggaataccctagcgtgaccctgccacctcagcctcacaccaaggagggcgttgatgcctacaacgaagtgatcgcccgggtgcgaatgtgggtgaacctgaacctgtggcagaagctgaagctaagcagagatgatgccaagcctctgctgagactgaagggattcccttcctttcctctggtcgagagacaggccaacgaagtggactggtgggacatggtgtgtaacgtgaagaagctgatcaacgagaaaaaggaggatggcaaggtgttttggcagaatctggctggctacaagagacaggaagccctgagaccatacctgagcagcgaggaagatcggaagaagggaaagaaattcgctcggtaccagctgggcgacctgctgctgcacctggaaaagaagcacggcgaggactggggaaaggtgtacgacgaggcctgggagcggattgacaagaaagtggaaggcctgagcaagcacatcaagctggaagaggaacggagaagcgaggacgcccagagcaaggccgccctgaccgactggctgcgggctaaggccagcttcgtgatcgagggcctgaaggaggccgacaaggacgagttctgcagatgcgagctgaagctgcagaagtggtacggggacctgcggggaaagcccttcgccatcgaagccgagaacagcatcctggacatcagcggcttcagcaagcagtacaactgtgccttcatctggcagaaggacggcgtgaagaagctgaacctgtacctgatcatcaactacttcaagggcggcaagctgcggttcaagaagatcaaacctgaagccttcgaagccaacagattctacaccgtgatcaacaaaaagagcggcgagatcgtgcccatggaggtgaacttcaacttcgacgaccccaacctgatcatcctgcctctggcctttggcaagagacagggcagagaattcatctggaacgacctgctgtccctggaaaccggcagcctgaagctggccaacggaagagtgatcgagaagacactgtacaacagaagaacccggcaggatgagcctgccctgttcgtggccctgaccttcgagcggcgggaggtcctggactcctccaatatcaaaccaatgaacctgatcggcgtggcaagaggcgaaaacatccccgccgtgatcgccctgaccgaccccgagggctgcccactgagccggtttaaggatagcctgggaaacccaacccacatcctgagaatcggcgagagctataaggagaagcagcggaccatccaggccaagaaggaggtggagcagcggagagccggcggctacagccggaagtacgccagcaaagccaagaatctggcagacgatatggtgagaaacaccgctagagatctgctgtactacgccgtgacccaggatgccatgctgatcttcgccaacctgagccggggcttcggccggcagggcaagcggaccttcatggccgagagacagtacacacggatggaggactggctgaccgccaagctggcctacgagggcctgagcaagacctacctgtccaagacactggcccagtacacctccaagacatgcagcaactgtgggtttaccatcaccagcgccgactacgacagggtgctggagaagctgaagaagacagcaacaggctggatgaccacaattaacggcaaggagctgaaggtggagggccagattacctactacaacagatacaagagacagaacgtagtcaaggacctgtccgtcgagctggatagactgagcgaagaatctgtgaacaacgacatctcctcctggacaaagggcagaagcggagaagctctgagcctcctgaagaaaagattctcccatagacccgtgcaggagaagttcgtgtgcctgaactgcggcttcgagacacacgcagccgagcaagccgccctgaacatcgccagatcctggctgttcctgcggagccaggagtacaagaaataccagacaaacaagacaaccggcaacaccgataagagagccttcgtcgagacctggcagtccttttaccggaagaagcttaaggaggtgtggaaacctgccgtgcggtctggcggatctggcggaggctccaccagccccaagaaaaagagaaaagtctaagctgccttctgcggggcttgccttctggccatgcccttcttctctcccttgcacctgtacctcttggtctttgaataaagcctgagtaggaaggctagcaaaaaaaaaaaaaaaaaaaaaaaaaaaaaaaaaaaaaaaaaaaaaaaaaaaaaaaaaaaaaaaaaaaaaaaaaaaaaaaa

SEQ ID NO: 13024 - RNA, 5785 nt, synthetic construct
  source 1..5785: mol_type = other RNA
aggaaataagagagaaaagaagagtaagaagaaatataagagccaccatggcccctaagaagaagcgtaaagtgagccggatggaacgcctcgtctacgaggtgcggcagaagtgcagaaacatcgaggacatctgcatctcctgcggatctctgaacgtgaccctggagcacccactgttcatcggcggcatgtgccagaactgtaaaaactgttttctggagtgtgcctatcaatacgacgatgacggctaccagagctactgcaccatctgttgcggcggaagagaggtgctgatgtgtggaaataacaactgctgccggtgcttctgcgtggaatgcgtggacctgctggtgggccccggcgccgcccaggccgctattaaggaagatccttggaactgctacatgtgcggccacaagggcacatacggcctgctgagacggagagaggactggcctagcagactgcagatgttcttcgccaataaccacgaccaggagttcgacccccctaaggtgtaccctcccgtccccgccgagaagagaaagcccatccgggtcctgagcctgttcgatggcatcgccaccggtctgctggtgctgaaggacctgggcatccaggtggataggtacattgcctccgaggtgtgcgaggactccatcaccgtgggaatggtgcgtcatcagggcaagatcatgtacgtgggcgacgtgcggagcgtgacacagaagcatatccaggagtggggccctttcgacctggtgatcggcggcagcccttgcaatgacctgagcatcgtgaacccagcccggaagggcctgtacgagggaaccggcagactgttcttcgagttttacagactgctgcacgacgcccggcctaaggaaggcgacgaccggcccttcttttggctgttcgagaatgtggtggccatgggagtcagcgacaagcgggatattagccggttcctggagagcaaccccgtgatgatcgatgccaaggaagtgagcgccgcccaccgggccagatacttctggggcaatctgcctggcatgaacagacccctggccagcaccgtgaacgacaagctggagctgcaggagtgcctggagcacggccggatcgccaagttcagcaaggtgagaaccatcaccacccgaagcaacagcatcaaacaaggcaaggaccagcactttcctgtgttcatgaacgagaaggaggacatcctgtggtgtaccgagatggagagagtgttcgggttcccagtccactacacagatgtcagcaacatgtctagactggccagacagagactgctgggaagaagctggtccgtccctgtgatcagacacctgttcgcccctctgaaggagtacttcgcctgcgtgagcagcggcaacagcaacgccaacagccggggccccagcttctctagcggcctggtgccactgtccctgagagggagccacatgggccccatggagatctacaaaaccgtgagcgcctggaagcggcagcctgtgcgcgtgctgagcctgtttcggaatatcgataaagtcctgaaaagcctgggattcctggagagcggctctggctccggcggtggcaccctgaagtacgtggaggatgtgacaaacgtggtcagacgggatgtggagaagtggggccccttcgatctggtgtacggcagcacccaacccctgggcagctcttgtgaccggtgccctggctggtacatgtttcagttccaccggatcctgcagtacgccctgccgagacaggagtcccagcggccattcttttggattttcatggacaacttgctgctgaccgaggatgaccaggaaactaccactcggttcctgcagaccgaagccgtgaccctgcaggacgtgagaggccgggactaccagaacgccatgcgggtgtggtccaacatccctggactgaaaagcaagcacgcacctctgacccctaaagaagaggagtacctgcaggcccaggtgcggagcagaagcaagctggacgcccctaaggtggatctgctggtgaagaattgcctcctgcccctgagagagtacttcaagtatttcagccagaatagtctgcccctgggaggcagcggcggcggcgcctgcggcagcatcaccttcagggacgtggccatcgacttcagccaccaggagtgggagtacctgaacctggtgcagaagaccctgtaccaggaggtgatgatggagaactacgacaacctggtgctgctgggccacagcaagagcaagcccgacctgatcaccctgctggagcagggcaaggagccctggatgatcgtgagggaggagaccaggggcgagtgcaccgccgagctgcagagcggcggcccaagcagcggcgcccctcctcccagcggcggcagcccagccggctccccaacctctaccgaggagggcacctctgagtccgccacccccgagagcggccctggcacctccaccgagcccagcgagggcagcgcacccggcagccctgccggcagccccacctccacagaggagggaaccagcaccgagcccagcgaaggcagcgccccaggcaccagcaccgagcctagtgagcaggagattaaacggatcaacaagatcagaagaagacttgtgaaagacagcaacaccaagaaggccggcaagacaggccccatgaaaaccctgctggttagagtgatgacacccgatctgagagagcggctggaaaacctgagaaagaagcctgaaaatatcccccagcccatcagcaatacatctagagccaacctgaataagctgctgaccgattacaccgaaatgaagaaggcgatcctgcatgtgtactgggaagagttccagaaggaccctgtgggcctgatgagccgggtggcccagcctgccagcaagaagatcgatcagaacaagctgaaacctgagatggacgagaagggcaacctgaccaccgccggctttgcctgctctcagtgtggccagcccctgttcgtgtacaagctggagcaggtgtctgagaagggcaaggcttacaccaactacttcggacggtgcaatgtggccgagcacgaaaagctgatcctgctggcccagctgaagcccgagaaggatagcgacgaagccgtgacatatagcctgggaaagtttgggcagagggccctggatttctacagcattcatgtgaccaaggagtccacccaccccgtgaagcccctggcccagatcgccggaaacagatacgcctccggacctgtgggaaaggccctgagcgacgcatgtatgggcacaatcgcctccttcctgtctaagtaccaggacatcatcatcgaacaccagaaggtggtgaagggcaaccagaagagactggagagcctgcgggagctggccggcaaggaaaacctggaataccctagcgtgaccctgccacctcagcctcacaccaaggagggcgttgatgcctacaacgaagtgatcgcccgggtgcgaatgtgggtgaacctgaacctgtggcagaagctgaagctaagcagagatgatgccaagcctctgctgagactgaagggattcccttcctttcctctggtcgagagacaggccaacgaagtggactggtgggacatggtgtgtaacgtgaagaagctgatcaacgagaaaaaggaggatggcaaggtgttttggcagaatctggctggctacaagagacaggaagccctgagaccatacctgagcagcgaggaagatcggaagaagggaaagaaattcgctcggtaccagctgggcgacctgctgctgcacctggaaaagaagcacggcgaggactggggaaaggtgtacgacgaggcctgggagcggattgacaagaaagtggaaggcctgagcaagcacatcaagctggaagaggaacggagaagcgaggacgcccagagcaaggccgccctgaccgactggctgcgggctaaggccagcttcgtgatcgagggcctgaaggaggccgacaaggacgagttctgcagatgcgagctgaagctgcagaagtggtacggggacctgcggggaaagcccttcgccatcgaagccgagaacagcatcctggacatcagcggcttcagcaagcagtacaactgtgccttcatctggcagaaggacggcgtgaagaagctgaacctgtacctgatcatcaactacttcaagggcggcaagctgcggttcaagaagatcaaacctgaagccttcgaagccaacagattctacaccgtgatcaacaaaaagagcggcgagatcgtgcccatggaggtgaacttcaacttcgacgaccccaacctgatcatcctgcctctggcctttggcaagagacagggcagagaattcatctggaacgacctgctgtccctggaaaccggcagcctgaagctggccaacggaagagtgatcgagaagacactgtacaacagaagaacccggcaggatgagcctgccctgttcgtggccctgaccttcgagcggcgggaggtcctggactcctccaatatcaaaccaatgaacctgatcggcgtggcaagaggcgaaaacatccccgccgtgatcgccctgaccgaccccgagggctgcccactgagccggtttaaggatagcctgggaaacccaacccacatcctgagaatcggcgagagctataaggagaagcagcggaccatccaggccaagaaggaggtggagcagcggagagccggcggctacagccggaagtacgccagcaaagccaagaatctggcagacgatatggtgagaaacaccgctagagatctgctgtactacgccgtgacccaggatgccatgctgatcttcgccaacctgagccggggcttcggccggcagggcaagcggaccttcatggccgagagacagtacacacggatggaggactggctgaccgccaagctggcctacgagggcctgagcaagacctacctgtccaagacactggcccagtacacctccaagacatgcagcaactgtgggtttaccatcaccagcgccgactacgacagggtgctggagaagctgaagaagacagcaacaggctggatgaccacaattaacggcaaggagctgaaggtggagggccagattacctactacaacagatacaagagacagaacgtagtcaaggacctgtccgtcgagctggatagactgagcgaagaatctgtgaacaacgacatctcctcctggacaaagggcagaagcggagaagctctgagcctcctgaagaaaagattctcccatagacccgtgcaggagaagttcgtgtgcctgaactgcggcttcgagacacacgcagccgagcaagccgccctgaacatcgccagatcctggctgttcctgcggagccaggagtacaagaaataccagacaaacaagacaaccggcaacaccgataagagagccttcgtcgagacctggcagtccttttaccggaagaagcttaaggaggtgtggaaacctgccgtgcggtctggcggatctggcggaggctccaccagccccaagaaaaagagaaaagtctaagctgccttctgcggggcttgccttctggccatgcccttcttctctcccttgcacctgtacctcttggtctttgaataaagcctgagtaggaaggctagcaaaaaaaaaaaaaaaaaaaaaaaaaaaaaaaaaaaaaaaaaaaaaaaaaaaaaaaaaaaaaaaaaaaaaaaaaaaaaaaa

SEQ ID NO: 13025 - RNA, 5785 nt, synthetic construct
  source 1..5785: mol_type = other RNA
aggaaataagagagaaaagaagagtaagaagaaatataagagccaccatggcccctaagaagaagcgtaaagtgagccggatggaacgcctcgtctacgaggtgcggcagaagtgcagaaacatcgaggacatctgcatctcctgcggatctctgaacgtgaccctggagcacccactgttcatcggcggcatgtgccagaactgtaaaaactgttttctggagtgtgcctatcaatacgacgatgacggctaccagagctactgcaccatctgttgcggcggaagagaggtgctgatgtgtggaaataacaactgctgccggtgcttctgcgtggaatgcgtggacctgctggtgggccccggcgccgcccaggccgctattaaggaagatccttggaactgctacatgtgcggccacaagggcacatacggcctgctgagacggagagaggactggcctagcagactgcagatgttcttcgccaataaccacgaccaggagttcgacccccctaaggtgtaccctcccgtccccgccgagaagagaaagcccatccgggtcctgagcctgttcgatggcatcgccaccggtctgctggtgctgaaggacctgggcatccaggtggataggtacattgcctccgaggtgtgcgaggactccatcaccgtgggaatggtgcgtcatcagggcaagatcatgtacgtgggcgacgtgcggagcgtgacacagaagcatatccaggagtggggccctttcgacctggtgatcggcggcagcccttgcaatgacctgagcatcgtgaacccagcccggaagggcctgtacgagggaaccggcagactgttcttcgagttttacagactgctgcacgacgcccggcctaaggaaggcgacgaccggcccttcttttggctgttcgagaatgtggtggccatgggagtcagcgacaagcgggatattagccggttcctggagagcaaccccgtgatgatcgatgccaaggaagtgagcgccgcccaccgggccagatacttctggggcaatctgcctggcatgaacagacccctggccagcaccgtgaacgacaagctggagctgcaggagtgcctggagcacggccggatcgccaagttcagcaaggtgagaaccatcaccacccgaagcaacagcatcaaacaaggcaaggaccagcactttcctgtgttcatgaacgagaaggaggacatcctgtggtgtaccgagatggagagagtgttcgggttcccagtccactacacagatgtcagcaacatgtctagactggccagacagagactgctgggaagaagctggtccgtccctgtgatcagacacctgttcgcccctctgaaggagtacttcgcctgcgtgagcagcggcaacagcaacgccaacagccggggccccagcttctctagcggcctggtgccactgtccctgagagggagccacatgggccccatggagatctacaaaaccgtgagcgcctggaagcggcagcctgtgcgcgtgctgagcctgtttcggaatatcgataaagtcctgaaaagcctgggattcctggagagcggctctggctccggcggtggcaccctgaagtacgtggaggatgtgacaaacgtggtcagacgggatgtggagaagtggggccccttcgatctggtgtacggcagcacccaacccctgggcagctcttgtgaccggtgccctggctggtacatgtttcagttccaccggatcctgcagtacgccctgccgagacaggagtcccagcggccattcttttggattttcatggacaacttgctgctgaccgaggatgaccaggaaactaccactcggttcctgcagaccgaagccgtgaccctgcaggacgtgagaggccgggactaccagaacgccatgcgggtgtggtccaacatccctggactgaaaagcaagcacgcacctctgacccctaaagaagaggagtacctgcaggcccaggtgcggagcagaagcaagctggacgcccctaaggtggatctgctggtgaagaattgcctcctgcccctgagagagtacttcaagtatttcagccagaatagtctgcccctgggaggcagcggcggcggcgacaaggccctgatggccttccacgacgtggccgtggccttcagccagatggagtgggagctgctgagccccgcccagaggatcctgtacagggaggtgatgctggagaactacagccacctggtgagcctgggcatcgccttcagcaagcccaagctgatcacccagctggagcagggcgccgagccctggagggacggcagcggctgcttcctggacctgtgccccgccgagcccaggaccggcggcccaagcagcggcgcccctcctcccagcggcggcagcccagccggctccccaacctctaccgaggagggcacctctgagtccgccacccccgagagcggccctggcacctccaccgagcccagcgagggcagcgcacccggcagccctgccggcagccccacctccacagaggagggaaccagcaccgagcccagcgaaggcagcgccccaggcaccagcaccgagcctagtgagcaggagattaaacggatcaacaagatcagaagaagacttgtgaaagacagcaacaccaagaaggccggcaagacaggccccatgaaaaccctgctggttagagtgatgacacccgatctgagagagcggctggaaaacctgagaaagaagcctgaaaatatcccccagcccatcagcaatacatctagagccaacctgaataagctgctgaccgattacaccgaaatgaagaaggcgatcctgcatgtgtactgggaagagttccagaaggaccctgtgggcctgatgagccgggtggcccagcctgccagcaagaagatcgatcagaacaagctgaaacctgagatggacgagaagggcaacctgaccaccgccggctttgcctgctctcagtgtggccagcccctgttcgtgtacaagctggagcaggtgtctgagaagggcaaggcttacaccaactacttcggacggtgcaatgtggccgagcacgaaaagctgatcctgctggcccagctgaagcccgagaaggatagcgacgaagccgtgacatatagcctgggaaagtttgggcagagggccctggatttctacagcattcatgtgaccaaggagtccacccaccccgtgaagcccctggcccagatcgccggaaacagatacgcctccggacctgtgggaaaggccctgagcgacgcatgtatgggcacaatcgcctccttcctgtctaagtaccaggacatcatcatcgaacaccagaaggtggtgaagggcaaccagaagagactggagagcctgcgggagctggccggcaaggaaaacctggaataccctagcgtgaccctgccacctcagcctcacaccaaggagggcgttgatgcctacaacgaagtgatcgcccgggtgcgaatgtgggtgaacctgaacctgtggcagaagctgaagctaagcagagatgatgccaagcctctgctgagactgaagggattcccttcctttcctctggtcgagagacaggccaacgaagtggactggtgggacatggtgtgtaacgtgaagaagctgatcaacgagaaaaaggaggatggcaaggtgttttggcagaatctggctggctacaagagacaggaagccctgagaccatacctgagcagcgaggaagatcggaagaagggaaagaaattcgctcggtaccagctgggcgacctgctgctgcacctggaaaagaagcacggcgaggactggggaaaggtgtacgacgaggcctgggagcggattgacaagaaagtggaaggcctgagcaagcacatcaagctggaagaggaacggagaagcgaggacgcccagagcaaggccgccctgaccgactggctgcgggctaaggccagcttcgtgatcgagggcctgaaggaggccgacaaggacgagttctgcagatgcgagctgaagctgcagaagtggtacggggacctgcggggaaagcccttcgccatcgaagccgagaacagcatcctggacatcagcggcttcagcaagcagtacaactgtgccttcatctggcagaaggacggcgtgaagaagctgaacctgtacctgatcatcaactacttcaagggcggcaagctgcggttcaagaagatcaaacctgaagccttcgaagccaacagattctacaccgtgatcaacaaaaagagcggcgagatcgtgcccatggaggtgaacttcaacttcgacgaccccaacctgatcatcctgcctctggcctttggcaagagacagggcagagaattcatctggaacgacctgctgtccctggaaaccggcagcctgaagctggccaacggaagagtgatcgagaagacactgtacaacagaagaacccggcaggatgagcctgccctgttcgtggccctgaccttcgagcggcgggaggtcctggactcctccaatatcaaaccaatgaacctgatcggcgtggcaagaggcgaaaacatccccgccgtgatcgccctgaccgaccccgagggctgcccactgagccggtttaaggatagcctgggaaacccaacccacatcctgagaatcggcgagagctataaggagaagcagcggaccatccaggccaagaaggaggtggagcagcggagagccggcggctacagccggaagtacgccagcaaagccaagaatctggcagacgatatggtgagaaacaccgctagagatctgctgtactacgccgtgacccaggatgccatgctgatcttcgccaacctgagccggggcttcggccggcagggcaagcggaccttcatggccgagagacagtacacacggatggaggactggctgaccgccaagctggcctacgagggcctgagcaagacctacctgtccaagacactggcccagtacacctccaagacatgcagcaactgtgggtttaccatcaccagcgccgactacgacagggtgctggagaagctgaagaagacagcaacaggctggatgaccacaattaacggcaaggagctgaaggtggagggccagattacctactacaacagatacaagagacagaacgtagtcaaggacctgtccgtcgagctggatagactgagcgaagaatctgtgaacaacgacatctcctcctggacaaagggcagaagcggagaagctctgagcctcctgaagaaaagattctcccatagacccgtgcaggagaagttcgtgtgcctgaactgcggcttcgagacacacgcagccgagcaagccgccctgaacatcgccagatcctggctgttcctgcggagccaggagtacaagaaataccagacaaacaagacaaccggcaacaccgataagagagccttcgtcgagacctggcagtccttttaccggaagaagcttaaggaggtgtggaaacctgccgtgcggtctggcggatctggcggaggctccaccagccccaagaaaaagagaaaagtctaagctgccttctgcggggcttgccttctggccatgcccttcttctctcccttgcacctgtacctcttggtctttgaataaagcctgagtaggaaggctagcaaaaaaaaaaaaaaaaaaaaaaaaaaaaaaaaaaaaaaaaaaaaaaaaaaaaaaaaaaaaaaaaaaaaaaaaaaaaaaaa

SEQ ID NO: 13026 - RNA, 5821 nt, synthetic construct
  source 1..5821: mol_type = other RNA
aggaaataagagagaaaagaagagtaagaagaaatataagagccaccatggcccctaagaagaagcgtaaagtgagccggatggaacgcctcgtctacgaggtgcggcagaagtgcagaaacatcgaggacatctgcatctcctgcggatctctgaacgtgaccctggagcacccactgttcatcggcggcatgtgccagaactgtaaaaactgttttctggagtgtgcctatcaatacgacgatgacggctaccagagctactgcaccatctgttgcggcggaagagaggtgctgatgtgtggaaataacaactgctgccggtgcttctgcgtggaatgcgtggacctgctggtgggccccggcgccgcccaggccgctattaaggaagatccttggaactgctacatgtgcggccacaagggcacatacggcctgctgagacggagagaggactggcctagcagactgcagatgttcttcgccaataaccacgaccaggagttcgacccccctaaggtgtaccctcccgtccccgccgagaagagaaagcccatccgggtcctgagcctgttcgatggcatcgccaccggtctgctggtgctgaaggacctgggcatccaggtggataggtacattgcctccgaggtgtgcgaggactccatcaccgtgggaatggtgcgtcatcagggcaagatcatgtacgtgggcgacgtgcggagcgtgacacagaagcatatccaggagtggggccctttcgacctggtgatcggcggcagcccttgcaatgacctgagcatcgtgaacccagcccggaagggcctgtacgagggaaccggcagactgttcttcgagttttacagactgctgcacgacgcccggcctaaggaaggcgacgaccggcccttcttttggctgttcgagaatgtggtggccatgggagtcagcgacaagcgggatattagccggttcctggagagcaaccccgtgatgatcgatgccaaggaagtgagcgccgcccaccgggccagatacttctggggcaatctgcctggcatgaacagacccctggccagcaccgtgaacgacaagctggagctgcaggagtgcctggagcacggccggatcgccaagttcagcaaggtgagaaccatcaccacccgaagcaacagcatcaaacaaggcaaggaccagcactttcctgtgttcatgaacgagaaggaggacatcctgtggtgtaccgagatggagagagtgttcgggttcccagtccactacacagatgtcagcaacatgtctagactggccagacagagactgctgggaagaagctggtccgtccctgtgatcagacacctgttcgcccctctgaaggagtacttcgcctgcgtgagcagcggcaacagcaacgccaacagccggggccccagcttctctagcggcctggtgccactgtccctgagagggagccacatgggccccatggagatctacaaaaccgtgagcgcctggaagcggcagcctgtgcgcgtgctgagcctgtttcggaatatcgataaagtcctgaaaagcctgggattcctggagagcggctctggctccggcggtggcaccctgaagtacgtggaggatgtgacaaacgtggtcagacgggatgtggagaagtggggccccttcgatctggtgtacggcagcacccaacccctgggcagctcttgtgaccggtgccctggctggtacatgtttcagttccaccggatcctgcagtacgccctgccgagacaggagtcccagcggccattcttttggattttcatggacaacttgctgctgaccgaggatgaccaggaaactaccactcggttcctgcagaccgaagccgtgaccctgcaggacgtgagaggccgggactaccagaacgccatgcgggtgtggtccaacatccctggactgaaaagcaagcacgcacctctgacccctaaagaagaggagtacctgcaggcccaggtgcggagcagaagcaagctggacgcccctaaggtggatctgctggtgaagaattgcctcctgcccctgagagagtacttcaagtatttcagccagaatagtctgcccctgggaggcagcggcggcggcgtgagcttcgaggaggtggccgtgcacttcagcgaggaggagtggagccagctggaccccgcccagaaggccctgcacggcgaggtgatgctggagaacagcaggaacctggccagcctgggctacaacgagcacggcaacaagaactgcaaggagcagtgccagcccgtggaccccaacgagcagaacaggaacttcgccgaccagatgcagaccaagatcgacgagaccaaccagagccagagcgaggtggagaagaccttccacagcacccaccacggcggcccaagcagcggcgcccctcctcccagcggcggcagcccagccggctccccaacctctaccgaggagggcacctctgagtccgccacccccgagagcggccctggcacctccaccgagcccagcgagggcagcgcacccggcagccctgccggcagccccacctccacagaggagggaaccagcaccgagcccagcgaaggcagcgccccaggcaccagcaccgagcctagtgagcaggagattaaacggatcaacaagatcagaagaagacttgtgaaagacagcaacaccaagaaggccggcaagacaggccccatgaaaaccctgctggttagagtgatgacacccgatctgagagagcggctggaaaacctgagaaagaagcctgaaaatatcccccagcccatcagcaatacatctagagccaacctgaataagctgctgaccgattacaccgaaatgaagaaggcgatcctgcatgtgtactgggaagagttccagaaggaccctgtgggcctgatgagccgggtggcccagcctgccagcaagaagatcgatcagaacaagctgaaacctgagatggacgagaagggcaacctgaccaccgccggctttgcctgctctcagtgtggccagcccctgttcgtgtacaagctggagcaggtgtctgagaagggcaaggcttacaccaactacttcggacggtgcaatgtggccgagcacgaaaagctgatcctgctggcccagctgaagcccgagaaggatagcgacgaagccgtgacatatagcctgggaaagtttgggcagagggccctggatttctacagcattcatgtgaccaaggagtccacccaccccgtgaagcccctggcccagatcgccggaaacagatacgcctccggacctgtgggaaaggccctgagcgacgcatgtatgggcacaatcgcctccttcctgtctaagtaccaggacatcatcatcgaacaccagaaggtggtgaagggcaaccagaagagactggagagcctgcgggagctggccggcaaggaaaacctggaataccctagcgtgaccctgccacctcagcctcacaccaaggagggcgttgatgcctacaacgaagtgatcgcccgggtgcgaatgtgggtgaacctgaacctgtggcagaagctgaagctaagcagagatgatgccaagcctctgctgagactgaagggattcccttcctttcctctggtcgagagacaggccaacgaagtggactggtgggacatggtgtgtaacgtgaagaagctgatcaacgagaaaaaggaggatggcaaggtgttttggcagaatctggctggctacaagagacaggaagccctgagaccatacctgagcagcgaggaagatcggaagaagggaaagaaattcgctcggtaccagctgggcgacctgctgctgcacctggaaaagaagcacggcgaggactggggaaaggtgtacgacgaggcctgggagcggattgacaagaaagtggaaggcctgagcaagcacatcaagctggaagaggaacggagaagcgaggacgcccagagcaaggccgccctgaccgactggctgcgggctaaggccagcttcgtgatcgagggcctgaaggaggccgacaaggacgagttctgcagatgcgagctgaagctgcagaagtggtacggggacctgcggggaaagcccttcgccatcgaagccgagaacagcatcctggacatcagcggcttcagcaagcagtacaactgtgccttcatctggcagaaggacggcgtgaagaagctgaacctgtacctgatcatcaactacttcaagggcggcaagctgcggttcaagaagatcaaacctgaagccttcgaagccaacagattctacaccgtgatcaacaaaaagagcggcgagatcgtgcccatggaggtgaacttcaacttcgacgaccccaacctgatcatcctgcctctggcctttggcaagagacagggcagagaattcatctggaacgacctgctgtccctggaaaccggcagcctgaagctggccaacggaagagtgatcgagaagacactgtacaacagaagaacccggcaggatgagcctgccctgttcgtggccctgaccttcgagcggcgggaggtcctggactcctccaatatcaaaccaatgaacctgatcggcgtggcaagaggcgaaaacatccccgccgtgatcgccctgaccgaccccgagggctgcccactgagccggtttaaggatagcctgggaaacccaacccacatcctgagaatcggcgagagctataaggagaagcagcggaccatccaggccaagaaggaggtggagcagcggagagccggcggctacagccggaagtacgccagcaaagccaagaatctggcagacgatatggtgagaaacaccgctagagatctgctgtactacgccgtgacccaggatgccatgctgatcttcgccaacctgagccggggcttcggccggcagggcaagcggaccttcatggccgagagacagtacacacggatggaggactggctgaccgccaagctggcctacgagggcctgagcaagacctacctgtccaagacactggcccagtacacctccaagacatgcagcaactgtgggtttaccatcaccagcgccgactacgacagggtgctggagaagctgaagaagacagcaacaggctggatgaccacaattaacggcaaggagctgaaggtggagggccagattacctactacaacagatacaagagacagaacgtagtcaaggacctgtccgtcgagctggatagactgagcgaagaatctgtgaacaacgacatctcctcctggacaaagggcagaagcggagaagctctgagcctcctgaagaaaagattctcccatagacccgtgcaggagaagttcgtgtgcctgaactgcggcttcgagacacacgcagccgagcaagccgccctgaacatcgccagatcctggctgttcctgcggagccaggagtacaagaaataccagacaaacaagacaaccggcaacaccgataagagagccttcgtcgagacctggcagtccttttaccggaagaagcttaaggaggtgtggaaacctgccgtgcggtctggcggatctggcggaggctccaccagccccaagaaaaagagaaaagtctaagctgccttctgcggggcttgccttctggccatgcccttcttctctcccttgcacctgtacctcttggtctttgaataaagcctgagtaggaaggctagcaaaaaaaaaaaaaaaaaaaaaaaaaaaaaaaaaaaaaaaaaaaaaaaaaaaaaaaaaaaaaaaaaaaaaaaaaaaaaaaa

SEQ ID NO: 13027 - RNA, 5785 nt, synthetic construct
  source 1..5785: mol_type = other RNA
aggaaataagagagaaaagaagagtaagaagaaatataagagccaccatggcccctaagaagaagcgtaaagtgagccggatggaacgcctcgtctacgaggtgcggcagaagtgcagaaacatcgaggacatctgcatctcctgcggatctctgaacgtgaccctggagcacccactgttcatcggcggcatgtgccagaactgtaaaaactgttttctggagtgtgcctatcaatacgacgatgacggctaccagagctactgcaccatctgttgcggcggaagagaggtgctgatgtgtggaaataacaactgctgccggtgcttctgcgtggaatgcgtggacctgctggtgggccccggcgccgcccaggccgctattaaggaagatccttggaactgctacatgtgcggccacaagggcacatacggcctgctgagacggagagaggactggcctagcagactgcagatgttcttcgccaataaccacgaccaggagttcgacccccctaaggtgtaccctcccgtccccgccgagaagagaaagcccatccgggtcctgagcctgttcgatggcatcgccaccggtctgctggtgctgaaggacctgggcatccaggtggataggtacattgcctccgaggtgtgcgaggactccatcaccgtgggaatggtgcgtcatcagggcaagatcatgtacgtgggcgacgtgcggagcgtgacacagaagcatatccaggagtggggccctttcgacctggtgatcggcggcagcccttgcaatgacctgagcatcgtgaacccagcccggaagggcctgtacgagggaaccggcagactgttcttcgagttttacagactgctgcacgacgcccggcctaaggaaggcgacgaccggcccttcttttggctgttcgagaatgtggtggccatgggagtcagcgacaagcgggatattagccggttcctggagagcaaccccgtgatgatcgatgccaaggaagtgagcgccgcccaccgggccagatacttctggggcaatctgcctggcatgaacagacccctggccagcaccgtgaacgacaagctggagctgcaggagtgcctggagcacggccggatcgccaagttcagcaaggtgagaaccatcaccacccgaagcaacagcatcaaacaaggcaaggaccagcactttcctgtgttcatgaacgagaaggaggacatcctgtggtgtaccgagatggagagagtgttcgggttcccagtccactacacagatgtcagcaacatgtctagactggccagacagagactgctgggaagaagctggtccgtccctgtgatcagacacctgttcgcccctctgaaggagtacttcgcctgcgtgagcagcggcaacagcaacgccaacagccggggccccagcttctctagcggcctggtgccactgtccctgagagggagccacatgggccccatggagatctacaaaaccgtgagcgcctggaagcggcagcctgtgcgcgtgctgagcctgtttcggaatatcgataaagtcctgaaaagcctgggattcctggagagcggctctggctccggcggtggcaccctgaagtacgtggaggatgtgacaaacgtggtcagacgggatgtggagaagtggggccccttcgatctggtgtacggcagcacccaacccctgggcagctcttgtgaccggtgccctggctggtacatgtttcagttccaccggatcctgcagtacgccctgccgagacaggagtcccagcggccattcttttggattttcatggacaacttgctgctgaccgaggatgaccaggaaactaccactcggttcctgcagaccgaagccgtgaccctgcaggacgtgagaggccgggactaccagaacgccatgcgggtgtggtccaacatccctggactgaaaagcaagcacgcacctctgacccctaaagaagaggagtacctgcaggcccaggtgcggagcagaagcaagctggacgcccctaaggtggatctgctggtgaagaattgcctcctgcccctgagagagtacttcaagtatttcagccagaatagtctgcccctgggaggcagcggcggcggcatgatgcaggcccaggagagcctgaccctggaggacgtggccgtggacttcacctgggaggagtggcagttcctgagccccgcccagaaggacctgtacagggacgtgatgctggagaactacagcaacctggtggccgtgggctaccaggccaggaagcccgacgccctgagcaagctggagaggggcgaggagccctgcaccaccgaggacgagatctacgccaggatctgcagcgacagcggcggcccaagcagcggcgcccctcctcccagcggcggcagcccagccggctccccaacctctaccgaggagggcacctctgagtccgccacccccgagagcggccctggcacctccaccgagcccagcgagggcagcgcacccggcagccctgccggcagccccacctccacagaggagggaaccagcaccgagcccagcgaaggcagcgccccaggcaccagcaccgagcctagtgagcaggagattaaacggatcaacaagatcagaagaagacttgtgaaagacagcaacaccaagaaggccggcaagacaggccccatgaaaaccctgctggttagagtgatgacacccgatctgagagagcggctggaaaacctgagaaagaagcctgaaaatatcccccagcccatcagcaatacatctagagccaacctgaataagctgctgaccgattacaccgaaatgaagaaggcgatcctgcatgtgtactgggaagagttccagaaggaccctgtgggcctgatgagccgggtggcccagcctgccagcaagaagatcgatcagaacaagctgaaacctgagatggacgagaagggcaacctgaccaccgccggctttgcctgctctcagtgtggccagcccctgttcgtgtacaagctggagcaggtgtctgagaagggcaaggcttacaccaactacttcggacggtgcaatgtggccgagcacgaaaagctgatcctgctggcccagctgaagcccgagaaggatagcgacgaagccgtgacatatagcctgggaaagtttgggcagagggccctggatttctacagcattcatgtgaccaaggagtccacccaccccgtgaagcccctggcccagatcgccggaaacagatacgcctccggacctgtgggaaaggccctgagcgacgcatgtatgggcacaatcgcctccttcctgtctaagtaccaggacatcatcatcgaacaccagaaggtggtgaagggcaaccagaagagactggagagcctgcgggagctggccggcaaggaaaacctggaataccctagcgtgaccctgccacctcagcctcacaccaaggagggcgttgatgcctacaacgaagtgatcgcccgggtgcgaatgtgggtgaacctgaacctgtggcagaagctgaagctaagcagagatgatgccaagcctctgctgagactgaagggattcccttcctttcctctggtcgagagacaggccaacgaagtggactggtgggacatggtgtgtaacgtgaagaagctgatcaacgagaaaaaggaggatggcaaggtgttttggcagaatctggctggctacaagagacaggaagccctgagaccatacctgagcagcgaggaagatcggaagaagggaaagaaattcgctcggtaccagctgggcgacctgctgctgcacctggaaaagaagcacggcgaggactggggaaaggtgtacgacgaggcctgggagcggattgacaagaaagtggaaggcctgagcaagcacatcaagctggaagaggaacggagaagcgaggacgcccagagcaaggccgccctgaccgactggctgcgggctaaggccagcttcgtgatcgagggcctgaaggaggccgacaaggacgagttctgcagatgcgagctgaagctgcagaagtggtacggggacctgcggggaaagcccttcgccatcgaagccgagaacagcatcctggacatcagcggcttcagcaagcagtacaactgtgccttcatctggcagaaggacggcgtgaagaagctgaacctgtacctgatcatcaactacttcaagggcggcaagctgcggttcaagaagatcaaacctgaagccttcgaagccaacagattctacaccgtgatcaacaaaaagagcggcgagatcgtgcccatggaggtgaacttcaacttcgacgaccccaacctgatcatcctgcctctggcctttggcaagagacagggcagagaattcatctggaacgacctgctgtccctggaaaccggcagcctgaagctggccaacggaagagtgatcgagaagacactgtacaacagaagaacccggcaggatgagcctgccctgttcgtggccctgaccttcgagcggcgggaggtcctggactcctccaatatcaaaccaatgaacctgatcggcgtggcaagaggcgaaaacatccccgccgtgatcgccctgaccgaccccgagggctgcccactgagccggtttaaggatagcctgggaaacccaacccacatcctgagaatcggcgagagctataaggagaagcagcggaccatccaggccaagaaggaggtggagcagcggagagccggcggctacagccggaagtacgccagcaaagccaagaatctggcagacgatatggtgagaaacaccgctagagatctgctgtactacgccgtgacccaggatgccatgctgatcttcgccaacctgagccggggcttcggccggcagggcaagcggaccttcatggccgagagacagtacacacggatggaggactggctgaccgccaagctggcctacgagggcctgagcaagacctacctgtccaagacactggcccagtacacctccaagacatgcagcaactgtgggtttaccatcaccagcgccgactacgacagggtgctggagaagctgaagaagacagcaacaggctggatgaccacaattaacggcaaggagctgaaggtggagggccagattacctactacaacagatacaagagacagaacgtagtcaaggacctgtccgtcgagctggatagactgagcgaagaatctgtgaacaacgacatctcctcctggacaaagggcagaagcggagaagctctgagcctcctgaagaaaagattctcccatagacccgtgcaggagaagttcgtgtgcctgaactgcggcttcgagacacacgcagccgagcaagccgccctgaacatcgccagatcctggctgttcctgcggagccaggagtacaagaaataccagacaaacaagacaaccggcaacaccgataagagagccttcgtcgagacctggcagtccttttaccggaagaagcttaaggaggtgtggaaacctgccgtgcggtctggcggatctggcggaggctccaccagccccaagaaaaagagaaaagtctaagctgccttctgcggggcttgccttctggccatgcccttcttctctcccttgcacctgtacctcttggtctttgaataaagcctgagtaggaaggctagcaaaaaaaaaaaaaaaaaaaaaaaaaaaaaaaaaaaaaaaaaaaaaaaaaaaaaaaaaaaaaaaaaaaaaaaaaaaaaaaa

SEQ ID NO: 13028 - RNA, 5785 nt, synthetic construct
  source 1..5785: mol_type = other RNA
aggaaataagagagaaaagaagagtaagaagaaatataagagccaccatggcccctaagaagaagcgtaaagtgagccggatggaacgcctcgtctacgaggtgcggcagaagtgcagaaacatcgaggacatctgcatctcctgcggatctctgaacgtgaccctggagcacccactgttcatcggcggcatgtgccagaactgtaaaaactgttttctggagtgtgcctatcaatacgacgatgacggctaccagagctactgcaccatctgttgcggcggaagagaggtgctgatgtgtggaaataacaactgctgccggtgcttctgcgtggaatgcgtggacctgctggtgggccccggcgccgcccaggccgctattaaggaagatccttggaactgctacatgtgcggccacaagggcacatacggcctgctgagacggagagaggactggcctagcagactgcagatgttcttcgccaataaccacgaccaggagttcgacccccctaaggtgtaccctcccgtccccgccgagaagagaaagcccatccgggtcctgagcctgttcgatggcatcgccaccggtctgctggtgctgaaggacctgggcatccaggtggataggtacattgcctccgaggtgtgcgaggactccatcaccgtgggaatggtgcgtcatcagggcaagatcatgtacgtgggcgacgtgcggagcgtgacacagaagcatatccaggagtggggccctttcgacctggtgatcggcggcagcccttgcaatgacctgagcatcgtgaacccagcccggaagggcctgtacgagggaaccggcagactgttcttcgagttttacagactgctgcacgacgcccggcctaaggaaggcgacgaccggcccttcttttggctgttcgagaatgtggtggccatgggagtcagcgacaagcgggatattagccggttcctggagagcaaccccgtgatgatcgatgccaaggaagtgagcgccgcccaccgggccagatacttctggggcaatctgcctggcatgaacagacccctggccagcaccgtgaacgacaagctggagctgcaggagtgcctggagcacggccggatcgccaagttcagcaaggtgagaaccatcaccacccgaagcaacagcatcaaacaaggcaaggaccagcactttcctgtgttcatgaacgagaaggaggacatcctgtggtgtaccgagatggagagagtgttcgggttcccagtccactacacagatgtcagcaacatgtctagactggccagacagagactgctgggaagaagctggtccgtccctgtgatcagacacctgttcgcccctctgaaggagtacttcgcctgcgtgagcagcggcaacagcaacgccaacagccggggccccagcttctctagcggcctggtgccactgtccctgagagggagccacatgggccccatggagatctacaaaaccgtgagcgcctggaagcggcagcctgtgcgcgtgctgagcctgtttcggaatatcgataaagtcctgaaaagcctgggattcctggagagcggctctggctccggcggtggcaccctgaagtacgtggaggatgtgacaaacgtggtcagacgggatgtggagaagtggggccccttcgatctggtgtacggcagcacccaacccctgggcagctcttgtgaccggtgccctggctggtacatgtttcagttccaccggatcctgcagtacgccctgccgagacaggagtcccagcggccattcttttggattttcatggacaacttgctgctgaccgaggatgaccaggaaactaccactcggttcctgcagaccgaagccgtgaccctgcaggacgtgagaggccgggactaccagaacgccatgcgggtgtggtccaacatccctggactgaaaagcaagcacgcacctctgacccctaaagaagaggagtacctgcaggcccaggtgcggagcagaagcaagctggacgcccctaaggtggatctgctggtgaagaattgcctcctgcccctgagagagtacttcaagtatttcagccagaatagtctgcccctgggaggcagcggcggcggccaggagcccgtgaccttcgaggacgtggccgtgtacttcacccagaaccagtgggccaagctggaccccacccagagggccctgtacagggaggtgatgctggagaactacgccaacgtggccagcctggtggccttccccttccccaagcccgacctggtgagccagctggagaggggcgaggtgccctggggccccgacccctgggaggccgaggtgctgaggggcatctgccccggcggcggcggcccaagcagcggcgcccctcctcccagcggcggcagcccagccggctccccaacctctaccgaggagggcacctctgagtccgccacccccgagagcggccctggcacctccaccgagcccagcgagggcagcgcacccggcagccctgccggcagccccacctccacagaggagggaaccagcaccgagcccagcgaaggcagcgccccaggcaccagcaccgagcctagtgagcaggagattaaacggatcaacaagatcagaagaagacttgtgaaagacagcaacaccaagaaggccggcaagacaggccccatgaaaaccctgctggttagagtgatgacacccgatctgagagagcggctggaaaacctgagaaagaagcctgaaaatatcccccagcccatcagcaatacatctagagccaacctgaataagctgctgaccgattacaccgaaatgaagaaggcgatcctgcatgtgtactgggaagagttccagaaggaccctgtgggcctgatgagccgggtggcccagcctgccagcaagaagatcgatcagaacaagctgaaacctgagatggacgagaagggcaacctgaccaccgccggctttgcctgctctcagtgtggccagcccctgttcgtgtacaagctggagcaggtgtctgagaagggcaaggcttacaccaactacttcggacggtgcaatgtggccgagcacgaaaagctgatcctgctggcccagctgaagcccgagaaggatagcgacgaagccgtgacatatagcctgggaaagtttgggcagagggccctggatttctacagcattcatgtgaccaaggagtccacccaccccgtgaagcccctggcccagatcgccggaaacagatacgcctccggacctgtgggaaaggccctgagcgacgcatgtatgggcacaatcgcctccttcctgtctaagtaccaggacatcatcatcgaacaccagaaggtggtgaagggcaaccagaagagactggagagcctgcgggagctggccggcaaggaaaacctggaataccctagcgtgaccctgccacctcagcctcacaccaaggagggcgttgatgcctacaacgaagtgatcgcccgggtgcgaatgtgggtgaacctgaacctgtggcagaagctgaagctaagcagagatgatgccaagcctctgctgagactgaagggattcccttcctttcctctggtcgagagacaggccaacgaagtggactggtgggacatggtgtgtaacgtgaagaagctgatcaacgagaaaaaggaggatggcaaggtgttttggcagaatctggctggctacaagagacaggaagccctgagaccatacctgagcagcgaggaagatcggaagaagggaaagaaattcgctcggtaccagctgggcgacctgctgctgcacctggaaaagaagcacggcgaggactggggaaaggtgtacgacgaggcctgggagcggattgacaagaaagtggaaggcctgagcaagcacatcaagctggaagaggaacggagaagcgaggacgcccagagcaaggccgccctgaccgactggctgcgggctaaggccagcttcgtgatcgagggcctgaaggaggccgacaaggacgagttctgcagatgcgagctgaagctgcagaagtggtacggggacctgcggggaaagcccttcgccatcgaagccgagaacagcatcctggacatcagcggcttcagcaagcagtacaactgtgccttcatctggcagaaggacggcgtgaagaagctgaacctgtacctgatcatcaactacttcaagggcggcaagctgcggttcaagaagatcaaacctgaagccttcgaagccaacagattctacaccgtgatcaacaaaaagagcggcgagatcgtgcccatggaggtgaacttcaacttcgacgaccccaacctgatcatcctgcctctggcctttggcaagagacagggcagagaattcatctggaacgacctgctgtccctggaaaccggcagcctgaagctggccaacggaagagtgatcgagaagacactgtacaacagaagaacccggcaggatgagcctgccctgttcgtggccctgaccttcgagcggcgggaggtcctggactcctccaatatcaaaccaatgaacctgatcggcgtggcaagaggcgaaaacatccccgccgtgatcgccctgaccgaccccgagggctgcccactgagccggtttaaggatagcctgggaaacccaacccacatcctgagaatcggcgagagctataaggagaagcagcggaccatccaggccaagaaggaggtggagcagcggagagccggcggctacagccggaagtacgccagcaaagccaagaatctggcagacgatatggtgagaaacaccgctagagatctgctgtactacgccgtgacccaggatgccatgctgatcttcgccaacctgagccggggcttcggccggcagggcaagcggaccttcatggccgagagacagtacacacggatggaggactggctgaccgccaagctggcctacgagggcctgagcaagacctacctgtccaagacactggcccagtacacctccaagacatgcagcaactgtgggtttaccatcaccagcgccgactacgacagggtgctggagaagctgaagaagacagcaacaggctggatgaccacaattaacggcaaggagctgaaggtggagggccagattacctactacaacagatacaagagacagaacgtagtcaaggacctgtccgtcgagctggatagactgagcgaagaatctgtgaacaacgacatctcctcctggacaaagggcagaagcggagaagctctgagcctcctgaagaaaagattctcccatagacccgtgcaggagaagttcgtgtgcctgaactgcggcttcgagacacacgcagccgagcaagccgccctgaacatcgccagatcctggctgttcctgcggagccaggagtacaagaaataccagacaaacaagacaaccggcaacaccgataagagagccttcgtcgagacctggcagtccttttaccggaagaagcttaaggaggtgtggaaacctgccgtgcggtctggcggatctggcggaggctccaccagccccaagaaaaagagaaaagtctaagctgccttctgcggggcttgccttctggccatgcccttcttctctcccttgcacctgtacctcttggtctttgaataaagcctgagtaggaaggctagcaaaaaaaaaaaaaaaaaaaaaaaaaaaaaaaaaaaaaaaaaaaaaaaaaaaaaaaaaaaaaaaaaaaaaaaaaaaaaaaa

SEQ ID NO: 13029 - RNA, 5785 nt, synthetic construct
  source 1..5785: mol_type = other RNA
aggaaataagagagaaaagaagagtaagaagaaatataagagccaccatggcccctaagaagaagcgtaaagtgagccggatggaacgcctcgtctacgaggtgcggcagaagtgcagaaacatcgaggacatctgcatctcctgcggatctctgaacgtgaccctggagcacccactgttcatcggcggcatgtgccagaactgtaaaaactgttttctggagtgtgcctatcaatacgacgatgacggctaccagagctactgcaccatctgttgcggcggaagagaggtgctgatgtgtggaaataacaactgctgccggtgcttctgcgtggaatgcgtggacctgctggtgggccccggcgccgcccaggccgctattaaggaagatccttggaactgctacatgtgcggccacaagggcacatacggcctgctgagacggagagaggactggcctagcagactgcagatgttcttcgccaataaccacgaccaggagttcgacccccctaaggtgtaccctcccgtccccgccgagaagagaaagcccatccgggtcctgagcctgttcgatggcatcgccaccggtctgctggtgctgaaggacctgggcatccaggtggataggtacattgcctccgaggtgtgcgaggactccatcaccgtgggaatggtgcgtcatcagggcaagatcatgtacgtgggcgacgtgcggagcgtgacacagaagcatatccaggagtggggccctttcgacctggtgatcggcggcagcccttgcaatgacctgagcatcgtgaacccagcccggaagggcctgtacgagggaaccggcagactgttcttcgagttttacagactgctgcacgacgcccggcctaaggaaggcgacgaccggcccttcttttggctgttcgagaatgtggtggccatgggagtcagcgacaagcgggatattagccggttcctggagagcaaccccgtgatgatcgatgccaaggaagtgagcgccgcccaccgggccagatacttctggggcaatctgcctggcatgaacagacccctggccagcaccgtgaacgacaagctggagctgcaggagtgcctggagcacggccggatcgccaagttcagcaaggtgagaaccatcaccacccgaagcaacagcatcaaacaaggcaaggaccagcactttcctgtgttcatgaacgagaaggaggacatcctgtggtgtaccgagatggagagagtgttcgggttcccagtccactacacagatgtcagcaacatgtctagactggccagacagagactgctgggaagaagctggtccgtccctgtgatcagacacctgttcgcccctctgaaggagtacttcgcctgcgtgagcagcggcaacagcaacgccaacagccggggccccagcttctctagcggcctggtgccactgtccctgagagggagccacatgggccccatggagatctacaaaaccgtgagcgcctggaagcggcagcctgtgcgcgtgctgagcctgtttcggaatatcgataaagtcctgaaaagcctgggattcctggagagcggctctggctccggcggtggcaccctgaagtacgtggaggatgtgacaaacgtggtcagacgggatgtggagaagtggggccccttcgatctggtgtacggcagcacccaacccctgggcagctcttgtgaccggtgccctggctggtacatgtttcagttccaccggatcctgcagtacgccctgccgagacaggagtcccagcggccattcttttggattttcatggacaacttgctgctgaccgaggatgaccaggaaactaccactcggttcctgcagaccgaagccgtgaccctgcaggacgtgagaggccgggactaccagaacgccatgcgggtgtggtccaacatccctggactgaaaagcaagcacgcacctctgacccctaaagaagaggagtacctgcaggcccaggtgcggagcagaagcaagctggacgcccctaaggtggatctgctggtgaagaattgcctcctgcccctgagagagtacttcaagtatttcagccagaatagtctgcccctgggaggcagcggcggcggcgagcccggcaccgtgagcttcggcgacgtggccgtgtacttcagcagggaggagtggggctgcctgaggcccgcccagagggccctgtacagggacgtgatgagggagacctacagccacctgggcgccctgggcgtgggcggcagcaagcccgccctgatcagctgggtggaggaggaggccgagctgtggggccccgccgcccaggaccccgaggtggccaagaggcccaccgaggccgacggcggcccaagcagcggcgcccctcctcccagcggcggcagcccagccggctccccaacctctaccgaggagggcacctctgagtccgccacccccgagagcggccctggcacctccaccgagcccagcgagggcagcgcacccggcagccctgccggcagccccacctccacagaggagggaaccagcaccgagcccagcgaaggcagcgccccaggcaccagcaccgagcctagtgagcaggagattaaacggatcaacaagatcagaagaagacttgtgaaagacagcaacaccaagaaggccggcaagacaggccccatgaaaaccctgctggttagagtgatgacacccgatctgagagagcggctggaaaacctgagaaagaagcctgaaaatatcccccagcccatcagcaatacatctagagccaacctgaataagctgctgaccgattacaccgaaatgaagaaggcgatcctgcatgtgtactgggaagagttccagaaggaccctgtgggcctgatgagccgggtggcccagcctgccagcaagaagatcgatcagaacaagctgaaacctgagatggacgagaagggcaacctgaccaccgccggctttgcctgctctcagtgtggccagcccctgttcgtgtacaagctggagcaggtgtctgagaagggcaaggcttacaccaactacttcggacggtgcaatgtggccgagcacgaaaagctgatcctgctggcccagctgaagcccgagaaggatagcgacgaagccgtgacatatagcctgggaaagtttgggcagagggccctggatttctacagcattcatgtgaccaaggagtccacccaccccgtgaagcccctggcccagatcgccggaaacagatacgcctccggacctgtgggaaaggccctgagcgacgcatgtatgggcacaatcgcctccttcctgtctaagtaccaggacatcatcatcgaacaccagaaggtggtgaagggcaaccagaagagactggagagcctgcgggagctggccggcaaggaaaacctggaataccctagcgtgaccctgccacctcagcctcacaccaaggagggcgttgatgcctacaacgaagtgatcgcccgggtgcgaatgtgggtgaacctgaacctgtggcagaagctgaagctaagcagagatgatgccaagcctctgctgagactgaagggattcccttcctttcctctggtcgagagacaggccaacgaagtggactggtgggacatggtgtgtaacgtgaagaagctgatcaacgagaaaaaggaggatggcaaggtgttttggcagaatctggctggctacaagagacaggaagccctgagaccatacctgagcagcgaggaagatcggaagaagggaaagaaattcgctcggtaccagctgggcgacctgctgctgcacctggaaaagaagcacggcgaggactggggaaaggtgtacgacgaggcctgggagcggattgacaagaaagtggaaggcctgagcaagcacatcaagctggaagaggaacggagaagcgaggacgcccagagcaaggccgccctgaccgactggctgcgggctaaggccagcttcgtgatcgagggcctgaaggaggccgacaaggacgagttctgcagatgcgagctgaagctgcagaagtggtacggggacctgcggggaaagcccttcgccatcgaagccgagaacagcatcctggacatcagcggcttcagcaagcagtacaactgtgccttcatctggcagaaggacggcgtgaagaagctgaacctgtacctgatcatcaactacttcaagggcggcaagctgcggttcaagaagatcaaacctgaagccttcgaagccaacagattctacaccgtgatcaacaaaaagagcggcgagatcgtgcccatggaggtgaacttcaacttcgacgaccccaacctgatcatcctgcctctggcctttggcaagagacagggcagagaattcatctggaacgacctgctgtccctggaaaccggcagcctgaagctggccaacggaagagtgatcgagaagacactgtacaacagaagaacccggcaggatgagcctgccctgttcgtggccctgaccttcgagcggcgggaggtcctggactcctccaatatcaaaccaatgaacctgatcggcgtggcaagaggcgaaaacatccccgccgtgatcgccctgaccgaccccgagggctgcccactgagccggtttaaggatagcctgggaaacccaacccacatcctgagaatcggcgagagctataaggagaagcagcggaccatccaggccaagaaggaggtggagcagcggagagccggcggctacagccggaagtacgccagcaaagccaagaatctggcagacgatatggtgagaaacaccgctagagatctgctgtactacgccgtgacccaggatgccatgctgatcttcgccaacctgagccggggcttcggccggcagggcaagcggaccttcatggccgagagacagtacacacggatggaggactggctgaccgccaagctggcctacgagggcctgagcaagacctacctgtccaagacactggcccagtacacctccaagacatgcagcaactgtgggtttaccatcaccagcgccgactacgacagggtgctggagaagctgaagaagacagcaacaggctggatgaccacaattaacggcaaggagctgaaggtggagggccagattacctactacaacagatacaagagacagaacgtagtcaaggacctgtccgtcgagctggatagactgagcgaagaatctgtgaacaacgacatctcctcctggacaaagggcagaagcggagaagctctgagcctcctgaagaaaagattctcccatagacccgtgcaggagaagttcgtgtgcctgaactgcggcttcgagacacacgcagccgagcaagccgccctgaacatcgccagatcctggctgttcctgcggagccaggagtacaagaaataccagacaaacaagacaaccggcaacaccgataagagagccttcgtcgagacctggcagtccttttaccggaagaagcttaaggaggtgtggaaacctgccgtgcggtctggcggatctggcggaggctccaccagccccaagaaaaagagaaaagtctaagctgccttctgcggggcttgccttctggccatgcccttcttctctcccttgcacctgtacctcttggtctttgaataaagcctgagtaggaaggctagcaaaaaaaaaaaaaaaaaaaaaaaaaaaaaaaaaaaaaaaaaaaaaaaaaaaaaaaaaaaaaaaaaaaaaaaaaaaaaaaa

SEQ ID NO: 13030 - RNA, 5785 nt, synthetic construct
  source 1..5785: mol_type = other RNA
aggaaataagagagaaaagaagagtaagaagaaatataagagccaccatggcccctaagaagaagcgtaaagtgagccggatggaacgcctcgtctacgaggtgcggcagaagtgcagaaacatcgaggacatctgcatctcctgcggatctctgaacgtgaccctggagcacccactgttcatcggcggcatgtgccagaactgtaaaaactgttttctggagtgtgcctatcaatacgacgatgacggctaccagagctactgcaccatctgttgcggcggaagagaggtgctgatgtgtggaaataacaactgctgccggtgcttctgcgtggaatgcgtggacctgctggtgggccccggcgccgcccaggccgctattaaggaagatccttggaactgctacatgtgcggccacaagggcacatacggcctgctgagacggagagaggactggcctagcagactgcagatgttcttcgccaataaccacgaccaggagttcgacccccctaaggtgtaccctcccgtccccgccgagaagagaaagcccatccgggtcctgagcctgttcgatggcatcgccaccggtctgctggtgctgaaggacctgggcatccaggtggataggtacattgcctccgaggtgtgcgaggactccatcaccgtgggaatggtgcgtcatcagggcaagatcatgtacgtgggcgacgtgcggagcgtgacacagaagcatatccaggagtggggccctttcgacctggtgatcggcggcagcccttgcaatgacctgagcatcgtgaacccagcccggaagggcctgtacgagggaaccggcagactgttcttcgagttttacagactgctgcacgacgcccggcctaaggaaggcgacgaccggcccttcttttggctgttcgagaatgtggtggccatgggagtcagcgacaagcgggatattagccggttcctggagagcaaccccgtgatgatcgatgccaaggaagtgagcgccgcccaccgggccagatacttctggggcaatctgcctggcatgaacagacccctggccagcaccgtgaacgacaagctggagctgcaggagtgcctggagcacggccggatcgccaagttcagcaaggtgagaaccatcaccacccgaagcaacagcatcaaacaaggcaaggaccagcactttcctgtgttcatgaacgagaaggaggacatcctgtggtgtaccgagatggagagagtgttcgggttcccagtccactacacagatgtcagcaacatgtctagactggccagacagagactgctgggaagaagctggtccgtccctgtgatcagacacctgttcgcccctctgaaggagtacttcgcctgcgtgagcagcggcaacagcaacgccaacagccggggccccagcttctctagcggcctggtgccactgtccctgagagggagccacatgggccccatggagatctacaaaaccgtgagcgcctggaagcggcagcctgtgcgcgtgctgagcctgtttcggaatatcgataaagtcctgaaaagcctgggattcctggagagcggctctggctccggcggtggcaccctgaagtacgtggaggatgtgacaaacgtggtcagacgggatgtggagaagtggggccccttcgatctggtgtacggcagcacccaacccctgggcagctcttgtgaccggtgccctggctggtacatgtttcagttccaccggatcctgcagtacgccctgccgagacaggagtcccagcggccattcttttggattttcatggacaacttgctgctgaccgaggatgaccaggaaactaccactcggttcctgcagaccgaagccgtgaccctgcaggacgtgagaggccgggactaccagaacgccatgcgggtgtggtccaacatccctggactgaaaagcaagcacgcacctctgacccctaaagaagaggagtacctgcaggcccaggtgcggagcagaagcaagctggacgcccctaaggtggatctgctggtgaagaattgcctcctgcccctgagagagtacttcaagtatttcagccagaatagtctgcccctgggaggcagcggcggcggcaagcccggcgccgtgagcttcgccgacgtggccgtgtacttcagccccgaggagtggggctgcctgaggcccgcccagagggccctgtacagggaggtgatgagggagacctacggcctgctgggcgccctgggcgtgggcggcgccaagcccgccctgatcagctgggtggaggaggaggccgagctgtggggccccggcgcccaggaccccgaggtggccatgtgccagacccaggccgacggcggcccaagcagcggcgcccctcctcccagcggcggcagcccagccggctccccaacctctaccgaggagggcacctctgagtccgccacccccgagagcggccctggcacctccaccgagcccagcgagggcagcgcacccggcagccctgccggcagccccacctccacagaggagggaaccagcaccgagcccagcgaaggcagcgccccaggcaccagcaccgagcctagtgagcaggagattaaacggatcaacaagatcagaagaagacttgtgaaagacagcaacaccaagaaggccggcaagacaggccccatgaaaaccctgctggttagagtgatgacacccgatctgagagagcggctggaaaacctgagaaagaagcctgaaaatatcccccagcccatcagcaatacatctagagccaacctgaataagctgctgaccgattacaccgaaatgaagaaggcgatcctgcatgtgtactgggaagagttccagaaggaccctgtgggcctgatgagccgggtggcccagcctgccagcaagaagatcgatcagaacaagctgaaacctgagatggacgagaagggcaacctgaccaccgccggctttgcctgctctcagtgtggccagcccctgttcgtgtacaagctggagcaggtgtctgagaagggcaaggcttacaccaactacttcggacggtgcaatgtggccgagcacgaaaagctgatcctgctggcccagctgaagcccgagaaggatagcgacgaagccgtgacatatagcctgggaaagtttgggcagagggccctggatttctacagcattcatgtgaccaaggagtccacccaccccgtgaagcccctggcccagatcgccggaaacagatacgcctccggacctgtgggaaaggccctgagcgacgcatgtatgggcacaatcgcctccttcctgtctaagtaccaggacatcatcatcgaacaccagaaggtggtgaagggcaaccagaagagactggagagcctgcgggagctggccggcaaggaaaacctggaataccctagcgtgaccctgccacctcagcctcacaccaaggagggcgttgatgcctacaacgaagtgatcgcccgggtgcgaatgtgggtgaacctgaacctgtggcagaagctgaagctaagcagagatgatgccaagcctctgctgagactgaagggattcccttcctttcctctggtcgagagacaggccaacgaagtggactggtgggacatggtgtgtaacgtgaagaagctgatcaacgagaaaaaggaggatggcaaggtgttttggcagaatctggctggctacaagagacaggaagccctgagaccatacctgagcagcgaggaagatcggaagaagggaaagaaattcgctcggtaccagctgggcgacctgctgctgcacctggaaaagaagcacggcgaggactggggaaaggtgtacgacgaggcctgggagcggattgacaagaaagtggaaggcctgagcaagcacatcaagctggaagaggaacggagaagcgaggacgcccagagcaaggccgccctgaccgactggctgcgggctaaggccagcttcgtgatcgagggcctgaaggaggccgacaaggacgagttctgcagatgcgagctgaagctgcagaagtggtacggggacctgcggggaaagcccttcgccatcgaagccgagaacagcatcctggacatcagcggcttcagcaagcagtacaactgtgccttcatctggcagaaggacggcgtgaagaagctgaacctgtacctgatcatcaactacttcaagggcggcaagctgcggttcaagaagatcaaacctgaagccttcgaagccaacagattctacaccgtgatcaacaaaaagagcggcgagatcgtgcccatggaggtgaacttcaacttcgacgaccccaacctgatcatcctgcctctggcctttggcaagagacagggcagagaattcatctggaacgacctgctgtccctggaaaccggcagcctgaagctggccaacggaagagtgatcgagaagacactgtacaacagaagaacccggcaggatgagcctgccctgttcgtggccctgaccttcgagcggcgggaggtcctggactcctccaatatcaaaccaatgaacctgatcggcgtggcaagaggcgaaaacatccccgccgtgatcgccctgaccgaccccgagggctgcccactgagccggtttaaggatagcctgggaaacccaacccacatcctgagaatcggcgagagctataaggagaagcagcggaccatccaggccaagaaggaggtggagcagcggagagccggcggctacagccggaagtacgccagcaaagccaagaatctggcagacgatatggtgagaaacaccgctagagatctgctgtactacgccgtgacccaggatgccatgctgatcttcgccaacctgagccggggcttcggccggcagggcaagcggaccttcatggccgagagacagtacacacggatggaggactggctgaccgccaagctggcctacgagggcctgagcaagacctacctgtccaagacactggcccagtacacctccaagacatgcagcaactgtgggtttaccatcaccagcgccgactacgacagggtgctggagaagctgaagaagacagcaacaggctggatgaccacaattaacggcaaggagctgaaggtggagggccagattacctactacaacagatacaagagacagaacgtagtcaaggacctgtccgtcgagctggatagactgagcgaagaatctgtgaacaacgacatctcctcctggacaaagggcagaagcggagaagctctgagcctcctgaagaaaagattctcccatagacccgtgcaggagaagttcgtgtgcctgaactgcggcttcgagacacacgcagccgagcaagccgccctgaacatcgccagatcctggctgttcctgcggagccaggagtacaagaaataccagacaaacaagacaaccggcaacaccgataagagagccttcgtcgagacctggcagtccttttaccggaagaagcttaaggaggtgtggaaacctgccgtgcggtctggcggatctggcggaggctccaccagccccaagaaaaagagaaaagtctaagctgccttctgcggggcttgccttctggccatgcccttcttctctcccttgcacctgtacctcttggtctttgaataaagcctgagtaggaaggctagcaaaaaaaaaaaaaaaaaaaaaaaaaaaaaaaaaaaaaaaaaaaaaaaaaaaaaaaaaaaaaaaaaaaaaaaaaaaaaaaa

SEQ ID NO: 13031 - RNA, 5785 nt, synthetic construct
  source 1..5785: mol_type = other RNA
aggaaataagagagaaaagaagagtaagaagaaatataagagccaccatggcccctaagaagaagcgtaaagtgagccggatggaacgcctcgtctacgaggtgcggcagaagtgcagaaacatcgaggacatctgcatctcctgcggatctctgaacgtgaccctggagcacccactgttcatcggcggcatgtgccagaactgtaaaaactgttttctggagtgtgcctatcaatacgacgatgacggctaccagagctactgcaccatctgttgcggcggaagagaggtgctgatgtgtggaaataacaactgctgccggtgcttctgcgtggaatgcgtggacctgctggtgggccccggcgccgcccaggccgctattaaggaagatccttggaactgctacatgtgcggccacaagggcacatacggcctgctgagacggagagaggactggcctagcagactgcagatgttcttcgccaataaccacgaccaggagttcgacccccctaaggtgtaccctcccgtccccgccgagaagagaaagcccatccgggtcctgagcctgttcgatggcatcgccaccggtctgctggtgctgaaggacctgggcatccaggtggataggtacattgcctccgaggtgtgcgaggactccatcaccgtgggaatggtgcgtcatcagggcaagatcatgtacgtgggcgacgtgcggagcgtgacacagaagcatatccaggagtggggccctttcgacctggtgatcggcggcagcccttgcaatgacctgagcatcgtgaacccagcccggaagggcctgtacgagggaaccggcagactgttcttcgagttttacagactgctgcacgacgcccggcctaaggaaggcgacgaccggcccttcttttggctgttcgagaatgtggtggccatgggagtcagcgacaagcgggatattagccggttcctggagagcaaccccgtgatgatcgatgccaaggaagtgagcgccgcccaccgggccagatacttctggggcaatctgcctggcatgaacagacccctggccagcaccgtgaacgacaagctggagctgcaggagtgcctggagcacggccggatcgccaagttcagcaaggtgagaaccatcaccacccgaagcaacagcatcaaacaaggcaaggaccagcactttcctgtgttcatgaacgagaaggaggacatcctgtggtgtaccgagatggagagagtgttcgggttcccagtccactacacagatgtcagcaacatgtctagactggccagacagagactgctgggaagaagctggtccgtccctgtgatcagacacctgttcgcccctctgaaggagtacttcgcctgcgtgagcagcggcaacagcaacgccaacagccggggccccagcttctctagcggcctggtgccactgtccctgagagggagccacatgggccccatggagatctacaaaaccgtgagcgcctggaagcggcagcctgtgcgcgtgctgagcctgtttcggaatatcgataaagtcctgaaaagcctgggattcctggagagcggctctggctccggcggtggcaccctgaagtacgtggaggatgtgacaaacgtggtcagacgggatgtggagaagtggggccccttcgatctggtgtacggcagcacccaacccctgggcagctcttgtgaccggtgccctggctggtacatgtttcagttccaccggatcctgcagtacgccctgccgagacaggagtcccagcggccattcttttggattttcatggacaacttgctgctgaccgaggatgaccaggaaactaccactcggttcctgcagaccgaagccgtgaccctgcaggacgtgagaggccgggactaccagaacgccatgcgggtgtggtccaacatccctggactgaaaagcaagcacgcacctctgacccctaaagaagaggagtacctgcaggcccaggtgcggagcagaagcaagctggacgcccctaaggtggatctgctggtgaagaattgcctcctgcccctgagagagtacttcaagtatttcagccagaatagtctgcccctgggaggcagcggcggcggcgcccaggaggtggtgaccttcaaggacgtggccgtggacttcaccagggaggagtggtgcctgctgagccccccccagaaggagctgtacaaggaggtgatgctggagaacgcccagaacctgctgagcgtgggcctgcccggcccccccgaggacgtgatcagctacctgaagcagaggaaggacccctggatgctggagcaggagggcctgaggagctgctgccccgagggcgagatcaggggcggcccaagcagcggcgcccctcctcccagcggcggcagcccagccggctccccaacctctaccgaggagggcacctctgagtccgccacccccgagagcggccctggcacctccaccgagcccagcgagggcagcgcacccggcagccctgccggcagccccacctccacagaggagggaaccagcaccgagcccagcgaaggcagcgccccaggcaccagcaccgagcctagtgagcaggagattaaacggatcaacaagatcagaagaagacttgtgaaagacagcaacaccaagaaggccggcaagacaggccccatgaaaaccctgctggttagagtgatgacacccgatctgagagagcggctggaaaacctgagaaagaagcctgaaaatatcccccagcccatcagcaatacatctagagccaacctgaataagctgctgaccgattacaccgaaatgaagaaggcgatcctgcatgtgtactgggaagagttccagaaggaccctgtgggcctgatgagccgggtggcccagcctgccagcaagaagatcgatcagaacaagctgaaacctgagatggacgagaagggcaacctgaccaccgccggctttgcctgctctcagtgtggccagcccctgttcgtgtacaagctggagcaggtgtctgagaagggcaaggcttacaccaactacttcggacggtgcaatgtggccgagcacgaaaagctgatcctgctggcccagctgaagcccgagaaggatagcgacgaagccgtgacatatagcctgggaaagtttgggcagagggccctggatttctacagcattcatgtgaccaaggagtccacccaccccgtgaagcccctggcccagatcgccggaaacagatacgcctccggacctgtgggaaaggccctgagcgacgcatgtatgggcacaatcgcctccttcctgtctaagtaccaggacatcatcatcgaacaccagaaggtggtgaagggcaaccagaagagactggagagcctgcgggagctggccggcaaggaaaacctggaataccctagcgtgaccctgccacctcagcctcacaccaaggagggcgttgatgcctacaacgaagtgatcgcccgggtgcgaatgtgggtgaacctgaacctgtggcagaagctgaagctaagcagagatgatgccaagcctctgctgagactgaagggattcccttcctttcctctggtcgagagacaggccaacgaagtggactggtgggacatggtgtgtaacgtgaagaagctgatcaacgagaaaaaggaggatggcaaggtgttttggcagaatctggctggctacaagagacaggaagccctgagaccatacctgagcagcgaggaagatcggaagaagggaaagaaattcgctcggtaccagctgggcgacctgctgctgcacctggaaaagaagcacggcgaggactggggaaaggtgtacgacgaggcctgggagcggattgacaagaaagtggaaggcctgagcaagcacatcaagctggaagaggaacggagaagcgaggacgcccagagcaaggccgccctgaccgactggctgcgggctaaggccagcttcgtgatcgagggcctgaaggaggccgacaaggacgagttctgcagatgcgagctgaagctgcagaagtggtacggggacctgcggggaaagcccttcgccatcgaagccgagaacagcatcctggacatcagcggcttcagcaagcagtacaactgtgccttcatctggcagaaggacggcgtgaagaagctgaacctgtacctgatcatcaactacttcaagggcggcaagctgcggttcaagaagatcaaacctgaagccttcgaagccaacagattctacaccgtgatcaacaaaaagagcggcgagatcgtgcccatggaggtgaacttcaacttcgacgaccccaacctgatcatcctgcctctggcctttggcaagagacagggcagagaattcatctggaacgacctgctgtccctggaaaccggcagcctgaagctggccaacggaagagtgatcgagaagacactgtacaacagaagaacccggcaggatgagcctgccctgttcgtggccctgaccttcgagcggcgggaggtcctggactcctccaatatcaaaccaatgaacctgatcggcgtggcaagaggcgaaaacatccccgccgtgatcgccctgaccgaccccgagggctgcccactgagccggtttaaggatagcctgggaaacccaacccacatcctgagaatcggcgagagctataaggagaagcagcggaccatccaggccaagaaggaggtggagcagcggagagccggcggctacagccggaagtacgccagcaaagccaagaatctggcagacgatatggtgagaaacaccgctagagatctgctgtactacgccgtgacccaggatgccatgctgatcttcgccaacctgagccggggcttcggccggcagggcaagcggaccttcatggccgagagacagtacacacggatggaggactggctgaccgccaagctggcctacgagggcctgagcaagacctacctgtccaagacactggcccagtacacctccaagacatgcagcaactgtgggtttaccatcaccagcgccgactacgacagggtgctggagaagctgaagaagacagcaacaggctggatgaccacaattaacggcaaggagctgaaggtggagggccagattacctactacaacagatacaagagacagaacgtagtcaaggacctgtccgtcgagctggatagactgagcgaagaatctgtgaacaacgacatctcctcctggacaaagggcagaagcggagaagctctgagcctcctgaagaaaagattctcccatagacccgtgcaggagaagttcgtgtgcctgaactgcggcttcgagacacacgcagccgagcaagccgccctgaacatcgccagatcctggctgttcctgcggagccaggagtacaagaaataccagacaaacaagacaaccggcaacaccgataagagagccttcgtcgagacctggcagtccttttaccggaagaagcttaaggaggtgtggaaacctgccgtgcggtctggcggatctggcggaggctccaccagccccaagaaaaagagaaaagtctaagctgccttctgcggggcttgccttctggccatgcccttcttctctcccttgcacctgtacctcttggtctttgaataaagcctgagtaggaaggctagcaaaaaaaaaaaaaaaaaaaaaaaaaaaaaaaaaaaaaaaaaaaaaaaaaaaaaaaaaaaaaaaaaaaaaaaaaaaaaaaa

SEQ ID NO: 13032 - RNA, 5785 nt, synthetic construct
  source 1..5785: mol_type = other RNA
aggaaataagagagaaaagaagagtaagaagaaatataagagccaccatggcccctaagaagaagcgtaaagtgagccggatggaacgcctcgtctacgaggtgcggcagaagtgcagaaacatcgaggacatctgcatctcctgcggatctctgaacgtgaccctggagcacccactgttcatcggcggcatgtgccagaactgtaaaaactgttttctggagtgtgcctatcaatacgacgatgacggctaccagagctactgcaccatctgttgcggcggaagagaggtgctgatgtgtggaaataacaactgctgccggtgcttctgcgtggaatgcgtggacctgctggtgggccccggcgccgcccaggccgctattaaggaagatccttggaactgctacatgtgcggccacaagggcacatacggcctgctgagacggagagaggactggcctagcagactgcagatgttcttcgccaataaccacgaccaggagttcgacccccctaaggtgtaccctcccgtccccgccgagaagagaaagcccatccgggtcctgagcctgttcgatggcatcgccaccggtctgctggtgctgaaggacctgggcatccaggtggataggtacattgcctccgaggtgtgcgaggactccatcaccgtgggaatggtgcgtcatcagggcaagatcatgtacgtgggcgacgtgcggagcgtgacacagaagcatatccaggagtggggccctttcgacctggtgatcggcggcagcccttgcaatgacctgagcatcgtgaacccagcccggaagggcctgtacgagggaaccggcagactgttcttcgagttttacagactgctgcacgacgcccggcctaaggaaggcgacgaccggcccttcttttggctgttcgagaatgtggtggccatgggagtcagcgacaagcgggatattagccggttcctggagagcaaccccgtgatgatcgatgccaaggaagtgagcgccgcccaccgggccagatacttctggggcaatctgcctggcatgaacagacccctggccagcaccgtgaacgacaagctggagctgcaggagtgcctggagcacggccggatcgccaagttcagcaaggtgagaaccatcaccacccgaagcaacagcatcaaacaaggcaaggaccagcactttcctgtgttcatgaacgagaaggaggacatcctgtggtgtaccgagatggagagagtgttcgggttcccagtccactacacagatgtcagcaacatgtctagactggccagacagagactgctgggaagaagctggtccgtccctgtgatcagacacctgttcgcccctctgaaggagtacttcgcctgcgtgagcagcggcaacagcaacgccaacagccggggccccagcttctctagcggcctggtgccactgtccctgagagggagccacatgggccccatggagatctacaaaaccgtgagcgcctggaagcggcagcctgtgcgcgtgctgagcctgtttcggaatatcgataaagtcctgaaaagcctgggattcctggagagcggctctggctccggcggtggcaccctgaagtacgtggaggatgtgacaaacgtggtcagacgggatgtggagaagtggggccccttcgatctggtgtacggcagcacccaacccctgggcagctcttgtgaccggtgccctggctggtacatgtttcagttccaccggatcctgcagtacgccctgccgagacaggagtcccagcggccattcttttggattttcatggacaacttgctgctgaccgaggatgaccaggaaactaccactcggttcctgcagaccgaagccgtgaccctgcaggacgtgagaggccgggactaccagaacgccatgcgggtgtggtccaacatccctggactgaaaagcaagcacgcacctctgacccctaaagaagaggagtacctgcaggcccaggtgcggagcagaagcaagctggacgcccctaaggtggatctgctggtgaagaattgcctcctgcccctgagagagtacttcaagtatttcagccagaatagtctgcccctgggaggcagcggcggcggcgccaaggcccccgtgaccttcggcgacctggccatctacttcagccaggaggagtgggagtggctgagccccatccagaaggacctgtacgaggacgtgatgctggagaactaccagaacctggtgagcctgggcctgagcttcaggaggcccaacgtgatcagcctgctggagaagggcaaggccccctggatggtggaccccgtgaagaggaggaggggcctggacctgggcagcaagtgcggcggcccaagcagcggcgcccctcctcccagcggcggcagcccagccggctccccaacctctaccgaggagggcacctctgagtccgccacccccgagagcggccctggcacctccaccgagcccagcgagggcagcgcacccggcagccctgccggcagccccacctccacagaggagggaaccagcaccgagcccagcgaaggcagcgccccaggcaccagcaccgagcctagtgagcaggagattaaacggatcaacaagatcagaagaagacttgtgaaagacagcaacaccaagaaggccggcaagacaggccccatgaaaaccctgctggttagagtgatgacacccgatctgagagagcggctggaaaacctgagaaagaagcctgaaaatatcccccagcccatcagcaatacatctagagccaacctgaataagctgctgaccgattacaccgaaatgaagaaggcgatcctgcatgtgtactgggaagagttccagaaggaccctgtgggcctgatgagccgggtggcccagcctgccagcaagaagatcgatcagaacaagctgaaacctgagatggacgagaagggcaacctgaccaccgccggctttgcctgctctcagtgtggccagcccctgttcgtgtacaagctggagcaggtgtctgagaagggcaaggcttacaccaactacttcggacggtgcaatgtggccgagcacgaaaagctgatcctgctggcccagctgaagcccgagaaggatagcgacgaagccgtgacatatagcctgggaaagtttgggcagagggccctggatttctacagcattcatgtgaccaaggagtccacccaccccgtgaagcccctggcccagatcgccggaaacagatacgcctccggacctgtgggaaaggccctgagcgacgcatgtatgggcacaatcgcctccttcctgtctaagtaccaggacatcatcatcgaacaccagaaggtggtgaagggcaaccagaagagactggagagcctgcgggagctggccggcaaggaaaacctggaataccctagcgtgaccctgccacctcagcctcacaccaaggagggcgttgatgcctacaacgaagtgatcgcccgggtgcgaatgtgggtgaacctgaacctgtggcagaagctgaagctaagcagagatgatgccaagcctctgctgagactgaagggattcccttcctttcctctggtcgagagacaggccaacgaagtggactggtgggacatggtgtgtaacgtgaagaagctgatcaacgagaaaaaggaggatggcaaggtgttttggcagaatctggctggctacaagagacaggaagccctgagaccatacctgagcagcgaggaagatcggaagaagggaaagaaattcgctcggtaccagctgggcgacctgctgctgcacctggaaaagaagcacggcgaggactggggaaaggtgtacgacgaggcctgggagcggattgacaagaaagtggaaggcctgagcaagcacatcaagctggaagaggaacggagaagcgaggacgcccagagcaaggccgccctgaccgactggctgcgggctaaggccagcttcgtgatcgagggcctgaaggaggccgacaaggacgagttctgcagatgcgagctgaagctgcagaagtggtacggggacctgcggggaaagcccttcgccatcgaagccgagaacagcatcctggacatcagcggcttcagcaagcagtacaactgtgccttcatctggcagaaggacggcgtgaagaagctgaacctgtacctgatcatcaactacttcaagggcggcaagctgcggttcaagaagatcaaacctgaagccttcgaagccaacagattctacaccgtgatcaacaaaaagagcggcgagatcgtgcccatggaggtgaacttcaacttcgacgaccccaacctgatcatcctgcctctggcctttggcaagagacagggcagagaattcatctggaacgacctgctgtccctggaaaccggcagcctgaagctggccaacggaagagtgatcgagaagacactgtacaacagaagaacccggcaggatgagcctgccctgttcgtggccctgaccttcgagcggcgggaggtcctggactcctccaatatcaaaccaatgaacctgatcggcgtggcaagaggcgaaaacatccccgccgtgatcgccctgaccgaccccgagggctgcccactgagccggtttaaggatagcctgggaaacccaacccacatcctgagaatcggcgagagctataaggagaagcagcggaccatccaggccaagaaggaggtggagcagcggagagccggcggctacagccggaagtacgccagcaaagccaagaatctggcagacgatatggtgagaaacaccgctagagatctgctgtactacgccgtgacccaggatgccatgctgatcttcgccaacctgagccggggcttcggccggcagggcaagcggaccttcatggccgagagacagtacacacggatggaggactggctgaccgccaagctggcctacgagggcctgagcaagacctacctgtccaagacactggcccagtacacctccaagacatgcagcaactgtgggtttaccatcaccagcgccgactacgacagggtgctggagaagctgaagaagacagcaacaggctggatgaccacaattaacggcaaggagctgaaggtggagggccagattacctactacaacagatacaagagacagaacgtagtcaaggacctgtccgtcgagctggatagactgagcgaagaatctgtgaacaacgacatctcctcctggacaaagggcagaagcggagaagctctgagcctcctgaagaaaagattctcccatagacccgtgcaggagaagttcgtgtgcctgaactgcggcttcgagacacacgcagccgagcaagccgccctgaacatcgccagatcctggctgttcctgcggagccaggagtacaagaaataccagacaaacaagacaaccggcaacaccgataagagagccttcgtcgagacctggcagtccttttaccggaagaagcttaaggaggtgtggaaacctgccgtgcggtctggcggatctggcggaggctccaccagccccaagaaaaagagaaaagtctaagctgccttctgcggggcttgccttctggccatgcccttcttctctcccttgcacctgtacctcttggtctttgaataaagcctgagtaggaaggctagcaaaaaaaaaaaaaaaaaaaaaaaaaaaaaaaaaaaaaaaaaaaaaaaaaaaaaaaaaaaaaaaaaaaaaaaaaaaaaaaa

SEQ ID NO: 13033 - RNA, 5785 nt, synthetic construct
  source 1..5785: mol_type = other RNA
aggaaataagagagaaaagaagagtaagaagaaatataagagccaccatggcccctaagaagaagcgtaaagtgagccggatggaacgcctcgtctacgaggtgcggcagaagtgcagaaacatcgaggacatctgcatctcctgcggatctctgaacgtgaccctggagcacccactgttcatcggcggcatgtgccagaactgtaaaaactgttttctggagtgtgcctatcaatacgacgatgacggctaccagagctactgcaccatctgttgcggcggaagagaggtgctgatgtgtggaaataacaactgctgccggtgcttctgcgtggaatgcgtggacctgctggtgggccccggcgccgcccaggccgctattaaggaagatccttggaactgctacatgtgcggccacaagggcacatacggcctgctgagacggagagaggactggcctagcagactgcagatgttcttcgccaataaccacgaccaggagttcgacccccctaaggtgtaccctcccgtccccgccgagaagagaaagcccatccgggtcctgagcctgttcgatggcatcgccaccggtctgctggtgctgaaggacctgggcatccaggtggataggtacattgcctccgaggtgtgcgaggactccatcaccgtgggaatggtgcgtcatcagggcaagatcatgtacgtgggcgacgtgcggagcgtgacacagaagcatatccaggagtggggccctttcgacctggtgatcggcggcagcccttgcaatgacctgagcatcgtgaacccagcccggaagggcctgtacgagggaaccggcagactgttcttcgagttttacagactgctgcacgacgcccggcctaaggaaggcgacgaccggcccttcttttggctgttcgagaatgtggtggccatgggagtcagcgacaagcgggatattagccggttcctggagagcaaccccgtgatgatcgatgccaaggaagtgagcgccgcccaccgggccagatacttctggggcaatctgcctggcatgaacagacccctggccagcaccgtgaacgacaagctggagctgcaggagtgcctggagcacggccggatcgccaagttcagcaaggtgagaaccatcaccacccgaagcaacagcatcaaacaaggcaaggaccagcactttcctgtgttcatgaacgagaaggaggacatcctgtggtgtaccgagatggagagagtgttcgggttcccagtccactacacagatgtcagcaacatgtctagactggccagacagagactgctgggaagaagctggtccgtccctgtgatcagacacctgttcgcccctctgaaggagtacttcgcctgcgtgagcagcggcaacagcaacgccaacagccggggccccagcttctctagcggcctggtgccactgtccctgagagggagccacatgggccccatggagatctacaaaaccgtgagcgcctggaagcggcagcctgtgcgcgtgctgagcctgtttcggaatatcgataaagtcctgaaaagcctgggattcctggagagcggctctggctccggcggtggcaccctgaagtacgtggaggatgtgacaaacgtggtcagacgggatgtggagaagtggggccccttcgatctggtgtacggcagcacccaacccctgggcagctcttgtgaccggtgccctggctggtacatgtttcagttccaccggatcctgcagtacgccctgccgagacaggagtcccagcggccattcttttggattttcatggacaacttgctgctgaccgaggatgaccaggaaactaccactcggttcctgcagaccgaagccgtgaccctgcaggacgtgagaggccgggactaccagaacgccatgcgggtgtggtccaacatccctggactgaaaagcaagcacgcacctctgacccctaaagaagaggagtacctgcaggcccaggtgcggagcagaagcaagctggacgcccctaaggtggatctgctggtgaagaattgcctcctgcccctgagagagtacttcaagtatttcagccagaatagtctgcccctgggaggcagcggcggcggcatggccttcagggacgtggccgtggacttcacccaggacgagtggaggctgctgagccccgcccagaggaccctgtacagggaggtgatgctggagaactacagcaacctggtgagcctgggcatcagcttcagcaagcccgagatcatcacccagctggagcagggcaaggagacctggagggaggagaagaagtgcccccccgccacctgccccgccgaccccgagcccgagctgtgcctgggcggcccaagcagcggcgcccctcctcccagcggcggcagcccagccggctccccaacctctaccgaggagggcacctctgagtccgccacccccgagagcggccctggcacctccaccgagcccagcgagggcagcgcacccggcagccctgccggcagccccacctccacagaggagggaaccagcaccgagcccagcgaaggcagcgccccaggcaccagcaccgagcctagtgagcaggagattaaacggatcaacaagatcagaagaagacttgtgaaagacagcaacaccaagaaggccggcaagacaggccccatgaaaaccctgctggttagagtgatgacacccgatctgagagagcggctggaaaacctgagaaagaagcctgaaaatatcccccagcccatcagcaatacatctagagccaacctgaataagctgctgaccgattacaccgaaatgaagaaggcgatcctgcatgtgtactgggaagagttccagaaggaccctgtgggcctgatgagccgggtggcccagcctgccagcaagaagatcgatcagaacaagctgaaacctgagatggacgagaagggcaacctgaccaccgccggctttgcctgctctcagtgtggccagcccctgttcgtgtacaagctggagcaggtgtctgagaagggcaaggcttacaccaactacttcggacggtgcaatgtggccgagcacgaaaagctgatcctgctggcccagctgaagcccgagaaggatagcgacgaagccgtgacatatagcctgggaaagtttgggcagagggccctggatttctacagcattcatgtgaccaaggagtccacccaccccgtgaagcccctggcccagatcgccggaaacagatacgcctccggacctgtgggaaaggccctgagcgacgcatgtatgggcacaatcgcctccttcctgtctaagtaccaggacatcatcatcgaacaccagaaggtggtgaagggcaaccagaagagactggagagcctgcgggagctggccggcaaggaaaacctggaataccctagcgtgaccctgccacctcagcctcacaccaaggagggcgttgatgcctacaacgaagtgatcgcccgggtgcgaatgtgggtgaacctgaacctgtggcagaagctgaagctaagcagagatgatgccaagcctctgctgagactgaagggattcccttcctttcctctggtcgagagacaggccaacgaagtggactggtgggacatggtgtgtaacgtgaagaagctgatcaacgagaaaaaggaggatggcaaggtgttttggcagaatctggctggctacaagagacaggaagccctgagaccatacctgagcagcgaggaagatcggaagaagggaaagaaattcgctcggtaccagctgggcgacctgctgctgcacctggaaaagaagcacggcgaggactggggaaaggtgtacgacgaggcctgggagcggattgacaagaaagtggaaggcctgagcaagcacatcaagctggaagaggaacggagaagcgaggacgcccagagcaaggccgccctgaccgactggctgcgggctaaggccagcttcgtgatcgagggcctgaaggaggccgacaaggacgagttctgcagatgcgagctgaagctgcagaagtggtacggggacctgcggggaaagcccttcgccatcgaagccgagaacagcatcctggacatcagcggcttcagcaagcagtacaactgtgccttcatctggcagaaggacggcgtgaagaagctgaacctgtacctgatcatcaactacttcaagggcggcaagctgcggttcaagaagatcaaacctgaagccttcgaagccaacagattctacaccgtgatcaacaaaaagagcggcgagatcgtgcccatggaggtgaacttcaacttcgacgaccccaacctgatcatcctgcctctggcctttggcaagagacagggcagagaattcatctggaacgacctgctgtccctggaaaccggcagcctgaagctggccaacggaagagtgatcgagaagacactgtacaacagaagaacccggcaggatgagcctgccctgttcgtggccctgaccttcgagcggcgggaggtcctggactcctccaatatcaaaccaatgaacctgatcggcgtggcaagaggcgaaaacatccccgccgtgatcgccctgaccgaccccgagggctgcccactgagccggtttaaggatagcctgggaaacccaacccacatcctgagaatcggcgagagctataaggagaagcagcggaccatccaggccaagaaggaggtggagcagcggagagccggcggctacagccggaagtacgccagcaaagccaagaatctggcagacgatatggtgagaaacaccgctagagatctgctgtactacgccgtgacccaggatgccatgctgatcttcgccaacctgagccggggcttcggccggcagggcaagcggaccttcatggccgagagacagtacacacggatggaggactggctgaccgccaagctggcctacgagggcctgagcaagacctacctgtccaagacactggcccagtacacctccaagacatgcagcaactgtgggtttaccatcaccagcgccgactacgacagggtgctggagaagctgaagaagacagcaacaggctggatgaccacaattaacggcaaggagctgaaggtggagggccagattacctactacaacagatacaagagacagaacgtagtcaaggacctgtccgtcgagctggatagactgagcgaagaatctgtgaacaacgacatctcctcctggacaaagggcagaagcggagaagctctgagcctcctgaagaaaagattctcccatagacccgtgcaggagaagttcgtgtgcctgaactgcggcttcgagacacacgcagccgagcaagccgccctgaacatcgccagatcctggctgttcctgcggagccaggagtacaagaaataccagacaaacaagacaaccggcaacaccgataagagagccttcgtcgagacctggcagtccttttaccggaagaagcttaaggaggtgtggaaacctgccgtgcggtctggcggatctggcggaggctccaccagccccaagaaaaagagaaaagtctaagctgccttctgcggggcttgccttctggccatgcccttcttctctcccttgcacctgtacctcttggtctttgaataaagcctgagtaggaaggctagcaaaaaaaaaaaaaaaaaaaaaaaaaaaaaaaaaaaaaaaaaaaaaaaaaaaaaaaaaaaaaaaaaaaaaaaaaaaaaaaa

SEQ ID NO: 13034 - RNA, 5785 nt, synthetic construct
  source 1..5785: mol_type = other RNA
aggaaataagagagaaaagaagagtaagaagaaatataagagccaccatggcccctaagaagaagcgtaaagtgagccggatggaacgcctcgtctacgaggtgcggcagaagtgcagaaacatcgaggacatctgcatctcctgcggatctctgaacgtgaccctggagcacccactgttcatcggcggcatgtgccagaactgtaaaaactgttttctggagtgtgcctatcaatacgacgatgacggctaccagagctactgcaccatctgttgcggcggaagagaggtgctgatgtgtggaaataacaactgctgccggtgcttctgcgtggaatgcgtggacctgctggtgggccccggcgccgcccaggccgctattaaggaagatccttggaactgctacatgtgcggccacaagggcacatacggcctgctgagacggagagaggactggcctagcagactgcagatgttcttcgccaataaccacgaccaggagttcgacccccctaaggtgtaccctcccgtccccgccgagaagagaaagcccatccgggtcctgagcctgttcgatggcatcgccaccggtctgctggtgctgaaggacctgggcatccaggtggataggtacattgcctccgaggtgtgcgaggactccatcaccgtgggaatggtgcgtcatcagggcaagatcatgtacgtgggcgacgtgcggagcgtgacacagaagcatatccaggagtggggccctttcgacctggtgatcggcggcagcccttgcaatgacctgagcatcgtgaacccagcccggaagggcctgtacgagggaaccggcagactgttcttcgagttttacagactgctgcacgacgcccggcctaaggaaggcgacgaccggcccttcttttggctgttcgagaatgtggtggccatgggagtcagcgacaagcgggatattagccggttcctggagagcaaccccgtgatgatcgatgccaaggaagtgagcgccgcccaccgggccagatacttctggggcaatctgcctggcatgaacagacccctggccagcaccgtgaacgacaagctggagctgcaggagtgcctggagcacggccggatcgccaagttcagcaaggtgagaaccatcaccacccgaagcaacagcatcaaacaaggcaaggaccagcactttcctgtgttcatgaacgagaaggaggacatcctgtggtgtaccgagatggagagagtgttcgggttcccagtccactacacagatgtcagcaacatgtctagactggccagacagagactgctgggaagaagctggtccgtccctgtgatcagacacctgttcgcccctctgaaggagtacttcgcctgcgtgagcagcggcaacagcaacgccaacagccggggccccagcttctctagcggcctggtgccactgtccctgagagggagccacatgggccccatggagatctacaaaaccgtgagcgcctggaagcggcagcctgtgcgcgtgctgagcctgtttcggaatatcgataaagtcctgaaaagcctgggattcctggagagcggctctggctccggcggtggcaccctgaagtacgtggaggatgtgacaaacgtggtcagacgggatgtggagaagtggggccccttcgatctggtgtacggcagcacccaacccctgggcagctcttgtgaccggtgccctggctggtacatgtttcagttccaccggatcctgcagtacgccctgccgagacaggagtcccagcggccattcttttggattttcatggacaacttgctgctgaccgaggatgaccaggaaactaccactcggttcctgcagaccgaagccgtgaccctgcaggacgtgagaggccgggactaccagaacgccatgcgggtgtggtccaacatccctggactgaaaagcaagcacgcacctctgacccctaaagaagaggagtacctgcaggcccaggtgcggagcagaagcaagctggacgcccctaaggtggatctgctggtgaagaattgcctcctgcccctgagagagtacttcaagtatttcagccagaatagtctgcccctgggaggcagcggcggcggcttctgggagagcgtgaccttccaggacgtggccgtggacttcacctgggaggagtggggccacctgggccccgcccagaaggagctgtacagggaggtgatgctggagaactacaggaacctggtgtgcctgggcctggccgtgagcaagcccgacgtgatctgccagctggagcagggcggcgccccctggtggcccgagggcggcgtgcccggcagcagctgcgccgtgtgggacaccaggggcggcccaagcagcggcgcccctcctcccagcggcggcagcccagccggctccccaacctctaccgaggagggcacctctgagtccgccacccccgagagcggccctggcacctccaccgagcccagcgagggcagcgcacccggcagccctgccggcagccccacctccacagaggagggaaccagcaccgagcccagcgaaggcagcgccccaggcaccagcaccgagcctagtgagcaggagattaaacggatcaacaagatcagaagaagacttgtgaaagacagcaacaccaagaaggccggcaagacaggccccatgaaaaccctgctggttagagtgatgacacccgatctgagagagcggctggaaaacctgagaaagaagcctgaaaatatcccccagcccatcagcaatacatctagagccaacctgaataagctgctgaccgattacaccgaaatgaagaaggcgatcctgcatgtgtactgggaagagttccagaaggaccctgtgggcctgatgagccgggtggcccagcctgccagcaagaagatcgatcagaacaagctgaaacctgagatggacgagaagggcaacctgaccaccgccggctttgcctgctctcagtgtggccagcccctgttcgtgtacaagctggagcaggtgtctgagaagggcaaggcttacaccaactacttcggacggtgcaatgtggccgagcacgaaaagctgatcctgctggcccagctgaagcccgagaaggatagcgacgaagccgtgacatatagcctgggaaagtttgggcagagggccctggatttctacagcattcatgtgaccaaggagtccacccaccccgtgaagcccctggcccagatcgccggaaacagatacgcctccggacctgtgggaaaggccctgagcgacgcatgtatgggcacaatcgcctccttcctgtctaagtaccaggacatcatcatcgaacaccagaaggtggtgaagggcaaccagaagagactggagagcctgcgggagctggccggcaaggaaaacctggaataccctagcgtgaccctgccacctcagcctcacaccaaggagggcgttgatgcctacaacgaagtgatcgcccgggtgcgaatgtgggtgaacctgaacctgtggcagaagctgaagctaagcagagatgatgccaagcctctgctgagactgaagggattcccttcctttcctctggtcgagagacaggccaacgaagtggactggtgggacatggtgtgtaacgtgaagaagctgatcaacgagaaaaaggaggatggcaaggtgttttggcagaatctggctggctacaagagacaggaagccctgagaccatacctgagcagcgaggaagatcggaagaagggaaagaaattcgctcggtaccagctgggcgacctgctgctgcacctggaaaagaagcacggcgaggactggggaaaggtgtacgacgaggcctgggagcggattgacaagaaagtggaaggcctgagcaagcacatcaagctggaagaggaacggagaagcgaggacgcccagagcaaggccgccctgaccgactggctgcgggctaaggccagcttcgtgatcgagggcctgaaggaggccgacaaggacgagttctgcagatgcgagctgaagctgcagaagtggtacggggacctgcggggaaagcccttcgccatcgaagccgagaacagcatcctggacatcagcggcttcagcaagcagtacaactgtgccttcatctggcagaaggacggcgtgaagaagctgaacctgtacctgatcatcaactacttcaagggcggcaagctgcggttcaagaagatcaaacctgaagccttcgaagccaacagattctacaccgtgatcaacaaaaagagcggcgagatcgtgcccatggaggtgaacttcaacttcgacgaccccaacctgatcatcctgcctctggcctttggcaagagacagggcagagaattcatctggaacgacctgctgtccctggaaaccggcagcctgaagctggccaacggaagagtgatcgagaagacactgtacaacagaagaacccggcaggatgagcctgccctgttcgtggccctgaccttcgagcggcgggaggtcctggactcctccaatatcaaaccaatgaacctgatcggcgtggcaagaggcgaaaacatccccgccgtgatcgccctgaccgaccccgagggctgcccactgagccggtttaaggatagcctgggaaacccaacccacatcctgagaatcggcgagagctataaggagaagcagcggaccatccaggccaagaaggaggtggagcagcggagagccggcggctacagccggaagtacgccagcaaagccaagaatctggcagacgatatggtgagaaacaccgctagagatctgctgtactacgccgtgacccaggatgccatgctgatcttcgccaacctgagccggggcttcggccggcagggcaagcggaccttcatggccgagagacagtacacacggatggaggactggctgaccgccaagctggcctacgagggcctgagcaagacctacctgtccaagacactggcccagtacacctccaagacatgcagcaactgtgggtttaccatcaccagcgccgactacgacagggtgctggagaagctgaagaagacagcaacaggctggatgaccacaattaacggcaaggagctgaaggtggagggccagattacctactacaacagatacaagagacagaacgtagtcaaggacctgtccgtcgagctggatagactgagcgaagaatctgtgaacaacgacatctcctcctggacaaagggcagaagcggagaagctctgagcctcctgaagaaaagattctcccatagacccgtgcaggagaagttcgtgtgcctgaactgcggcttcgagacacacgcagccgagcaagccgccctgaacatcgccagatcctggctgttcctgcggagccaggagtacaagaaataccagacaaacaagacaaccggcaacaccgataagagagccttcgtcgagacctggcagtccttttaccggaagaagcttaaggaggtgtggaaacctgccgtgcggtctggcggatctggcggaggctccaccagccccaagaaaaagagaaaagtctaagctgccttctgcggggcttgccttctggccatgcccttcttctctcccttgcacctgtacctcttggtctttgaataaagcctgagtaggaaggctagcaaaaaaaaaaaaaaaaaaaaaaaaaaaaaaaaaaaaaaaaaaaaaaaaaaaaaaaaaaaaaaaaaaaaaaaaaaaaaaaa

SEQ ID NO: 13035 - RNA, 5785 nt, synthetic construct
  source 1..5785: mol_type = other RNA
aggaaataagagagaaaagaagagtaagaagaaatataagagccaccatggcccctaagaagaagcgtaaagtgagccggatggaacgcctcgtctacgaggtgcggcagaagtgcagaaacatcgaggacatctgcatctcctgcggatctctgaacgtgaccctggagcacccactgttcatcggcggcatgtgccagaactgtaaaaactgttttctggagtgtgcctatcaatacgacgatgacggctaccagagctactgcaccatctgttgcggcggaagagaggtgctgatgtgtggaaataacaactgctgccggtgcttctgcgtggaatgcgtggacctgctggtgggccccggcgccgcccaggccgctattaaggaagatccttggaactgctacatgtgcggccacaagggcacatacggcctgctgagacggagagaggactggcctagcagactgcagatgttcttcgccaataaccacgaccaggagttcgacccccctaaggtgtaccctcccgtccccgccgagaagagaaagcccatccgggtcctgagcctgttcgatggcatcgccaccggtctgctggtgctgaaggacctgggcatccaggtggataggtacattgcctccgaggtgtgcgaggactccatcaccgtgggaatggtgcgtcatcagggcaagatcatgtacgtgggcgacgtgcggagcgtgacacagaagcatatccaggagtggggccctttcgacctggtgatcggcggcagcccttgcaatgacctgagcatcgtgaacccagcccggaagggcctgtacgagggaaccggcagactgttcttcgagttttacagactgctgcacgacgcccggcctaaggaaggcgacgaccggcccttcttttggctgttcgagaatgtggtggccatgggagtcagcgacaagcgggatattagccggttcctggagagcaaccccgtgatgatcgatgccaaggaagtgagcgccgcccaccgggccagatacttctggggcaatctgcctggcatgaacagacccctggccagcaccgtgaacgacaagctggagctgcaggagtgcctggagcacggccggatcgccaagttcagcaaggtgagaaccatcaccacccgaagcaacagcatcaaacaaggcaaggaccagcactttcctgtgttcatgaacgagaaggaggacatcctgtggtgtaccgagatggagagagtgttcgggttcccagtccactacacagatgtcagcaacatgtctagactggccagacagagactgctgggaagaagctggtccgtccctgtgatcagacacctgttcgcccctctgaaggagtacttcgcctgcgtgagcagcggcaacagcaacgccaacagccggggccccagcttctctagcggcctggtgccactgtccctgagagggagccacatgggccccatggagatctacaaaaccgtgagcgcctggaagcggcagcctgtgcgcgtgctgagcctgtttcggaatatcgataaagtcctgaaaagcctgggattcctggagagcggctctggctccggcggtggcaccctgaagtacgtggaggatgtgacaaacgtggtcagacgggatgtggagaagtggggccccttcgatctggtgtacggcagcacccaacccctgggcagctcttgtgaccggtgccctggctggtacatgtttcagttccaccggatcctgcagtacgccctgccgagacaggagtcccagcggccattcttttggattttcatggacaacttgctgctgaccgaggatgaccaggaaactaccactcggttcctgcagaccgaagccgtgaccctgcaggacgtgagaggccgggactaccagaacgccatgcgggtgtggtccaacatccctggactgaaaagcaagcacgcacctctgacccctaaagaagaggagtacctgcaggcccaggtgcggagcagaagcaagctggacgcccctaaggtggatctgctggtgaagaattgcctcctgcccctgagagagtacttcaagtatttcagccagaatagtctgcccctgggaggcagcggcggcggcagccaggtgagcgtgaccttcgaggacgtggccgtgctgttcaccagggacgagtggaggaagctgggccccagccagaggaacgtgtaccaggaggtgatgctggagaactacagcaacctggtgagcctgggcctgctgttcagcaagcccagggtgatcagcctgctgcaggagggcgaggacccctggaaggtggagaaggagagccccggcggccccagcctgggctggaacagcagcggcggcccaagcagcggcgcccctcctcccagcggcggcagcccagccggctccccaacctctaccgaggagggcacctctgagtccgccacccccgagagcggccctggcacctccaccgagcccagcgagggcagcgcacccggcagccctgccggcagccccacctccacagaggagggaaccagcaccgagcccagcgaaggcagcgccccaggcaccagcaccgagcctagtgagcaggagattaaacggatcaacaagatcagaagaagacttgtgaaagacagcaacaccaagaaggccggcaagacaggccccatgaaaaccctgctggttagagtgatgacacccgatctgagagagcggctggaaaacctgagaaagaagcctgaaaatatcccccagcccatcagcaatacatctagagccaacctgaataagctgctgaccgattacaccgaaatgaagaaggcgatcctgcatgtgtactgggaagagttccagaaggaccctgtgggcctgatgagccgggtggcccagcctgccagcaagaagatcgatcagaacaagctgaaacctgagatggacgagaagggcaacctgaccaccgccggctttgcctgctctcagtgtggccagcccctgttcgtgtacaagctggagcaggtgtctgagaagggcaaggcttacaccaactacttcggacggtgcaatgtggccgagcacgaaaagctgatcctgctggcccagctgaagcccgagaaggatagcgacgaagccgtgacatatagcctgggaaagtttgggcagagggccctggatttctacagcattcatgtgaccaaggagtccacccaccccgtgaagcccctggcccagatcgccggaaacagatacgcctccggacctgtgggaaaggccctgagcgacgcatgtatgggcacaatcgcctccttcctgtctaagtaccaggacatcatcatcgaacaccagaaggtggtgaagggcaaccagaagagactggagagcctgcgggagctggccggcaaggaaaacctggaataccctagcgtgaccctgccacctcagcctcacaccaaggagggcgttgatgcctacaacgaagtgatcgcccgggtgcgaatgtgggtgaacctgaacctgtggcagaagctgaagctaagcagagatgatgccaagcctctgctgagactgaagggattcccttcctttcctctggtcgagagacaggccaacgaagtggactggtgggacatggtgtgtaacgtgaagaagctgatcaacgagaaaaaggaggatggcaaggtgttttggcagaatctggctggctacaagagacaggaagccctgagaccatacctgagcagcgaggaagatcggaagaagggaaagaaattcgctcggtaccagctgggcgacctgctgctgcacctggaaaagaagcacggcgaggactggggaaaggtgtacgacgaggcctgggagcggattgacaagaaagtggaaggcctgagcaagcacatcaagctggaagaggaacggagaagcgaggacgcccagagcaaggccgccctgaccgactggctgcgggctaaggccagcttcgtgatcgagggcctgaaggaggccgacaaggacgagttctgcagatgcgagctgaagctgcagaagtggtacggggacctgcggggaaagcccttcgccatcgaagccgagaacagcatcctggacatcagcggcttcagcaagcagtacaactgtgccttcatctggcagaaggacggcgtgaagaagctgaacctgtacctgatcatcaactacttcaagggcggcaagctgcggttcaagaagatcaaacctgaagccttcgaagccaacagattctacaccgtgatcaacaaaaagagcggcgagatcgtgcccatggaggtgaacttcaacttcgacgaccccaacctgatcatcctgcctctggcctttggcaagagacagggcagagaattcatctggaacgacctgctgtccctggaaaccggcagcctgaagctggccaacggaagagtgatcgagaagacactgtacaacagaagaacccggcaggatgagcctgccctgttcgtggccctgaccttcgagcggcgggaggtcctggactcctccaatatcaaaccaatgaacctgatcggcgtggcaagaggcgaaaacatccccgccgtgatcgccctgaccgaccccgagggctgcccactgagccggtttaaggatagcctgggaaacccaacccacatcctgagaatcggcgagagctataaggagaagcagcggaccatccaggccaagaaggaggtggagcagcggagagccggcggctacagccggaagtacgccagcaaagccaagaatctggcagacgatatggtgagaaacaccgctagagatctgctgtactacgccgtgacccaggatgccatgctgatcttcgccaacctgagccggggcttcggccggcagggcaagcggaccttcatggccgagagacagtacacacggatggaggactggctgaccgccaagctggcctacgagggcctgagcaagacctacctgtccaagacactggcccagtacacctccaagacatgcagcaactgtgggtttaccatcaccagcgccgactacgacagggtgctggagaagctgaagaagacagcaacaggctggatgaccacaattaacggcaaggagctgaaggtggagggccagattacctactacaacagatacaagagacagaacgtagtcaaggacctgtccgtcgagctggatagactgagcgaagaatctgtgaacaacgacatctcctcctggacaaagggcagaagcggagaagctctgagcctcctgaagaaaagattctcccatagacccgtgcaggagaagttcgtgtgcctgaactgcggcttcgagacacacgcagccgagcaagccgccctgaacatcgccagatcctggctgttcctgcggagccaggagtacaagaaataccagacaaacaagacaaccggcaacaccgataagagagccttcgtcgagacctggcagtccttttaccggaagaagcttaaggaggtgtggaaacctgccgtgcggtctggcggatctggcggaggctccaccagccccaagaaaaagagaaaagtctaagctgccttctgcggggcttgccttctggccatgcccttcttctctcccttgcacctgtacctcttggtctttgaataaagcctgagtaggaaggctagcaaaaaaaaaaaaaaaaaaaaaaaaaaaaaaaaaaaaaaaaaaaaaaaaaaaaaaaaaaaaaaaaaaaaaaaaaaaaaaaa

SEQ ID NO: 13036 - RNA, 5785 nt, synthetic construct
  source 1..5785: mol_type = other RNA
aggaaataagagagaaaagaagagtaagaagaaatataagagccaccatggcccctaagaagaagcgtaaagtgagccggatggaacgcctcgtctacgaggtgcggcagaagtgcagaaacatcgaggacatctgcatctcctgcggatctctgaacgtgaccctggagcacccactgttcatcggcggcatgtgccagaactgtaaaaactgttttctggagtgtgcctatcaatacgacgatgacggctaccagagctactgcaccatctgttgcggcggaagagaggtgctgatgtgtggaaataacaactgctgccggtgcttctgcgtggaatgcgtggacctgctggtgggccccggcgccgcccaggccgctattaaggaagatccttggaactgctacatgtgcggccacaagggcacatacggcctgctgagacggagagaggactggcctagcagactgcagatgttcttcgccaataaccacgaccaggagttcgacccccctaaggtgtaccctcccgtccccgccgagaagagaaagcccatccgggtcctgagcctgttcgatggcatcgccaccggtctgctggtgctgaaggacctgggcatccaggtggataggtacattgcctccgaggtgtgcgaggactccatcaccgtgggaatggtgcgtcatcagggcaagatcatgtacgtgggcgacgtgcggagcgtgacacagaagcatatccaggagtggggccctttcgacctggtgatcggcggcagcccttgcaatgacctgagcatcgtgaacccagcccggaagggcctgtacgagggaaccggcagactgttcttcgagttttacagactgctgcacgacgcccggcctaaggaaggcgacgaccggcccttcttttggctgttcgagaatgtggtggccatgggagtcagcgacaagcgggatattagccggttcctggagagcaaccccgtgatgatcgatgccaaggaagtgagcgccgcccaccgggccagatacttctggggcaatctgcctggcatgaacagacccctggccagcaccgtgaacgacaagctggagctgcaggagtgcctggagcacggccggatcgccaagttcagcaaggtgagaaccatcaccacccgaagcaacagcatcaaacaaggcaaggaccagcactttcctgtgttcatgaacgagaaggaggacatcctgtggtgtaccgagatggagagagtgttcgggttcccagtccactacacagatgtcagcaacatgtctagactggccagacagagactgctgggaagaagctggtccgtccctgtgatcagacacctgttcgcccctctgaaggagtacttcgcctgcgtgagcagcggcaacagcaacgccaacagccggggccccagcttctctagcggcctggtgccactgtccctgagagggagccacatgggccccatggagatctacaaaaccgtgagcgcctggaagcggcagcctgtgcgcgtgctgagcctgtttcggaatatcgataaagtcctgaaaagcctgggattcctggagagcggctctggctccggcggtggcaccctgaagtacgtggaggatgtgacaaacgtggtcagacgggatgtggagaagtggggccccttcgatctggtgtacggcagcacccaacccctgggcagctcttgtgaccggtgccctggctggtacatgtttcagttccaccggatcctgcagtacgccctgccgagacaggagtcccagcggccattcttttggattttcatggacaacttgctgctgaccgaggatgaccaggaaactaccactcggttcctgcagaccgaagccgtgaccctgcaggacgtgagaggccgggactaccagaacgccatgcgggtgtggtccaacatccctggactgaaaagcaagcacgcacctctgacccctaaagaagaggagtacctgcaggcccaggtgcggagcagaagcaagctggacgcccctaaggtggatctgctggtgaagaattgcctcctgcccctgagagagtacttcaagtatttcagccagaatagtctgcccctgggaggcagcggcggcggcccccaggagagcgtgaccttcgaggacgtggccgtgaacttcagccacgaggagtggcagtgcctgacccacgcccagaggcacctgtacaaggacgtgatgctggagaactacggcaacatggtgagcctgggcttcagcttcagcaagccccccctgatcagcaggctggagcagggcaccgagccctacgtgcaggacaggcaggactgggagttcctgagctgcagctaccccgtgagcggcggcccaagcagcggcgcccctcctcccagcggcggcagcccagccggctccccaacctctaccgaggagggcacctctgagtccgccacccccgagagcggccctggcacctccaccgagcccagcgagggcagcgcacccggcagccctgccggcagccccacctccacagaggagggaaccagcaccgagcccagcgaaggcagcgccccaggcaccagcaccgagcctagtgagcaggagattaaacggatcaacaagatcagaagaagacttgtgaaagacagcaacaccaagaaggccggcaagacaggccccatgaaaaccctgctggttagagtgatgacacccgatctgagagagcggctggaaaacctgagaaagaagcctgaaaatatcccccagcccatcagcaatacatctagagccaacctgaataagctgctgaccgattacaccgaaatgaagaaggcgatcctgcatgtgtactgggaagagttccagaaggaccctgtgggcctgatgagccgggtggcccagcctgccagcaagaagatcgatcagaacaagctgaaacctgagatggacgagaagggcaacctgaccaccgccggctttgcctgctctcagtgtggccagcccctgttcgtgtacaagctggagcaggtgtctgagaagggcaaggcttacaccaactacttcggacggtgcaatgtggccgagcacgaaaagctgatcctgctggcccagctgaagcccgagaaggatagcgacgaagccgtgacatatagcctgggaaagtttgggcagagggccctggatttctacagcattcatgtgaccaaggagtccacccaccccgtgaagcccctggcccagatcgccggaaacagatacgcctccggacctgtgggaaaggccctgagcgacgcatgtatgggcacaatcgcctccttcctgtctaagtaccaggacatcatcatcgaacaccagaaggtggtgaagggcaaccagaagagactggagagcctgcgggagctggccggcaaggaaaacctggaataccctagcgtgaccctgccacctcagcctcacaccaaggagggcgttgatgcctacaacgaagtgatcgcccgggtgcgaatgtgggtgaacctgaacctgtggcagaagctgaagctaagcagagatgatgccaagcctctgctgagactgaagggattcccttcctttcctctggtcgagagacaggccaacgaagtggactggtgggacatggtgtgtaacgtgaagaagctgatcaacgagaaaaaggaggatggcaaggtgttttggcagaatctggctggctacaagagacaggaagccctgagaccatacctgagcagcgaggaagatcggaagaagggaaagaaattcgctcggtaccagctgggcgacctgctgctgcacctggaaaagaagcacggcgaggactggggaaaggtgtacgacgaggcctgggagcggattgacaagaaagtggaaggcctgagcaagcacatcaagctggaagaggaacggagaagcgaggacgcccagagcaaggccgccctgaccgactggctgcgggctaaggccagcttcgtgatcgagggcctgaaggaggccgacaaggacgagttctgcagatgcgagctgaagctgcagaagtggtacggggacctgcggggaaagcccttcgccatcgaagccgagaacagcatcctggacatcagcggcttcagcaagcagtacaactgtgccttcatctggcagaaggacggcgtgaagaagctgaacctgtacctgatcatcaactacttcaagggcggcaagctgcggttcaagaagatcaaacctgaagccttcgaagccaacagattctacaccgtgatcaacaaaaagagcggcgagatcgtgcccatggaggtgaacttcaacttcgacgaccccaacctgatcatcctgcctctggcctttggcaagagacagggcagagaattcatctggaacgacctgctgtccctggaaaccggcagcctgaagctggccaacggaagagtgatcgagaagacactgtacaacagaagaacccggcaggatgagcctgccctgttcgtggccctgaccttcgagcggcgggaggtcctggactcctccaatatcaaaccaatgaacctgatcggcgtggcaagaggcgaaaacatccccgccgtgatcgccctgaccgaccccgagggctgcccactgagccggtttaaggatagcctgggaaacccaacccacatcctgagaatcggcgagagctataaggagaagcagcggaccatccaggccaagaaggaggtggagcagcggagagccggcggctacagccggaagtacgccagcaaagccaagaatctggcagacgatatggtgagaaacaccgctagagatctgctgtactacgccgtgacccaggatgccatgctgatcttcgccaacctgagccggggcttcggccggcagggcaagcggaccttcatggccgagagacagtacacacggatggaggactggctgaccgccaagctggcctacgagggcctgagcaagacctacctgtccaagacactggcccagtacacctccaagacatgcagcaactgtgggtttaccatcaccagcgccgactacgacagggtgctggagaagctgaagaagacagcaacaggctggatgaccacaattaacggcaaggagctgaaggtggagggccagattacctactacaacagatacaagagacagaacgtagtcaaggacctgtccgtcgagctggatagactgagcgaagaatctgtgaacaacgacatctcctcctggacaaagggcagaagcggagaagctctgagcctcctgaagaaaagattctcccatagacccgtgcaggagaagttcgtgtgcctgaactgcggcttcgagacacacgcagccgagcaagccgccctgaacatcgccagatcctggctgttcctgcggagccaggagtacaagaaataccagacaaacaagacaaccggcaacaccgataagagagccttcgtcgagacctggcagtccttttaccggaagaagcttaaggaggtgtggaaacctgccgtgcggtctggcggatctggcggaggctccaccagccccaagaaaaagagaaaagtctaagctgccttctgcggggcttgccttctggccatgcccttcttctctcccttgcacctgtacctcttggtctttgaataaagcctgagtaggaaggctagcaaaaaaaaaaaaaaaaaaaaaaaaaaaaaaaaaaaaaaaaaaaaaaaaaaaaaaaaaaaaaaaaaaaaaaaaaaaaaaaa

SEQ ID NO: 13037 - RNA, 5785 nt, synthetic construct
  source 1..5785: mol_type = other RNA
aggaaataagagagaaaagaagagtaagaagaaatataagagccaccatggcccctaagaagaagcgtaaagtgagccggatggaacgcctcgtctacgaggtgcggcagaagtgcagaaacatcgaggacatctgcatctcctgcggatctctgaacgtgaccctggagcacccactgttcatcggcggcatgtgccagaactgtaaaaactgttttctggagtgtgcctatcaatacgacgatgacggctaccagagctactgcaccatctgttgcggcggaagagaggtgctgatgtgtggaaataacaactgctgccggtgcttctgcgtggaatgcgtggacctgctggtgggccccggcgccgcccaggccgctattaaggaagatccttggaactgctacatgtgcggccacaagggcacatacggcctgctgagacggagagaggactggcctagcagactgcagatgttcttcgccaataaccacgaccaggagttcgacccccctaaggtgtaccctcccgtccccgccgagaagagaaagcccatccgggtcctgagcctgttcgatggcatcgccaccggtctgctggtgctgaaggacctgggcatccaggtggataggtacattgcctccgaggtgtgcgaggactccatcaccgtgggaatggtgcgtcatcagggcaagatcatgtacgtgggcgacgtgcggagcgtgacacagaagcatatccaggagtggggccctttcgacctggtgatcggcggcagcccttgcaatgacctgagcatcgtgaacccagcccggaagggcctgtacgagggaaccggcagactgttcttcgagttttacagactgctgcacgacgcccggcctaaggaaggcgacgaccggcccttcttttggctgttcgagaatgtggtggccatgggagtcagcgacaagcgggatattagccggttcctggagagcaaccccgtgatgatcgatgccaaggaagtgagcgccgcccaccgggccagatacttctggggcaatctgcctggcatgaacagacccctggccagcaccgtgaacgacaagctggagctgcaggagtgcctggagcacggccggatcgccaagttcagcaaggtgagaaccatcaccacccgaagcaacagcatcaaacaaggcaaggaccagcactttcctgtgttcatgaacgagaaggaggacatcctgtggtgtaccgagatggagagagtgttcgggttcccagtccactacacagatgtcagcaacatgtctagactggccagacagagactgctgggaagaagctggtccgtccctgtgatcagacacctgttcgcccctctgaaggagtacttcgcctgcgtgagcagcggcaacagcaacgccaacagccggggccccagcttctctagcggcctggtgccactgtccctgagagggagccacatgggccccatggagatctacaaaaccgtgagcgcctggaagcggcagcctgtgcgcgtgctgagcctgtttcggaatatcgataaagtcctgaaaagcctgggattcctggagagcggctctggctccggcggtggcaccctgaagtacgtggaggatgtgacaaacgtggtcagacgggatgtggagaagtggggccccttcgatctggtgtacggcagcacccaacccctgggcagctcttgtgaccggtgccctggctggtacatgtttcagttccaccggatcctgcagtacgccctgccgagacaggagtcccagcggccattcttttggattttcatggacaacttgctgctgaccgaggatgaccaggaaactaccactcggttcctgcagaccgaagccgtgaccctgcaggacgtgagaggccgggactaccagaacgccatgcgggtgtggtccaacatccctggactgaaaagcaagcacgcacctctgacccctaaagaagaggagtacctgcaggcccaggtgcggagcagaagcaagctggacgcccctaaggtggatctgctggtgaagaattgcctcctgcccctgagagagtacttcaagtatttcagccagaatagtctgcccctgggaggcagcggcggcggcatggccgccgccgccctgaggctgcccgcccagggcaccgtgaccttcgaggacgtggccgtgaagttcagccaggaggagtggagcctgctgagcgaggcccagaggtgcctgtaccacgacgtgatgctggagaacctggccctgatcagcagcctgggctgctggtacggcgccaacgacgagacccccagcaagcagaccctgagcatccagcagcagagccccctgaggagccactggggcggcccaagcagcggcgcccctcctcccagcggcggcagcccagccggctccccaacctctaccgaggagggcacctctgagtccgccacccccgagagcggccctggcacctccaccgagcccagcgagggcagcgcacccggcagccctgccggcagccccacctccacagaggagggaaccagcaccgagcccagcgaaggcagcgccccaggcaccagcaccgagcctagtgagcaggagattaaacggatcaacaagatcagaagaagacttgtgaaagacagcaacaccaagaaggccggcaagacaggccccatgaaaaccctgctggttagagtgatgacacccgatctgagagagcggctggaaaacctgagaaagaagcctgaaaatatcccccagcccatcagcaatacatctagagccaacctgaataagctgctgaccgattacaccgaaatgaagaaggcgatcctgcatgtgtactgggaagagttccagaaggaccctgtgggcctgatgagccgggtggcccagcctgccagcaagaagatcgatcagaacaagctgaaacctgagatggacgagaagggcaacctgaccaccgccggctttgcctgctctcagtgtggccagcccctgttcgtgtacaagctggagcaggtgtctgagaagggcaaggcttacaccaactacttcggacggtgcaatgtggccgagcacgaaaagctgatcctgctggcccagctgaagcccgagaaggatagcgacgaagccgtgacatatagcctgggaaagtttgggcagagggccctggatttctacagcattcatgtgaccaaggagtccacccaccccgtgaagcccctggcccagatcgccggaaacagatacgcctccggacctgtgggaaaggccctgagcgacgcatgtatgggcacaatcgcctccttcctgtctaagtaccaggacatcatcatcgaacaccagaaggtggtgaagggcaaccagaagagactggagagcctgcgggagctggccggcaaggaaaacctggaataccctagcgtgaccctgccacctcagcctcacaccaaggagggcgttgatgcctacaacgaagtgatcgcccgggtgcgaatgtgggtgaacctgaacctgtggcagaagctgaagctaagcagagatgatgccaagcctctgctgagactgaagggattcccttcctttcctctggtcgagagacaggccaacgaagtggactggtgggacatggtgtgtaacgtgaagaagctgatcaacgagaaaaaggaggatggcaaggtgttttggcagaatctggctggctacaagagacaggaagccctgagaccatacctgagcagcgaggaagatcggaagaagggaaagaaattcgctcggtaccagctgggcgacctgctgctgcacctggaaaagaagcacggcgaggactggggaaaggtgtacgacgaggcctgggagcggattgacaagaaagtggaaggcctgagcaagcacatcaagctggaagaggaacggagaagcgaggacgcccagagcaaggccgccctgaccgactggctgcgggctaaggccagcttcgtgatcgagggcctgaaggaggccgacaaggacgagttctgcagatgcgagctgaagctgcagaagtggtacggggacctgcggggaaagcccttcgccatcgaagccgagaacagcatcctggacatcagcggcttcagcaagcagtacaactgtgccttcatctggcagaaggacggcgtgaagaagctgaacctgtacctgatcatcaactacttcaagggcggcaagctgcggttcaagaagatcaaacctgaagccttcgaagccaacagattctacaccgtgatcaacaaaaagagcggcgagatcgtgcccatggaggtgaacttcaacttcgacgaccccaacctgatcatcctgcctctggcctttggcaagagacagggcagagaattcatctggaacgacctgctgtccctggaaaccggcagcctgaagctggccaacggaagagtgatcgagaagacactgtacaacagaagaacccggcaggatgagcctgccctgttcgtggccctgaccttcgagcggcgggaggtcctggactcctccaatatcaaaccaatgaacctgatcggcgtggcaagaggcgaaaacatccccgccgtgatcgccctgaccgaccccgagggctgcccactgagccggtttaaggatagcctgggaaacccaacccacatcctgagaatcggcgagagctataaggagaagcagcggaccatccaggccaagaaggaggtggagcagcggagagccggcggctacagccggaagtacgccagcaaagccaagaatctggcagacgatatggtgagaaacaccgctagagatctgctgtactacgccgtgacccaggatgccatgctgatcttcgccaacctgagccggggcttcggccggcagggcaagcggaccttcatggccgagagacagtacacacggatggaggactggctgaccgccaagctggcctacgagggcctgagcaagacctacctgtccaagacactggcccagtacacctccaagacatgcagcaactgtgggtttaccatcaccagcgccgactacgacagggtgctggagaagctgaagaagacagcaacaggctggatgaccacaattaacggcaaggagctgaaggtggagggccagattacctactacaacagatacaagagacagaacgtagtcaaggacctgtccgtcgagctggatagactgagcgaagaatctgtgaacaacgacatctcctcctggacaaagggcagaagcggagaagctctgagcctcctgaagaaaagattctcccatagacccgtgcaggagaagttcgtgtgcctgaactgcggcttcgagacacacgcagccgagcaagccgccctgaacatcgccagatcctggctgttcctgcggagccaggagtacaagaaataccagacaaacaagacaaccggcaacaccgataagagagccttcgtcgagacctggcagtccttttaccggaagaagcttaaggaggtgtggaaacctgccgtgcggtctggcggatctggcggaggctccaccagccccaagaaaaagagaaaagtctaagctgccttctgcggggcttgccttctggccatgcccttcttctctcccttgcacctgtacctcttggtctttgaataaagcctgagtaggaaggctagcaaaaaaaaaaaaaaaaaaaaaaaaaaaaaaaaaaaaaaaaaaaaaaaaaaaaaaaaaaaaaaaaaaaaaaaaaaaaaaaa

SEQ ID NO: 13038 - RNA, 5785 nt, synthetic construct
  source 1..5785: mol_type = other RNA
aggaaataagagagaaaagaagagtaagaagaaatataagagccaccatggcccctaagaagaagcgtaaagtgagccggatggaacgcctcgtctacgaggtgcggcagaagtgcagaaacatcgaggacatctgcatctcctgcggatctctgaacgtgaccctggagcacccactgttcatcggcggcatgtgccagaactgtaaaaactgttttctggagtgtgcctatcaatacgacgatgacggctaccagagctactgcaccatctgttgcggcggaagagaggtgctgatgtgtggaaataacaactgctgccggtgcttctgcgtggaatgcgtggacctgctggtgggccccggcgccgcccaggccgctattaaggaagatccttggaactgctacatgtgcggccacaagggcacatacggcctgctgagacggagagaggactggcctagcagactgcagatgttcttcgccaataaccacgaccaggagttcgacccccctaaggtgtaccctcccgtccccgccgagaagagaaagcccatccgggtcctgagcctgttcgatggcatcgccaccggtctgctggtgctgaaggacctgggcatccaggtggataggtacattgcctccgaggtgtgcgaggactccatcaccgtgggaatggtgcgtcatcagggcaagatcatgtacgtgggcgacgtgcggagcgtgacacagaagcatatccaggagtggggccctttcgacctggtgatcggcggcagcccttgcaatgacctgagcatcgtgaacccagcccggaagggcctgtacgagggaaccggcagactgttcttcgagttttacagactgctgcacgacgcccggcctaaggaaggcgacgaccggcccttcttttggctgttcgagaatgtggtggccatgggagtcagcgacaagcgggatattagccggttcctggagagcaaccccgtgatgatcgatgccaaggaagtgagcgccgcccaccgggccagatacttctggggcaatctgcctggcatgaacagacccctggccagcaccgtgaacgacaagctggagctgcaggagtgcctggagcacggccggatcgccaagttcagcaaggtgagaaccatcaccacccgaagcaacagcatcaaacaaggcaaggaccagcactttcctgtgttcatgaacgagaaggaggacatcctgtggtgtaccgagatggagagagtgttcgggttcccagtccactacacagatgtcagcaacatgtctagactggccagacagagactgctgggaagaagctggtccgtccctgtgatcagacacctgttcgcccctctgaaggagtacttcgcctgcgtgagcagcggcaacagcaacgccaacagccggggccccagcttctctagcggcctggtgccactgtccctgagagggagccacatgggccccatggagatctacaaaaccgtgagcgcctggaagcggcagcctgtgcgcgtgctgagcctgtttcggaatatcgataaagtcctgaaaagcctgggattcctggagagcggctctggctccggcggtggcaccctgaagtacgtggaggatgtgacaaacgtggtcagacgggatgtggagaagtggggccccttcgatctggtgtacggcagcacccaacccctgggcagctcttgtgaccggtgccctggctggtacatgtttcagttccaccggatcctgcagtacgccctgccgagacaggagtcccagcggccattcttttggattttcatggacaacttgctgctgaccgaggatgaccaggaaactaccactcggttcctgcagaccgaagccgtgaccctgcaggacgtgagaggccgggactaccagaacgccatgcgggtgtggtccaacatccctggactgaaaagcaagcacgcacctctgacccctaaagaagaggagtacctgcaggcccaggtgcggagcagaagcaagctggacgcccctaaggtggatctgctggtgaagaattgcctcctgcccctgagagagtacttcaagtatttcagccagaatagtctgcccctgggaggcagcggcggcggcgagcccggcgccgtgagcttcgccgacgtggccgtgtacttctgcagggaggagtggggctgcctgaggcccgcccagagggccctgtacagggacgtgatgagggagacctacggccacctgagcgccctgggcatcggcggcaacaagcccgccctgatcagctgggtggaggaggaggccgagctgtgggaccccgccgcccaggaccccgaggtggccaagtgccagaccgaggccgacggcggcccaagcagcggcgcccctcctcccagcggcggcagcccagccggctccccaacctctaccgaggagggcacctctgagtccgccacccccgagagcggccctggcacctccaccgagcccagcgagggcagcgcacccggcagccctgccggcagccccacctccacagaggagggaaccagcaccgagcccagcgaaggcagcgccccaggcaccagcaccgagcctagtgagcaggagattaaacggatcaacaagatcagaagaagacttgtgaaagacagcaacaccaagaaggccggcaagacaggccccatgaaaaccctgctggttagagtgatgacacccgatctgagagagcggctggaaaacctgagaaagaagcctgaaaatatcccccagcccatcagcaatacatctagagccaacctgaataagctgctgaccgattacaccgaaatgaagaaggcgatcctgcatgtgtactgggaagagttccagaaggaccctgtgggcctgatgagccgggtggcccagcctgccagcaagaagatcgatcagaacaagctgaaacctgagatggacgagaagggcaacctgaccaccgccggctttgcctgctctcagtgtggccagcccctgttcgtgtacaagctggagcaggtgtctgagaagggcaaggcttacaccaactacttcggacggtgcaatgtggccgagcacgaaaagctgatcctgctggcccagctgaagcccgagaaggatagcgacgaagccgtgacatatagcctgggaaagtttgggcagagggccctggatttctacagcattcatgtgaccaaggagtccacccaccccgtgaagcccctggcccagatcgccggaaacagatacgcctccggacctgtgggaaaggccctgagcgacgcatgtatgggcacaatcgcctccttcctgtctaagtaccaggacatcatcatcgaacaccagaaggtggtgaagggcaaccagaagagactggagagcctgcgggagctggccggcaaggaaaacctggaataccctagcgtgaccctgccacctcagcctcacaccaaggagggcgttgatgcctacaacgaagtgatcgcccgggtgcgaatgtgggtgaacctgaacctgtggcagaagctgaagctaagcagagatgatgccaagcctctgctgagactgaagggattcccttcctttcctctggtcgagagacaggccaacgaagtggactggtgggacatggtgtgtaacgtgaagaagctgatcaacgagaaaaaggaggatggcaaggtgttttggcagaatctggctggctacaagagacaggaagccctgagaccatacctgagcagcgaggaagatcggaagaagggaaagaaattcgctcggtaccagctgggcgacctgctgctgcacctggaaaagaagcacggcgaggactggggaaaggtgtacgacgaggcctgggagcggattgacaagaaagtggaaggcctgagcaagcacatcaagctggaagaggaacggagaagcgaggacgcccagagcaaggccgccctgaccgactggctgcgggctaaggccagcttcgtgatcgagggcctgaaggaggccgacaaggacgagttctgcagatgcgagctgaagctgcagaagtggtacggggacctgcggggaaagcccttcgccatcgaagccgagaacagcatcctggacatcagcggcttcagcaagcagtacaactgtgccttcatctggcagaaggacggcgtgaagaagctgaacctgtacctgatcatcaactacttcaagggcggcaagctgcggttcaagaagatcaaacctgaagccttcgaagccaacagattctacaccgtgatcaacaaaaagagcggcgagatcgtgcccatggaggtgaacttcaacttcgacgaccccaacctgatcatcctgcctctggcctttggcaagagacagggcagagaattcatctggaacgacctgctgtccctggaaaccggcagcctgaagctggccaacggaagagtgatcgagaagacactgtacaacagaagaacccggcaggatgagcctgccctgttcgtggccctgaccttcgagcggcgggaggtcctggactcctccaatatcaaaccaatgaacctgatcggcgtggcaagaggcgaaaacatccccgccgtgatcgccctgaccgaccccgagggctgcccactgagccggtttaaggatagcctgggaaacccaacccacatcctgagaatcggcgagagctataaggagaagcagcggaccatccaggccaagaaggaggtggagcagcggagagccggcggctacagccggaagtacgccagcaaagccaagaatctggcagacgatatggtgagaaacaccgctagagatctgctgtactacgccgtgacccaggatgccatgctgatcttcgccaacctgagccggggcttcggccggcagggcaagcggaccttcatggccgagagacagtacacacggatggaggactggctgaccgccaagctggcctacgagggcctgagcaagacctacctgtccaagacactggcccagtacacctccaagacatgcagcaactgtgggtttaccatcaccagcgccgactacgacagggtgctggagaagctgaagaagacagcaacaggctggatgaccacaattaacggcaaggagctgaaggtggagggccagattacctactacaacagatacaagagacagaacgtagtcaaggacctgtccgtcgagctggatagactgagcgaagaatctgtgaacaacgacatctcctcctggacaaagggcagaagcggagaagctctgagcctcctgaagaaaagattctcccatagacccgtgcaggagaagttcgtgtgcctgaactgcggcttcgagacacacgcagccgagcaagccgccctgaacatcgccagatcctggctgttcctgcggagccaggagtacaagaaataccagacaaacaagacaaccggcaacaccgataagagagccttcgtcgagacctggcagtccttttaccggaagaagcttaaggaggtgtggaaacctgccgtgcggtctggcggatctggcggaggctccaccagccccaagaaaaagagaaaagtctaagctgccttctgcggggcttgccttctggccatgcccttcttctctcccttgcacctgtacctcttggtctttgaataaagcctgagtaggaaggctagcaaaaaaaaaaaaaaaaaaaaaaaaaaaaaaaaaaaaaaaaaaaaaaaaaaaaaaaaaaaaaaaaaaaaaaaaaaaaaaaa

SEQ ID NO: 13039 - RNA, 5785 nt, synthetic construct
  source 1..5785: mol_type = other RNA
aggaaataagagagaaaagaagagtaagaagaaatataagagccaccatggcccctaagaagaagcgtaaagtgagccggatggaacgcctcgtctacgaggtgcggcagaagtgcagaaacatcgaggacatctgcatctcctgcggatctctgaacgtgaccctggagcacccactgttcatcggcggcatgtgccagaactgtaaaaactgttttctggagtgtgcctatcaatacgacgatgacggctaccagagctactgcaccatctgttgcggcggaagagaggtgctgatgtgtggaaataacaactgctgccggtgcttctgcgtggaatgcgtggacctgctggtgggccccggcgccgcccaggccgctattaaggaagatccttggaactgctacatgtgcggccacaagggcacatacggcctgctgagacggagagaggactggcctagcagactgcagatgttcttcgccaataaccacgaccaggagttcgacccccctaaggtgtaccctcccgtccccgccgagaagagaaagcccatccgggtcctgagcctgttcgatggcatcgccaccggtctgctggtgctgaaggacctgggcatccaggtggataggtacattgcctccgaggtgtgcgaggactccatcaccgtgggaatggtgcgtcatcagggcaagatcatgtacgtgggcgacgtgcggagcgtgacacagaagcatatccaggagtggggccctttcgacctggtgatcggcggcagcccttgcaatgacctgagcatcgtgaacccagcccggaagggcctgtacgagggaaccggcagactgttcttcgagttttacagactgctgcacgacgcccggcctaaggaaggcgacgaccggcccttcttttggctgttcgagaatgtggtggccatgggagtcagcgacaagcgggatattagccggttcctggagagcaaccccgtgatgatcgatgccaaggaagtgagcgccgcccaccgggccagatacttctggggcaatctgcctggcatgaacagacccctggccagcaccgtgaacgacaagctggagctgcaggagtgcctggagcacggccggatcgccaagttcagcaaggtgagaaccatcaccacccgaagcaacagcatcaaacaaggcaaggaccagcactttcctgtgttcatgaacgagaaggaggacatcctgtggtgtaccgagatggagagagtgttcgggttcccagtccactacacagatgtcagcaacatgtctagactggccagacagagactgctgggaagaagctggtccgtccctgtgatcagacacctgttcgcccctctgaaggagtacttcgcctgcgtgagcagcggcaacagcaacgccaacagccggggccccagcttctctagcggcctggtgccactgtccctgagagggagccacatgggccccatggagatctacaaaaccgtgagcgcctggaagcggcagcctgtgcgcgtgctgagcctgtttcggaatatcgataaagtcctgaaaagcctgggattcctggagagcggctctggctccggcggtggcaccctgaagtacgtggaggatgtgacaaacgtggtcagacgggatgtggagaagtggggccccttcgatctggtgtacggcagcacccaacccctgggcagctcttgtgaccggtgccctggctggtacatgtttcagttccaccggatcctgcagtacgccctgccgagacaggagtcccagcggccattcttttggattttcatggacaacttgctgctgaccgaggatgaccaggaaactaccactcggttcctgcagaccgaagccgtgaccctgcaggacgtgagaggccgggactaccagaacgccatgcgggtgtggtccaacatccctggactgaaaagcaagcacgcacctctgacccctaaagaagaggagtacctgcaggcccaggtgcggagcagaagcaagctggacgcccctaaggtggatctgctggtgaagaattgcctcctgcccctgagagagtacttcaagtatttcagccagaatagtctgcccctgggaggcagcggcggcggcagctacggcagcctgagcttcgaggacgtgaccgtgggcttcagccaggaggagtggcagcacctggaccccgcccagaggaccctgtacagggacgtgatgctggagaactacagccacctggtggccgtgggctgctgcgtgcccaagcccgacgtgatcttcaggctggagcagggccagcagccctggctgatcgaggaggagagcctggaccagagctgccccgaggtgtgcagggtgggcggcccaagcagcggcgcccctcctcccagcggcggcagcccagccggctccccaacctctaccgaggagggcacctctgagtccgccacccccgagagcggccctggcacctccaccgagcccagcgagggcagcgcacccggcagccctgccggcagccccacctccacagaggagggaaccagcaccgagcccagcgaaggcagcgccccaggcaccagcaccgagcctagtgagcaggagattaaacggatcaacaagatcagaagaagacttgtgaaagacagcaacaccaagaaggccggcaagacaggccccatgaaaaccctgctggttagagtgatgacacccgatctgagagagcggctggaaaacctgagaaagaagcctgaaaatatcccccagcccatcagcaatacatctagagccaacctgaataagctgctgaccgattacaccgaaatgaagaaggcgatcctgcatgtgtactgggaagagttccagaaggaccctgtgggcctgatgagccgggtggcccagcctgccagcaagaagatcgatcagaacaagctgaaacctgagatggacgagaagggcaacctgaccaccgccggctttgcctgctctcagtgtggccagcccctgttcgtgtacaagctggagcaggtgtctgagaagggcaaggcttacaccaactacttcggacggtgcaatgtggccgagcacgaaaagctgatcctgctggcccagctgaagcccgagaaggatagcgacgaagccgtgacatatagcctgggaaagtttgggcagagggccctggatttctacagcattcatgtgaccaaggagtccacccaccccgtgaagcccctggcccagatcgccggaaacagatacgcctccggacctgtgggaaaggccctgagcgacgcatgtatgggcacaatcgcctccttcctgtctaagtaccaggacatcatcatcgaacaccagaaggtggtgaagggcaaccagaagagactggagagcctgcgggagctggccggcaaggaaaacctggaataccctagcgtgaccctgccacctcagcctcacaccaaggagggcgttgatgcctacaacgaagtgatcgcccgggtgcgaatgtgggtgaacctgaacctgtggcagaagctgaagctaagcagagatgatgccaagcctctgctgagactgaagggattcccttcctttcctctggtcgagagacaggccaacgaagtggactggtgggacatggtgtgtaacgtgaagaagctgatcaacgagaaaaaggaggatggcaaggtgttttggcagaatctggctggctacaagagacaggaagccctgagaccatacctgagcagcgaggaagatcggaagaagggaaagaaattcgctcggtaccagctgggcgacctgctgctgcacctggaaaagaagcacggcgaggactggggaaaggtgtacgacgaggcctgggagcggattgacaagaaagtggaaggcctgagcaagcacatcaagctggaagaggaacggagaagcgaggacgcccagagcaaggccgccctgaccgactggctgcgggctaaggccagcttcgtgatcgagggcctgaaggaggccgacaaggacgagttctgcagatgcgagctgaagctgcagaagtggtacggggacctgcggggaaagcccttcgccatcgaagccgagaacagcatcctggacatcagcggcttcagcaagcagtacaactgtgccttcatctggcagaaggacggcgtgaagaagctgaacctgtacctgatcatcaactacttcaagggcggcaagctgcggttcaagaagatcaaacctgaagccttcgaagccaacagattctacaccgtgatcaacaaaaagagcggcgagatcgtgcccatggaggtgaacttcaacttcgacgaccccaacctgatcatcctgcctctggcctttggcaagagacagggcagagaattcatctggaacgacctgctgtccctggaaaccggcagcctgaagctggccaacggaagagtgatcgagaagacactgtacaacagaagaacccggcaggatgagcctgccctgttcgtggccctgaccttcgagcggcgggaggtcctggactcctccaatatcaaaccaatgaacctgatcggcgtggcaagaggcgaaaacatccccgccgtgatcgccctgaccgaccccgagggctgcccactgagccggtttaaggatagcctgggaaacccaacccacatcctgagaatcggcgagagctataaggagaagcagcggaccatccaggccaagaaggaggtggagcagcggagagccggcggctacagccggaagtacgccagcaaagccaagaatctggcagacgatatggtgagaaacaccgctagagatctgctgtactacgccgtgacccaggatgccatgctgatcttcgccaacctgagccggggcttcggccggcagggcaagcggaccttcatggccgagagacagtacacacggatggaggactggctgaccgccaagctggcctacgagggcctgagcaagacctacctgtccaagacactggcccagtacacctccaagacatgcagcaactgtgggtttaccatcaccagcgccgactacgacagggtgctggagaagctgaagaagacagcaacaggctggatgaccacaattaacggcaaggagctgaaggtggagggccagattacctactacaacagatacaagagacagaacgtagtcaaggacctgtccgtcgagctggatagactgagcgaagaatctgtgaacaacgacatctcctcctggacaaagggcagaagcggagaagctctgagcctcctgaagaaaagattctcccatagacccgtgcaggagaagttcgtgtgcctgaactgcggcttcgagacacacgcagccgagcaagccgccctgaacatcgccagatcctggctgttcctgcggagccaggagtacaagaaataccagacaaacaagacaaccggcaacaccgataagagagccttcgtcgagacctggcagtccttttaccggaagaagcttaaggaggtgtggaaacctgccgtgcggtctggcggatctggcggaggctccaccagccccaagaaaaagagaaaagtctaagctgccttctgcggggcttgccttctggccatgcccttcttctctcccttgcacctgtacctcttggtctttgaataaagcctgagtaggaaggctagcaaaaaaaaaaaaaaaaaaaaaaaaaaaaaaaaaaaaaaaaaaaaaaaaaaaaaaaaaaaaaaaaaaaaaaaaaaaaaaaa

SEQ ID NO: 13040 - RNA, 5785 nt, synthetic construct
  source 1..5785: mol_type = other RNA
aggaaataagagagaaaagaagagtaagaagaaatataagagccaccatggcccctaagaagaagcgtaaagtgagccggatggaacgcctcgtctacgaggtgcggcagaagtgcagaaacatcgaggacatctgcatctcctgcggatctctgaacgtgaccctggagcacccactgttcatcggcggcatgtgccagaactgtaaaaactgttttctggagtgtgcctatcaatacgacgatgacggctaccagagctactgcaccatctgttgcggcggaagagaggtgctgatgtgtggaaataacaactgctgccggtgcttctgcgtggaatgcgtggacctgctggtgggccccggcgccgcccaggccgctattaaggaagatccttggaactgctacatgtgcggccacaagggcacatacggcctgctgagacggagagaggactggcctagcagactgcagatgttcttcgccaataaccacgaccaggagttcgacccccctaaggtgtaccctcccgtccccgccgagaagagaaagcccatccgggtcctgagcctgttcgatggcatcgccaccggtctgctggtgctgaaggacctgggcatccaggtggataggtacattgcctccgaggtgtgcgaggactccatcaccgtgggaatggtgcgtcatcagggcaagatcatgtacgtgggcgacgtgcggagcgtgacacagaagcatatccaggagtggggccctttcgacctggtgatcggcggcagcccttgcaatgacctgagcatcgtgaacccagcccggaagggcctgtacgagggaaccggcagactgttcttcgagttttacagactgctgcacgacgcccggcctaaggaaggcgacgaccggcccttcttttggctgttcgagaatgtggtggccatgggagtcagcgacaagcgggatattagccggttcctggagagcaaccccgtgatgatcgatgccaaggaagtgagcgccgcccaccgggccagatacttctggggcaatctgcctggcatgaacagacccctggccagcaccgtgaacgacaagctggagctgcaggagtgcctggagcacggccggatcgccaagttcagcaaggtgagaaccatcaccacccgaagcaacagcatcaaacaaggcaaggaccagcactttcctgtgttcatgaacgagaaggaggacatcctgtggtgtaccgagatggagagagtgttcgggttcccagtccactacacagatgtcagcaacatgtctagactggccagacagagactgctgggaagaagctggtccgtccctgtgatcagacacctgttcgcccctctgaaggagtacttcgcctgcgtgagcagcggcaacagcaacgccaacagccggggccccagcttctctagcggcctggtgccactgtccctgagagggagccacatgggccccatggagatctacaaaaccgtgagcgcctggaagcggcagcctgtgcgcgtgctgagcctgtttcggaatatcgataaagtcctgaaaagcctgggattcctggagagcggctctggctccggcggtggcaccctgaagtacgtggaggatgtgacaaacgtggtcagacgggatgtggagaagtggggccccttcgatctggtgtacggcagcacccaacccctgggcagctcttgtgaccggtgccctggctggtacatgtttcagttccaccggatcctgcagtacgccctgccgagacaggagtcccagcggccattcttttggattttcatggacaacttgctgctgaccgaggatgaccaggaaactaccactcggttcctgcagaccgaagccgtgaccctgcaggacgtgagaggccgggactaccagaacgccatgcgggtgtggtccaacatccctggactgaaaagcaagcacgcacctctgacccctaaagaagaggagtacctgcaggcccaggtgcggagcagaagcaagctggacgcccctaaggtggatctgctggtgaagaattgcctcctgcccctgagagagtacttcaagtatttcagccagaatagtctgcccctgggaggcagcggcggcggcagcctggagcccgacagcttcggcgacgtggccgtgctgttcagccaggaggagtgggccaggctggcccccgcccagagggagctgtacagggacgtgatgctggagacctacagccacctggtgagcctgggcctggccgtgagcaagcccgacgtgatcagcttcctggagcagggcaaggagccctggctgggcgagaaggccgccgccggcggcctgggccccgagctggagagcaggggcggcccaagcagcggcgcccctcctcccagcggcggcagcccagccggctccccaacctctaccgaggagggcacctctgagtccgccacccccgagagcggccctggcacctccaccgagcccagcgagggcagcgcacccggcagccctgccggcagccccacctccacagaggagggaaccagcaccgagcccagcgaaggcagcgccccaggcaccagcaccgagcctagtgagcaggagattaaacggatcaacaagatcagaagaagacttgtgaaagacagcaacaccaagaaggccggcaagacaggccccatgaaaaccctgctggttagagtgatgacacccgatctgagagagcggctggaaaacctgagaaagaagcctgaaaatatcccccagcccatcagcaatacatctagagccaacctgaataagctgctgaccgattacaccgaaatgaagaaggcgatcctgcatgtgtactgggaagagttccagaaggaccctgtgggcctgatgagccgggtggcccagcctgccagcaagaagatcgatcagaacaagctgaaacctgagatggacgagaagggcaacctgaccaccgccggctttgcctgctctcagtgtggccagcccctgttcgtgtacaagctggagcaggtgtctgagaagggcaaggcttacaccaactacttcggacggtgcaatgtggccgagcacgaaaagctgatcctgctggcccagctgaagcccgagaaggatagcgacgaagccgtgacatatagcctgggaaagtttgggcagagggccctggatttctacagcattcatgtgaccaaggagtccacccaccccgtgaagcccctggcccagatcgccggaaacagatacgcctccggacctgtgggaaaggccctgagcgacgcatgtatgggcacaatcgcctccttcctgtctaagtaccaggacatcatcatcgaacaccagaaggtggtgaagggcaaccagaagagactggagagcctgcgggagctggccggcaaggaaaacctggaataccctagcgtgaccctgccacctcagcctcacaccaaggagggcgttgatgcctacaacgaagtgatcgcccgggtgcgaatgtgggtgaacctgaacctgtggcagaagctgaagctaagcagagatgatgccaagcctctgctgagactgaagggattcccttcctttcctctggtcgagagacaggccaacgaagtggactggtgggacatggtgtgtaacgtgaagaagctgatcaacgagaaaaaggaggatggcaaggtgttttggcagaatctggctggctacaagagacaggaagccctgagaccatacctgagcagcgaggaagatcggaagaagggaaagaaattcgctcggtaccagctgggcgacctgctgctgcacctggaaaagaagcacggcgaggactggggaaaggtgtacgacgaggcctgggagcggattgacaagaaagtggaaggcctgagcaagcacatcaagctggaagaggaacggagaagcgaggacgcccagagcaaggccgccctgaccgactggctgcgggctaaggccagcttcgtgatcgagggcctgaaggaggccgacaaggacgagttctgcagatgcgagctgaagctgcagaagtggtacggggacctgcggggaaagcccttcgccatcgaagccgagaacagcatcctggacatcagcggcttcagcaagcagtacaactgtgccttcatctggcagaaggacggcgtgaagaagctgaacctgtacctgatcatcaactacttcaagggcggcaagctgcggttcaagaagatcaaacctgaagccttcgaagccaacagattctacaccgtgatcaacaaaaagagcggcgagatcgtgcccatggaggtgaacttcaacttcgacgaccccaacctgatcatcctgcctctggcctttggcaagagacagggcagagaattcatctggaacgacctgctgtccctggaaaccggcagcctgaagctggccaacggaagagtgatcgagaagacactgtacaacagaagaacccggcaggatgagcctgccctgttcgtggccctgaccttcgagcggcgggaggtcctggactcctccaatatcaaaccaatgaacctgatcggcgtggcaagaggcgaaaacatccccgccgtgatcgccctgaccgaccccgagggctgcccactgagccggtttaaggatagcctgggaaacccaacccacatcctgagaatcggcgagagctataaggagaagcagcggaccatccaggccaagaaggaggtggagcagcggagagccggcggctacagccggaagtacgccagcaaagccaagaatctggcagacgatatggtgagaaacaccgctagagatctgctgtactacgccgtgacccaggatgccatgctgatcttcgccaacctgagccggggcttcggccggcagggcaagcggaccttcatggccgagagacagtacacacggatggaggactggctgaccgccaagctggcctacgagggcctgagcaagacctacctgtccaagacactggcccagtacacctccaagacatgcagcaactgtgggtttaccatcaccagcgccgactacgacagggtgctggagaagctgaagaagacagcaacaggctggatgaccacaattaacggcaaggagctgaaggtggagggccagattacctactacaacagatacaagagacagaacgtagtcaaggacctgtccgtcgagctggatagactgagcgaagaatctgtgaacaacgacatctcctcctggacaaagggcagaagcggagaagctctgagcctcctgaagaaaagattctcccatagacccgtgcaggagaagttcgtgtgcctgaactgcggcttcgagacacacgcagccgagcaagccgccctgaacatcgccagatcctggctgttcctgcggagccaggagtacaagaaataccagacaaacaagacaaccggcaacaccgataagagagccttcgtcgagacctggcagtccttttaccggaagaagcttaaggaggtgtggaaacctgccgtgcggtctggcggatctggcggaggctccaccagccccaagaaaaagagaaaagtctaagctgccttctgcggggcttgccttctggccatgcccttcttctctcccttgcacctgtacctcttggtctttgaataaagcctgagtaggaaggctagcaaaaaaaaaaaaaaaaaaaaaaaaaaaaaaaaaaaaaaaaaaaaaaaaaaaaaaaaaaaaaaaaaaaaaaaaaaaaaaaa

SEQ ID NO: 13041 - RNA, 5785 nt, synthetic construct
  source 1..5785: mol_type = other RNA
aggaaataagagagaaaagaagagtaagaagaaatataagagccaccatggcccctaagaagaagcgtaaagtgagccggatggaacgcctcgtctacgaggtgcggcagaagtgcagaaacatcgaggacatctgcatctcctgcggatctctgaacgtgaccctggagcacccactgttcatcggcggcatgtgccagaactgtaaaaactgttttctggagtgtgcctatcaatacgacgatgacggctaccagagctactgcaccatctgttgcggcggaagagaggtgctgatgtgtggaaataacaactgctgccggtgcttctgcgtggaatgcgtggacctgctggtgggccccggcgccgcccaggccgctattaaggaagatccttggaactgctacatgtgcggccacaagggcacatacggcctgctgagacggagagaggactggcctagcagactgcagatgttcttcgccaataaccacgaccaggagttcgacccccctaaggtgtaccctcccgtccccgccgagaagagaaagcccatccgggtcctgagcctgttcgatggcatcgccaccggtctgctggtgctgaaggacctgggcatccaggtggataggtacattgcctccgaggtgtgcgaggactccatcaccgtgggaatggtgcgtcatcagggcaagatcatgtacgtgggcgacgtgcggagcgtgacacagaagcatatccaggagtggggccctttcgacctggtgatcggcggcagcccttgcaatgacctgagcatcgtgaacccagcccggaagggcctgtacgagggaaccggcagactgttcttcgagttttacagactgctgcacgacgcccggcctaaggaaggcgacgaccggcccttcttttggctgttcgagaatgtggtggccatgggagtcagcgacaagcgggatattagccggttcctggagagcaaccccgtgatgatcgatgccaaggaagtgagcgccgcccaccgggccagatacttctggggcaatctgcctggcatgaacagacccctggccagcaccgtgaacgacaagctggagctgcaggagtgcctggagcacggccggatcgccaagttcagcaaggtgagaaccatcaccacccgaagcaacagcatcaaacaaggcaaggaccagcactttcctgtgttcatgaacgagaaggaggacatcctgtggtgtaccgagatggagagagtgttcgggttcccagtccactacacagatgtcagcaacatgtctagactggccagacagagactgctgggaagaagctggtccgtccctgtgatcagacacctgttcgcccctctgaaggagtacttcgcctgcgtgagcagcggcaacagcaacgccaacagccggggccccagcttctctagcggcctggtgccactgtccctgagagggagccacatgggccccatggagatctacaaaaccgtgagcgcctggaagcggcagcctgtgcgcgtgctgagcctgtttcggaatatcgataaagtcctgaaaagcctgggattcctggagagcggctctggctccggcggtggcaccctgaagtacgtggaggatgtgacaaacgtggtcagacgggatgtggagaagtggggccccttcgatctggtgtacggcagcacccaacccctgggcagctcttgtgaccggtgccctggctggtacatgtttcagttccaccggatcctgcagtacgccctgccgagacaggagtcccagcggccattcttttggattttcatggacaacttgctgctgaccgaggatgaccaggaaactaccactcggttcctgcagaccgaagccgtgaccctgcaggacgtgagaggccgggactaccagaacgccatgcgggtgtggtccaacatccctggactgaaaagcaagcacgcacctctgacccctaaagaagaggagtacctgcaggcccaggtgcggagcagaagcaagctggacgcccctaaggtggatctgctggtgaagaattgcctcctgcccctgagagagtacttcaagtatttcagccagaatagtctgcccctgggaggcagcggcggcggcgcccacgacctggtggtgttcagggacgtgagcgtggacttcagccaggaggagtgggagtgcctgaacagctaccagaggaacctgtacagggacgtgatcctggagaactacagcaacctggtgagcctggccggctgcagcatcagcaagcccgacgtgatcaccctgctggagcagggcaaggagccctggatggtggtgaggaacgagaagaggaggtggaacctggacctggagagcggcggcccaagcagcggcgcccctcctcccagcggcggcagcccagccggctccccaacctctaccgaggagggcacctctgagtccgccacccccgagagcggccctggcacctccaccgagcccagcgagggcagcgcacccggcagccctgccggcagccccacctccacagaggagggaaccagcaccgagcccagcgaaggcagcgccccaggcaccagcaccgagcctagtgagcaggagattaaacggatcaacaagatcagaagaagacttgtgaaagacagcaacaccaagaaggccggcaagacaggccccatgaaaaccctgctggttagagtgatgacacccgatctgagagagcggctggaaaacctgagaaagaagcctgaaaatatcccccagcccatcagcaatacatctagagccaacctgaataagctgctgaccgattacaccgaaatgaagaaggcgatcctgcatgtgtactgggaagagttccagaaggaccctgtgggcctgatgagccgggtggcccagcctgccagcaagaagatcgatcagaacaagctgaaacctgagatggacgagaagggcaacctgaccaccgccggctttgcctgctctcagtgtggccagcccctgttcgtgtacaagctggagcaggtgtctgagaagggcaaggcttacaccaactacttcggacggtgcaatgtggccgagcacgaaaagctgatcctgctggcccagctgaagcccgagaaggatagcgacgaagccgtgacatatagcctgggaaagtttgggcagagggccctggatttctacagcattcatgtgaccaaggagtccacccaccccgtgaagcccctggcccagatcgccggaaacagatacgcctccggacctgtgggaaaggccctgagcgacgcatgtatgggcacaatcgcctccttcctgtctaagtaccaggacatcatcatcgaacaccagaaggtggtgaagggcaaccagaagagactggagagcctgcgggagctggccggcaaggaaaacctggaataccctagcgtgaccctgccacctcagcctcacaccaaggagggcgttgatgcctacaacgaagtgatcgcccgggtgcgaatgtgggtgaacctgaacctgtggcagaagctgaagctaagcagagatgatgccaagcctctgctgagactgaagggattcccttcctttcctctggtcgagagacaggccaacgaagtggactggtgggacatggtgtgtaacgtgaagaagctgatcaacgagaaaaaggaggatggcaaggtgttttggcagaatctggctggctacaagagacaggaagccctgagaccatacctgagcagcgaggaagatcggaagaagggaaagaaattcgctcggtaccagctgggcgacctgctgctgcacctggaaaagaagcacggcgaggactggggaaaggtgtacgacgaggcctgggagcggattgacaagaaagtggaaggcctgagcaagcacatcaagctggaagaggaacggagaagcgaggacgcccagagcaaggccgccctgaccgactggctgcgggctaaggccagcttcgtgatcgagggcctgaaggaggccgacaaggacgagttctgcagatgcgagctgaagctgcagaagtggtacggggacctgcggggaaagcccttcgccatcgaagccgagaacagcatcctggacatcagcggcttcagcaagcagtacaactgtgccttcatctggcagaaggacggcgtgaagaagctgaacctgtacctgatcatcaactacttcaagggcggcaagctgcggttcaagaagatcaaacctgaagccttcgaagccaacagattctacaccgtgatcaacaaaaagagcggcgagatcgtgcccatggaggtgaacttcaacttcgacgaccccaacctgatcatcctgcctctggcctttggcaagagacagggcagagaattcatctggaacgacctgctgtccctggaaaccggcagcctgaagctggccaacggaagagtgatcgagaagacactgtacaacagaagaacccggcaggatgagcctgccctgttcgtggccctgaccttcgagcggcgggaggtcctggactcctccaatatcaaaccaatgaacctgatcggcgtggcaagaggcgaaaacatccccgccgtgatcgccctgaccgaccccgagggctgcccactgagccggtttaaggatagcctgggaaacccaacccacatcctgagaatcggcgagagctataaggagaagcagcggaccatccaggccaagaaggaggtggagcagcggagagccggcggctacagccggaagtacgccagcaaagccaagaatctggcagacgatatggtgagaaacaccgctagagatctgctgtactacgccgtgacccaggatgccatgctgatcttcgccaacctgagccggggcttcggccggcagggcaagcggaccttcatggccgagagacagtacacacggatggaggactggctgaccgccaagctggcctacgagggcctgagcaagacctacctgtccaagacactggcccagtacacctccaagacatgcagcaactgtgggtttaccatcaccagcgccgactacgacagggtgctggagaagctgaagaagacagcaacaggctggatgaccacaattaacggcaaggagctgaaggtggagggccagattacctactacaacagatacaagagacagaacgtagtcaaggacctgtccgtcgagctggatagactgagcgaagaatctgtgaacaacgacatctcctcctggacaaagggcagaagcggagaagctctgagcctcctgaagaaaagattctcccatagacccgtgcaggagaagttcgtgtgcctgaactgcggcttcgagacacacgcagccgagcaagccgccctgaacatcgccagatcctggctgttcctgcggagccaggagtacaagaaataccagacaaacaagacaaccggcaacaccgataagagagccttcgtcgagacctggcagtccttttaccggaagaagcttaaggaggtgtggaaacctgccgtgcggtctggcggatctggcggaggctccaccagccccaagaaaaagagaaaagtctaagctgccttctgcggggcttgccttctggccatgcccttcttctctcccttgcacctgtacctcttggtctttgaataaagcctgagtaggaaggctagcaaaaaaaaaaaaaaaaaaaaaaaaaaaaaaaaaaaaaaaaaaaaaaaaaaaaaaaaaaaaaaaaaaaaaaaaaaaaaaaa

SEQ ID NO: 13042 - RNA, 5785 nt, synthetic construct
  source 1..5785: mol_type = other RNA
aggaaataagagagaaaagaagagtaagaagaaatataagagccaccatggcccctaagaagaagcgtaaagtgagccggatggaacgcctcgtctacgaggtgcggcagaagtgcagaaacatcgaggacatctgcatctcctgcggatctctgaacgtgaccctggagcacccactgttcatcggcggcatgtgccagaactgtaaaaactgttttctggagtgtgcctatcaatacgacgatgacggctaccagagctactgcaccatctgttgcggcggaagagaggtgctgatgtgtggaaataacaactgctgccggtgcttctgcgtggaatgcgtggacctgctggtgggccccggcgccgcccaggccgctattaaggaagatccttggaactgctacatgtgcggccacaagggcacatacggcctgctgagacggagagaggactggcctagcagactgcagatgttcttcgccaataaccacgaccaggagttcgacccccctaaggtgtaccctcccgtccccgccgagaagagaaagcccatccgggtcctgagcctgttcgatggcatcgccaccggtctgctggtgctgaaggacctgggcatccaggtggataggtacattgcctccgaggtgtgcgaggactccatcaccgtgggaatggtgcgtcatcagggcaagatcatgtacgtgggcgacgtgcggagcgtgacacagaagcatatccaggagtggggccctttcgacctggtgatcggcggcagcccttgcaatgacctgagcatcgtgaacccagcccggaagggcctgtacgagggaaccggcagactgttcttcgagttttacagactgctgcacgacgcccggcctaaggaaggcgacgaccggcccttcttttggctgttcgagaatgtggtggccatgggagtcagcgacaagcgggatattagccggttcctggagagcaaccccgtgatgatcgatgccaaggaagtgagcgccgcccaccgggccagatacttctggggcaatctgcctggcatgaacagacccctggccagcaccgtgaacgacaagctggagctgcaggagtgcctggagcacggccggatcgccaagttcagcaaggtgagaaccatcaccacccgaagcaacagcatcaaacaaggcaaggaccagcactttcctgtgttcatgaacgagaaggaggacatcctgtggtgtaccgagatggagagagtgttcgggttcccagtccactacacagatgtcagcaacatgtctagactggccagacagagactgctgggaagaagctggtccgtccctgtgatcagacacctgttcgcccctctgaaggagtacttcgcctgcgtgagcagcggcaacagcaacgccaacagccggggccccagcttctctagcggcctggtgccactgtccctgagagggagccacatgggccccatggagatctacaaaaccgtgagcgcctggaagcggcagcctgtgcgcgtgctgagcctgtttcggaatatcgataaagtcctgaaaagcctgggattcctggagagcggctctggctccggcggtggcaccctgaagtacgtggaggatgtgacaaacgtggtcagacgggatgtggagaagtggggccccttcgatctggtgtacggcagcacccaacccctgggcagctcttgtgaccggtgccctggctggtacatgtttcagttccaccggatcctgcagtacgccctgccgagacaggagtcccagcggccattcttttggattttcatggacaacttgctgctgaccgaggatgaccaggaaactaccactcggttcctgcagaccgaagccgtgaccctgcaggacgtgagaggccgggactaccagaacgccatgcgggtgtggtccaacatccctggactgaaaagcaagcacgcacctctgacccctaaagaagaggagtacctgcaggcccaggtgcggagcagaagcaagctggacgcccctaaggtggatctgctggtgaagaattgcctcctgcccctgagagagtacttcaagtatttcagccagaatagtctgcccctgggaggcagcggcggcggcagcgtgatgttcagcgacgtgagcatcgacttcagcctggaggagtgggagttcctgaacctggagcagagggacctgtacagggacgtgatgctggagaactacagcaacctggtgagcctgggctgcttcatcagcaagcccgacgtgatcagcctgctggagcagggcaaggagccctggaaggtggtgaggcagggcaggaggcagtaccccgacctggagaccaactacgagatcaagggcggcccaagcagcggcgcccctcctcccagcggcggcagcccagccggctccccaacctctaccgaggagggcacctctgagtccgccacccccgagagcggccctggcacctccaccgagcccagcgagggcagcgcacccggcagccctgccggcagccccacctccacagaggagggaaccagcaccgagcccagcgaaggcagcgccccaggcaccagcaccgagcctagtgagcaggagattaaacggatcaacaagatcagaagaagacttgtgaaagacagcaacaccaagaaggccggcaagacaggccccatgaaaaccctgctggttagagtgatgacacccgatctgagagagcggctggaaaacctgagaaagaagcctgaaaatatcccccagcccatcagcaatacatctagagccaacctgaataagctgctgaccgattacaccgaaatgaagaaggcgatcctgcatgtgtactgggaagagttccagaaggaccctgtgggcctgatgagccgggtggcccagcctgccagcaagaagatcgatcagaacaagctgaaacctgagatggacgagaagggcaacctgaccaccgccggctttgcctgctctcagtgtggccagcccctgttcgtgtacaagctggagcaggtgtctgagaagggcaaggcttacaccaactacttcggacggtgcaatgtggccgagcacgaaaagctgatcctgctggcccagctgaagcccgagaaggatagcgacgaagccgtgacatatagcctgggaaagtttgggcagagggccctggatttctacagcattcatgtgaccaaggagtccacccaccccgtgaagcccctggcccagatcgccggaaacagatacgcctccggacctgtgggaaaggccctgagcgacgcatgtatgggcacaatcgcctccttcctgtctaagtaccaggacatcatcatcgaacaccagaaggtggtgaagggcaaccagaagagactggagagcctgcgggagctggccggcaaggaaaacctggaataccctagcgtgaccctgccacctcagcctcacaccaaggagggcgttgatgcctacaacgaagtgatcgcccgggtgcgaatgtgggtgaacctgaacctgtggcagaagctgaagctaagcagagatgatgccaagcctctgctgagactgaagggattcccttcctttcctctggtcgagagacaggccaacgaagtggactggtgggacatggtgtgtaacgtgaagaagctgatcaacgagaaaaaggaggatggcaaggtgttttggcagaatctggctggctacaagagacaggaagccctgagaccatacctgagcagcgaggaagatcggaagaagggaaagaaattcgctcggtaccagctgggcgacctgctgctgcacctggaaaagaagcacggcgaggactggggaaaggtgtacgacgaggcctgggagcggattgacaagaaagtggaaggcctgagcaagcacatcaagctggaagaggaacggagaagcgaggacgcccagagcaaggccgccctgaccgactggctgcgggctaaggccagcttcgtgatcgagggcctgaaggaggccgacaaggacgagttctgcagatgcgagctgaagctgcagaagtggtacggggacctgcggggaaagcccttcgccatcgaagccgagaacagcatcctggacatcagcggcttcagcaagcagtacaactgtgccttcatctggcagaaggacggcgtgaagaagctgaacctgtacctgatcatcaactacttcaagggcggcaagctgcggttcaagaagatcaaacctgaagccttcgaagccaacagattctacaccgtgatcaacaaaaagagcggcgagatcgtgcccatggaggtgaacttcaacttcgacgaccccaacctgatcatcctgcctctggcctttggcaagagacagggcagagaattcatctggaacgacctgctgtccctggaaaccggcagcctgaagctggccaacggaagagtgatcgagaagacactgtacaacagaagaacccggcaggatgagcctgccctgttcgtggccctgaccttcgagcggcgggaggtcctggactcctccaatatcaaaccaatgaacctgatcggcgtggcaagaggcgaaaacatccccgccgtgatcgccctgaccgaccccgagggctgcccactgagccggtttaaggatagcctgggaaacccaacccacatcctgagaatcggcgagagctataaggagaagcagcggaccatccaggccaagaaggaggtggagcagcggagagccggcggctacagccggaagtacgccagcaaagccaagaatctggcagacgatatggtgagaaacaccgctagagatctgctgtactacgccgtgacccaggatgccatgctgatcttcgccaacctgagccggggcttcggccggcagggcaagcggaccttcatggccgagagacagtacacacggatggaggactggctgaccgccaagctggcctacgagggcctgagcaagacctacctgtccaagacactggcccagtacacctccaagacatgcagcaactgtgggtttaccatcaccagcgccgactacgacagggtgctggagaagctgaagaagacagcaacaggctggatgaccacaattaacggcaaggagctgaaggtggagggccagattacctactacaacagatacaagagacagaacgtagtcaaggacctgtccgtcgagctggatagactgagcgaagaatctgtgaacaacgacatctcctcctggacaaagggcagaagcggagaagctctgagcctcctgaagaaaagattctcccatagacccgtgcaggagaagttcgtgtgcctgaactgcggcttcgagacacacgcagccgagcaagccgccctgaacatcgccagatcctggctgttcctgcggagccaggagtacaagaaataccagacaaacaagacaaccggcaacaccgataagagagccttcgtcgagacctggcagtccttttaccggaagaagcttaaggaggtgtggaaacctgccgtgcggtctggcggatctggcggaggctccaccagccccaagaaaaagagaaaagtctaagctgccttctgcggggcttgccttctggccatgcccttcttctctcccttgcacctgtacctcttggtctttgaataaagcctgagtaggaaggctagcaaaaaaaaaaaaaaaaaaaaaaaaaaaaaaaaaaaaaaaaaaaaaaaaaaaaaaaaaaaaaaaaaaaaaaaaaaaaaaaa

SEQ ID NO: 13043 - RNA, 5785 nt, synthetic construct
  source 1..5785: mol_type = other RNA
aggaaataagagagaaaagaagagtaagaagaaatataagagccaccatggcccctaagaagaagcgtaaagtgagccggatggaacgcctcgtctacgaggtgcggcagaagtgcagaaacatcgaggacatctgcatctcctgcggatctctgaacgtgaccctggagcacccactgttcatcggcggcatgtgccagaactgtaaaaactgttttctggagtgtgcctatcaatacgacgatgacggctaccagagctactgcaccatctgttgcggcggaagagaggtgctgatgtgtggaaataacaactgctgccggtgcttctgcgtggaatgcgtggacctgctggtgggccccggcgccgcccaggccgctattaaggaagatccttggaactgctacatgtgcggccacaagggcacatacggcctgctgagacggagagaggactggcctagcagactgcagatgttcttcgccaataaccacgaccaggagttcgacccccctaaggtgtaccctcccgtccccgccgagaagagaaagcccatccgggtcctgagcctgttcgatggcatcgccaccggtctgctggtgctgaaggacctgggcatccaggtggataggtacattgcctccgaggtgtgcgaggactccatcaccgtgggaatggtgcgtcatcagggcaagatcatgtacgtgggcgacgtgcggagcgtgacacagaagcatatccaggagtggggccctttcgacctggtgatcggcggcagcccttgcaatgacctgagcatcgtgaacccagcccggaagggcctgtacgagggaaccggcagactgttcttcgagttttacagactgctgcacgacgcccggcctaaggaaggcgacgaccggcccttcttttggctgttcgagaatgtggtggccatgggagtcagcgacaagcgggatattagccggttcctggagagcaaccccgtgatgatcgatgccaaggaagtgagcgccgcccaccgggccagatacttctggggcaatctgcctggcatgaacagacccctggccagcaccgtgaacgacaagctggagctgcaggagtgcctggagcacggccggatcgccaagttcagcaaggtgagaaccatcaccacccgaagcaacagcatcaaacaaggcaaggaccagcactttcctgtgttcatgaacgagaaggaggacatcctgtggtgtaccgagatggagagagtgttcgggttcccagtccactacacagatgtcagcaacatgtctagactggccagacagagactgctgggaagaagctggtccgtccctgtgatcagacacctgttcgcccctctgaaggagtacttcgcctgcgtgagcagcggcaacagcaacgccaacagccggggccccagcttctctagcggcctggtgccactgtccctgagagggagccacatgggccccatggagatctacaaaaccgtgagcgcctggaagcggcagcctgtgcgcgtgctgagcctgtttcggaatatcgataaagtcctgaaaagcctgggattcctggagagcggctctggctccggcggtggcaccctgaagtacgtggaggatgtgacaaacgtggtcagacgggatgtggagaagtggggccccttcgatctggtgtacggcagcacccaacccctgggcagctcttgtgaccggtgccctggctggtacatgtttcagttccaccggatcctgcagtacgccctgccgagacaggagtcccagcggccattcttttggattttcatggacaacttgctgctgaccgaggatgaccaggaaactaccactcggttcctgcagaccgaagccgtgaccctgcaggacgtgagaggccgggactaccagaacgccatgcgggtgtggtccaacatccctggactgaaaagcaagcacgcacctctgacccctaaagaagaggagtacctgcaggcccaggtgcggagcagaagcaagctggacgcccctaaggtggatctgctggtgaagaattgcctcctgcccctgagagagtacttcaagtatttcagccagaatagtctgcccctgggaggcagcggcggcggcgccgtgacccagctgaccttcgaggacgtggccgtggacttcacccccgaggagtggaggtgcctgacccccgcccagagggccctgtacagggacgtgatgctggacacctacaggaacctggtgagcgtgggcgtgagcccccccagcatgagcgtgatcctgcccctggagttccaggaggagccctgggtggcccagagccacgtgaccaccctgggcggcctgaacggctgggagggcggcggcccaagcagcggcgcccctcctcccagcggcggcagcccagccggctccccaacctctaccgaggagggcacctctgagtccgccacccccgagagcggccctggcacctccaccgagcccagcgagggcagcgcacccggcagccctgccggcagccccacctccacagaggagggaaccagcaccgagcccagcgaaggcagcgccccaggcaccagcaccgagcctagtgagcaggagattaaacggatcaacaagatcagaagaagacttgtgaaagacagcaacaccaagaaggccggcaagacaggccccatgaaaaccctgctggttagagtgatgacacccgatctgagagagcggctggaaaacctgagaaagaagcctgaaaatatcccccagcccatcagcaatacatctagagccaacctgaataagctgctgaccgattacaccgaaatgaagaaggcgatcctgcatgtgtactgggaagagttccagaaggaccctgtgggcctgatgagccgggtggcccagcctgccagcaagaagatcgatcagaacaagctgaaacctgagatggacgagaagggcaacctgaccaccgccggctttgcctgctctcagtgtggccagcccctgttcgtgtacaagctggagcaggtgtctgagaagggcaaggcttacaccaactacttcggacggtgcaatgtggccgagcacgaaaagctgatcctgctggcccagctgaagcccgagaaggatagcgacgaagccgtgacatatagcctgggaaagtttgggcagagggccctggatttctacagcattcatgtgaccaaggagtccacccaccccgtgaagcccctggcccagatcgccggaaacagatacgcctccggacctgtgggaaaggccctgagcgacgcatgtatgggcacaatcgcctccttcctgtctaagtaccaggacatcatcatcgaacaccagaaggtggtgaagggcaaccagaagagactggagagcctgcgggagctggccggcaaggaaaacctggaataccctagcgtgaccctgccacctcagcctcacaccaaggagggcgttgatgcctacaacgaagtgatcgcccgggtgcgaatgtgggtgaacctgaacctgtggcagaagctgaagctaagcagagatgatgccaagcctctgctgagactgaagggattcccttcctttcctctggtcgagagacaggccaacgaagtggactggtgggacatggtgtgtaacgtgaagaagctgatcaacgagaaaaaggaggatggcaaggtgttttggcagaatctggctggctacaagagacaggaagccctgagaccatacctgagcagcgaggaagatcggaagaagggaaagaaattcgctcggtaccagctgggcgacctgctgctgcacctggaaaagaagcacggcgaggactggggaaaggtgtacgacgaggcctgggagcggattgacaagaaagtggaaggcctgagcaagcacatcaagctggaagaggaacggagaagcgaggacgcccagagcaaggccgccctgaccgactggctgcgggctaaggccagcttcgtgatcgagggcctgaaggaggccgacaaggacgagttctgcagatgcgagctgaagctgcagaagtggtacggggacctgcggggaaagcccttcgccatcgaagccgagaacagcatcctggacatcagcggcttcagcaagcagtacaactgtgccttcatctggcagaaggacggcgtgaagaagctgaacctgtacctgatcatcaactacttcaagggcggcaagctgcggttcaagaagatcaaacctgaagccttcgaagccaacagattctacaccgtgatcaacaaaaagagcggcgagatcgtgcccatggaggtgaacttcaacttcgacgaccccaacctgatcatcctgcctctggcctttggcaagagacagggcagagaattcatctggaacgacctgctgtccctggaaaccggcagcctgaagctggccaacggaagagtgatcgagaagacactgtacaacagaagaacccggcaggatgagcctgccctgttcgtggccctgaccttcgagcggcgggaggtcctggactcctccaatatcaaaccaatgaacctgatcggcgtggcaagaggcgaaaacatccccgccgtgatcgccctgaccgaccccgagggctgcccactgagccggtttaaggatagcctgggaaacccaacccacatcctgagaatcggcgagagctataaggagaagcagcggaccatccaggccaagaaggaggtggagcagcggagagccggcggctacagccggaagtacgccagcaaagccaagaatctggcagacgatatggtgagaaacaccgctagagatctgctgtactacgccgtgacccaggatgccatgctgatcttcgccaacctgagccggggcttcggccggcagggcaagcggaccttcatggccgagagacagtacacacggatggaggactggctgaccgccaagctggcctacgagggcctgagcaagacctacctgtccaagacactggcccagtacacctccaagacatgcagcaactgtgggtttaccatcaccagcgccgactacgacagggtgctggagaagctgaagaagacagcaacaggctggatgaccacaattaacggcaaggagctgaaggtggagggccagattacctactacaacagatacaagagacagaacgtagtcaaggacctgtccgtcgagctggatagactgagcgaagaatctgtgaacaacgacatctcctcctggacaaagggcagaagcggagaagctctgagcctcctgaagaaaagattctcccatagacccgtgcaggagaagttcgtgtgcctgaactgcggcttcgagacacacgcagccgagcaagccgccctgaacatcgccagatcctggctgttcctgcggagccaggagtacaagaaataccagacaaacaagacaaccggcaacaccgataagagagccttcgtcgagacctggcagtccttttaccggaagaagcttaaggaggtgtggaaacctgccgtgcggtctggcggatctggcggaggctccaccagccccaagaaaaagagaaaagtctaagctgccttctgcggggcttgccttctggccatgcccttcttctctcccttgcacctgtacctcttggtctttgaataaagcctgagtaggaaggctagcaaaaaaaaaaaaaaaaaaaaaaaaaaaaaaaaaaaaaaaaaaaaaaaaaaaaaaaaaaaaaaaaaaaaaaaaaaaaaaaa

SEQ ID NO: 13044 - RNA, 5785 nt, synthetic construct
  source 1..5785: mol_type = other RNA
aggaaataagagagaaaagaagagtaagaagaaatataagagccaccatggcccctaagaagaagcgtaaagtgagccggatggaacgcctcgtctacgaggtgcggcagaagtgcagaaacatcgaggacatctgcatctcctgcggatctctgaacgtgaccctggagcacccactgttcatcggcggcatgtgccagaactgtaaaaactgttttctggagtgtgcctatcaatacgacgatgacggctaccagagctactgcaccatctgttgcggcggaagagaggtgctgatgtgtggaaataacaactgctgccggtgcttctgcgtggaatgcgtggacctgctggtgggccccggcgccgcccaggccgctattaaggaagatccttggaactgctacatgtgcggccacaagggcacatacggcctgctgagacggagagaggactggcctagcagactgcagatgttcttcgccaataaccacgaccaggagttcgacccccctaaggtgtaccctcccgtccccgccgagaagagaaagcccatccgggtcctgagcctgttcgatggcatcgccaccggtctgctggtgctgaaggacctgggcatccaggtggataggtacattgcctccgaggtgtgcgaggactccatcaccgtgggaatggtgcgtcatcagggcaagatcatgtacgtgggcgacgtgcggagcgtgacacagaagcatatccaggagtggggccctttcgacctggtgatcggcggcagcccttgcaatgacctgagcatcgtgaacccagcccggaagggcctgtacgagggaaccggcagactgttcttcgagttttacagactgctgcacgacgcccggcctaaggaaggcgacgaccggcccttcttttggctgttcgagaatgtggtggccatgggagtcagcgacaagcgggatattagccggttcctggagagcaaccccgtgatgatcgatgccaaggaagtgagcgccgcccaccgggccagatacttctggggcaatctgcctggcatgaacagacccctggccagcaccgtgaacgacaagctggagctgcaggagtgcctggagcacggccggatcgccaagttcagcaaggtgagaaccatcaccacccgaagcaacagcatcaaacaaggcaaggaccagcactttcctgtgttcatgaacgagaaggaggacatcctgtggtgtaccgagatggagagagtgttcgggttcccagtccactacacagatgtcagcaacatgtctagactggccagacagagactgctgggaagaagctggtccgtccctgtgatcagacacctgttcgcccctctgaaggagtacttcgcctgcgtgagcagcggcaacagcaacgccaacagccggggccccagcttctctagcggcctggtgccactgtccctgagagggagccacatgggccccatggagatctacaaaaccgtgagcgcctggaagcggcagcctgtgcgcgtgctgagcctgtttcggaatatcgataaagtcctgaaaagcctgggattcctggagagcggctctggctccggcggtggcaccctgaagtacgtggaggatgtgacaaacgtggtcagacgggatgtggagaagtggggccccttcgatctggtgtacggcagcacccaacccctgggcagctcttgtgaccggtgccctggctggtacatgtttcagttccaccggatcctgcagtacgccctgccgagacaggagtcccagcggccattcttttggattttcatggacaacttgctgctgaccgaggatgaccaggaaactaccactcggttcctgcagaccgaagccgtgaccctgcaggacgtgagaggccgggactaccagaacgccatgcgggtgtggtccaacatccctggactgaaaagcaagcacgcacctctgacccctaaagaagaggagtacctgcaggcccaggtgcggagcagaagcaagctggacgcccctaaggtggatctgctggtgaagaattgcctcctgcccctgagagagtacttcaagtatttcagccagaatagtctgcccctgggaggcagcggcggcggccaccaggaggtggtgaccttcgaggacgtggccgtgtacttcaccaggaccgagtgggccggcctgagccccgcccagagggccctgtacaggagcgtgatgctggagatctacaggagcctgaccagcctgggctaccccgtgcccaagcccgccctgatcagcctgctggagaggggcgacctgcccgtgggcctggagacccaggacaacccccccgcccagggcaccagggacatctacggcggcccaagcagcggcgcccctcctcccagcggcggcagcccagccggctccccaacctctaccgaggagggcacctctgagtccgccacccccgagagcggccctggcacctccaccgagcccagcgagggcagcgcacccggcagccctgccggcagccccacctccacagaggagggaaccagcaccgagcccagcgaaggcagcgccccaggcaccagcaccgagcctagtgagcaggagattaaacggatcaacaagatcagaagaagacttgtgaaagacagcaacaccaagaaggccggcaagacaggccccatgaaaaccctgctggttagagtgatgacacccgatctgagagagcggctggaaaacctgagaaagaagcctgaaaatatcccccagcccatcagcaatacatctagagccaacctgaataagctgctgaccgattacaccgaaatgaagaaggcgatcctgcatgtgtactgggaagagttccagaaggaccctgtgggcctgatgagccgggtggcccagcctgccagcaagaagatcgatcagaacaagctgaaacctgagatggacgagaagggcaacctgaccaccgccggctttgcctgctctcagtgtggccagcccctgttcgtgtacaagctggagcaggtgtctgagaagggcaaggcttacaccaactacttcggacggtgcaatgtggccgagcacgaaaagctgatcctgctggcccagctgaagcccgagaaggatagcgacgaagccgtgacatatagcctgggaaagtttgggcagagggccctggatttctacagcattcatgtgaccaaggagtccacccaccccgtgaagcccctggcccagatcgccggaaacagatacgcctccggacctgtgggaaaggccctgagcgacgcatgtatgggcacaatcgcctccttcctgtctaagtaccaggacatcatcatcgaacaccagaaggtggtgaagggcaaccagaagagactggagagcctgcgggagctggccggcaaggaaaacctggaataccctagcgtgaccctgccacctcagcctcacaccaaggagggcgttgatgcctacaacgaagtgatcgcccgggtgcgaatgtgggtgaacctgaacctgtggcagaagctgaagctaagcagagatgatgccaagcctctgctgagactgaagggattcccttcctttcctctggtcgagagacaggccaacgaagtggactggtgggacatggtgtgtaacgtgaagaagctgatcaacgagaaaaaggaggatggcaaggtgttttggcagaatctggctggctacaagagacaggaagccctgagaccatacctgagcagcgaggaagatcggaagaagggaaagaaattcgctcggtaccagctgggcgacctgctgctgcacctggaaaagaagcacggcgaggactggggaaaggtgtacgacgaggcctgggagcggattgacaagaaagtggaaggcctgagcaagcacatcaagctggaagaggaacggagaagcgaggacgcccagagcaaggccgccctgaccgactggctgcgggctaaggccagcttcgtgatcgagggcctgaaggaggccgacaaggacgagttctgcagatgcgagctgaagctgcagaagtggtacggggacctgcggggaaagcccttcgccatcgaagccgagaacagcatcctggacatcagcggcttcagcaagcagtacaactgtgccttcatctggcagaaggacggcgtgaagaagctgaacctgtacctgatcatcaactacttcaagggcggcaagctgcggttcaagaagatcaaacctgaagccttcgaagccaacagattctacaccgtgatcaacaaaaagagcggcgagatcgtgcccatggaggtgaacttcaacttcgacgaccccaacctgatcatcctgcctctggcctttggcaagagacagggcagagaattcatctggaacgacctgctgtccctggaaaccggcagcctgaagctggccaacggaagagtgatcgagaagacactgtacaacagaagaacccggcaggatgagcctgccctgttcgtggccctgaccttcgagcggcgggaggtcctggactcctccaatatcaaaccaatgaacctgatcggcgtggcaagaggcgaaaacatccccgccgtgatcgccctgaccgaccccgagggctgcccactgagccggtttaaggatagcctgggaaacccaacccacatcctgagaatcggcgagagctataaggagaagcagcggaccatccaggccaagaaggaggtggagcagcggagagccggcggctacagccggaagtacgccagcaaagccaagaatctggcagacgatatggtgagaaacaccgctagagatctgctgtactacgccgtgacccaggatgccatgctgatcttcgccaacctgagccggggcttcggccggcagggcaagcggaccttcatggccgagagacagtacacacggatggaggactggctgaccgccaagctggcctacgagggcctgagcaagacctacctgtccaagacactggcccagtacacctccaagacatgcagcaactgtgggtttaccatcaccagcgccgactacgacagggtgctggagaagctgaagaagacagcaacaggctggatgaccacaattaacggcaaggagctgaaggtggagggccagattacctactacaacagatacaagagacagaacgtagtcaaggacctgtccgtcgagctggatagactgagcgaagaatctgtgaacaacgacatctcctcctggacaaagggcagaagcggagaagctctgagcctcctgaagaaaagattctcccatagacccgtgcaggagaagttcgtgtgcctgaactgcggcttcgagacacacgcagccgagcaagccgccctgaacatcgccagatcctggctgttcctgcggagccaggagtacaagaaataccagacaaacaagacaaccggcaacaccgataagagagccttcgtcgagacctggcagtccttttaccggaagaagcttaaggaggtgtggaaacctgccgtgcggtctggcggatctggcggaggctccaccagccccaagaaaaagagaaaagtctaagctgccttctgcggggcttgccttctggccatgcccttcttctctcccttgcacctgtacctcttggtctttgaataaagcctgagtaggaaggctagcaaaaaaaaaaaaaaaaaaaaaaaaaaaaaaaaaaaaaaaaaaaaaaaaaaaaaaaaaaaaaaaaaaaaaaaaaaaaaaaa

SEQ ID NO: 13045 - RNA, 5785 nt, synthetic construct
  source 1..5785: mol_type = other RNA
aggaaataagagagaaaagaagagtaagaagaaatataagagccaccatggcccctaagaagaagcgtaaagtgagccggatggaacgcctcgtctacgaggtgcggcagaagtgcagaaacatcgaggacatctgcatctcctgcggatctctgaacgtgaccctggagcacccactgttcatcggcggcatgtgccagaactgtaaaaactgttttctggagtgtgcctatcaatacgacgatgacggctaccagagctactgcaccatctgttgcggcggaagagaggtgctgatgtgtggaaataacaactgctgccggtgcttctgcgtggaatgcgtggacctgctggtgggccccggcgccgcccaggccgctattaaggaagatccttggaactgctacatgtgcggccacaagggcacatacggcctgctgagacggagagaggactggcctagcagactgcagatgttcttcgccaataaccacgaccaggagttcgacccccctaaggtgtaccctcccgtccccgccgagaagagaaagcccatccgggtcctgagcctgttcgatggcatcgccaccggtctgctggtgctgaaggacctgggcatccaggtggataggtacattgcctccgaggtgtgcgaggactccatcaccgtgggaatggtgcgtcatcagggcaagatcatgtacgtgggcgacgtgcggagcgtgacacagaagcatatccaggagtggggccctttcgacctggtgatcggcggcagcccttgcaatgacctgagcatcgtgaacccagcccggaagggcctgtacgagggaaccggcagactgttcttcgagttttacagactgctgcacgacgcccggcctaaggaaggcgacgaccggcccttcttttggctgttcgagaatgtggtggccatgggagtcagcgacaagcgggatattagccggttcctggagagcaaccccgtgatgatcgatgccaaggaagtgagcgccgcccaccgggccagatacttctggggcaatctgcctggcatgaacagacccctggccagcaccgtgaacgacaagctggagctgcaggagtgcctggagcacggccggatcgccaagttcagcaaggtgagaaccatcaccacccgaagcaacagcatcaaacaaggcaaggaccagcactttcctgtgttcatgaacgagaaggaggacatcctgtggtgtaccgagatggagagagtgttcgggttcccagtccactacacagatgtcagcaacatgtctagactggccagacagagactgctgggaagaagctggtccgtccctgtgatcagacacctgttcgcccctctgaaggagtacttcgcctgcgtgagcagcggcaacagcaacgccaacagccggggccccagcttctctagcggcctggtgccactgtccctgagagggagccacatgggccccatggagatctacaaaaccgtgagcgcctggaagcggcagcctgtgcgcgtgctgagcctgtttcggaatatcgataaagtcctgaaaagcctgggattcctggagagcggctctggctccggcggtggcaccctgaagtacgtggaggatgtgacaaacgtggtcagacgggatgtggagaagtggggccccttcgatctggtgtacggcagcacccaacccctgggcagctcttgtgaccggtgccctggctggtacatgtttcagttccaccggatcctgcagtacgccctgccgagacaggagtcccagcggccattcttttggattttcatggacaacttgctgctgaccgaggatgaccaggaaactaccactcggttcctgcagaccgaagccgtgaccctgcaggacgtgagaggccgggactaccagaacgccatgcgggtgtggtccaacatccctggactgaaaagcaagcacgcacctctgacccctaaagaagaggagtacctgcaggcccaggtgcggagcagaagcaagctggacgcccctaaggtggatctgctggtgaagaattgcctcctgcccctgagagagtacttcaagtatttcagccagaatagtctgcccctgggaggcagcggcggcggcgcccaggagagcgtgatgttcagcgacgtgagcgtggacttcagccaggaggagtgggagtgcctgaacgacgaccagagggacctgtacagggacgtgatgctggagaactacagcaacctggtgagcatgggccacagcgtgagcaagcccaacgtgatcagctacctggagcagggcaaggagccctggctggtggacagggagctgaccaggggccagtggcccgtgctggagagcaggggcggcccaagcagcggcgcccctcctcccagcggcggcagcccagccggctccccaacctctaccgaggagggcacctctgagtccgccacccccgagagcggccctggcacctccaccgagcccagcgagggcagcgcacccggcagccctgccggcagccccacctccacagaggagggaaccagcaccgagcccagcgaaggcagcgccccaggcaccagcaccgagcctagtgagcaggagattaaacggatcaacaagatcagaagaagacttgtgaaagacagcaacaccaagaaggccggcaagacaggccccatgaaaaccctgctggttagagtgatgacacccgatctgagagagcggctggaaaacctgagaaagaagcctgaaaatatcccccagcccatcagcaatacatctagagccaacctgaataagctgctgaccgattacaccgaaatgaagaaggcgatcctgcatgtgtactgggaagagttccagaaggaccctgtgggcctgatgagccgggtggcccagcctgccagcaagaagatcgatcagaacaagctgaaacctgagatggacgagaagggcaacctgaccaccgccggctttgcctgctctcagtgtggccagcccctgttcgtgtacaagctggagcaggtgtctgagaagggcaaggcttacaccaactacttcggacggtgcaatgtggccgagcacgaaaagctgatcctgctggcccagctgaagcccgagaaggatagcgacgaagccgtgacatatagcctgggaaagtttgggcagagggccctggatttctacagcattcatgtgaccaaggagtccacccaccccgtgaagcccctggcccagatcgccggaaacagatacgcctccggacctgtgggaaaggccctgagcgacgcatgtatgggcacaatcgcctccttcctgtctaagtaccaggacatcatcatcgaacaccagaaggtggtgaagggcaaccagaagagactggagagcctgcgggagctggccggcaaggaaaacctggaataccctagcgtgaccctgccacctcagcctcacaccaaggagggcgttgatgcctacaacgaagtgatcgcccgggtgcgaatgtgggtgaacctgaacctgtggcagaagctgaagctaagcagagatgatgccaagcctctgctgagactgaagggattcccttcctttcctctggtcgagagacaggccaacgaagtggactggtgggacatggtgtgtaacgtgaagaagctgatcaacgagaaaaaggaggatggcaaggtgttttggcagaatctggctggctacaagagacaggaagccctgagaccatacctgagcagcgaggaagatcggaagaagggaaagaaattcgctcggtaccagctgggcgacctgctgctgcacctggaaaagaagcacggcgaggactggggaaaggtgtacgacgaggcctgggagcggattgacaagaaagtggaaggcctgagcaagcacatcaagctggaagaggaacggagaagcgaggacgcccagagcaaggccgccctgaccgactggctgcgggctaaggccagcttcgtgatcgagggcctgaaggaggccgacaaggacgagttctgcagatgcgagctgaagctgcagaagtggtacggggacctgcggggaaagcccttcgccatcgaagccgagaacagcatcctggacatcagcggcttcagcaagcagtacaactgtgccttcatctggcagaaggacggcgtgaagaagctgaacctgtacctgatcatcaactacttcaagggcggcaagctgcggttcaagaagatcaaacctgaagccttcgaagccaacagattctacaccgtgatcaacaaaaagagcggcgagatcgtgcccatggaggtgaacttcaacttcgacgaccccaacctgatcatcctgcctctggcctttggcaagagacagggcagagaattcatctggaacgacctgctgtccctggaaaccggcagcctgaagctggccaacggaagagtgatcgagaagacactgtacaacagaagaacccggcaggatgagcctgccctgttcgtggccctgaccttcgagcggcgggaggtcctggactcctccaatatcaaaccaatgaacctgatcggcgtggcaagaggcgaaaacatccccgccgtgatcgccctgaccgaccccgagggctgcccactgagccggtttaaggatagcctgggaaacccaacccacatcctgagaatcggcgagagctataaggagaagcagcggaccatccaggccaagaaggaggtggagcagcggagagccggcggctacagccggaagtacgccagcaaagccaagaatctggcagacgatatggtgagaaacaccgctagagatctgctgtactacgccgtgacccaggatgccatgctgatcttcgccaacctgagccggggcttcggccggcagggcaagcggaccttcatggccgagagacagtacacacggatggaggactggctgaccgccaagctggcctacgagggcctgagcaagacctacctgtccaagacactggcccagtacacctccaagacatgcagcaactgtgggtttaccatcaccagcgccgactacgacagggtgctggagaagctgaagaagacagcaacaggctggatgaccacaattaacggcaaggagctgaaggtggagggccagattacctactacaacagatacaagagacagaacgtagtcaaggacctgtccgtcgagctggatagactgagcgaagaatctgtgaacaacgacatctcctcctggacaaagggcagaagcggagaagctctgagcctcctgaagaaaagattctcccatagacccgtgcaggagaagttcgtgtgcctgaactgcggcttcgagacacacgcagccgagcaagccgccctgaacatcgccagatcctggctgttcctgcggagccaggagtacaagaaataccagacaaacaagacaaccggcaacaccgataagagagccttcgtcgagacctggcagtccttttaccggaagaagcttaaggaggtgtggaaacctgccgtgcggtctggcggatctggcggaggctccaccagccccaagaaaaagagaaaagtctaagctgccttctgcggggcttgccttctggccatgcccttcttctctcccttgcacctgtacctcttggtctttgaataaagcctgagtaggaaggctagcaaaaaaaaaaaaaaaaaaaaaaaaaaaaaaaaaaaaaaaaaaaaaaaaaaaaaaaaaaaaaaaaaaaaaaaaaaaaaaaa

SEQ ID NO: 13046 - RNA, 5785 nt, synthetic construct
  source 1..5785: mol_type = other RNA
aggaaataagagagaaaagaagagtaagaagaaatataagagccaccatggcccctaagaagaagcgtaaagtgagccggatggaacgcctcgtctacgaggtgcggcagaagtgcagaaacatcgaggacatctgcatctcctgcggatctctgaacgtgaccctggagcacccactgttcatcggcggcatgtgccagaactgtaaaaactgttttctggagtgtgcctatcaatacgacgatgacggctaccagagctactgcaccatctgttgcggcggaagagaggtgctgatgtgtggaaataacaactgctgccggtgcttctgcgtggaatgcgtggacctgctggtgggccccggcgccgcccaggccgctattaaggaagatccttggaactgctacatgtgcggccacaagggcacatacggcctgctgagacggagagaggactggcctagcagactgcagatgttcttcgccaataaccacgaccaggagttcgacccccctaaggtgtaccctcccgtccccgccgagaagagaaagcccatccgggtcctgagcctgttcgatggcatcgccaccggtctgctggtgctgaaggacctgggcatccaggtggataggtacattgcctccgaggtgtgcgaggactccatcaccgtgggaatggtgcgtcatcagggcaagatcatgtacgtgggcgacgtgcggagcgtgacacagaagcatatccaggagtggggccctttcgacctggtgatcggcggcagcccttgcaatgacctgagcatcgtgaacccagcccggaagggcctgtacgagggaaccggcagactgttcttcgagttttacagactgctgcacgacgcccggcctaaggaaggcgacgaccggcccttcttttggctgttcgagaatgtggtggccatgggagtcagcgacaagcgggatattagccggttcctggagagcaaccccgtgatgatcgatgccaaggaagtgagcgccgcccaccgggccagatacttctggggcaatctgcctggcatgaacagacccctggccagcaccgtgaacgacaagctggagctgcaggagtgcctggagcacggccggatcgccaagttcagcaaggtgagaaccatcaccacccgaagcaacagcatcaaacaaggcaaggaccagcactttcctgtgttcatgaacgagaaggaggacatcctgtggtgtaccgagatggagagagtgttcgggttcccagtccactacacagatgtcagcaacatgtctagactggccagacagagactgctgggaagaagctggtccgtccctgtgatcagacacctgttcgcccctctgaaggagtacttcgcctgcgtgagcagcggcaacagcaacgccaacagccggggccccagcttctctagcggcctggtgccactgtccctgagagggagccacatgggccccatggagatctacaaaaccgtgagcgcctggaagcggcagcctgtgcgcgtgctgagcctgtttcggaatatcgataaagtcctgaaaagcctgggattcctggagagcggctctggctccggcggtggcaccctgaagtacgtggaggatgtgacaaacgtggtcagacgggatgtggagaagtggggccccttcgatctggtgtacggcagcacccaacccctgggcagctcttgtgaccggtgccctggctggtacatgtttcagttccaccggatcctgcagtacgccctgccgagacaggagtcccagcggccattcttttggattttcatggacaacttgctgctgaccgaggatgaccaggaaactaccactcggttcctgcagaccgaagccgtgaccctgcaggacgtgagaggccgggactaccagaacgccatgcgggtgtggtccaacatccctggactgaaaagcaagcacgcacctctgacccctaaagaagaggagtacctgcaggcccaggtgcggagcagaagcaagctggacgcccctaaggtggatctgctggtgaagaattgcctcctgcccctgagagagtacttcaagtatttcagccagaatagtctgcccctgggaggcagcggcggcggcatggtgagcttcgaggacgtggccgtgcccctgagccaggaggagtggaactgcctgatccccgcccagaggggcctgtacagggacgtgatgctggagacctacggcaacctggtgagcctgggcctgcaggccagcaagcccgacgtgatcagcaggctggagcagggcgacgagccctggaccccccacatcctgaggacccagggcagctggagctggaggcacaagagggagggctacggcggcccaagcagcggcgcccctcctcccagcggcggcagcccagccggctccccaacctctaccgaggagggcacctctgagtccgccacccccgagagcggccctggcacctccaccgagcccagcgagggcagcgcacccggcagccctgccggcagccccacctccacagaggagggaaccagcaccgagcccagcgaaggcagcgccccaggcaccagcaccgagcctagtgagcaggagattaaacggatcaacaagatcagaagaagacttgtgaaagacagcaacaccaagaaggccggcaagacaggccccatgaaaaccctgctggttagagtgatgacacccgatctgagagagcggctggaaaacctgagaaagaagcctgaaaatatcccccagcccatcagcaatacatctagagccaacctgaataagctgctgaccgattacaccgaaatgaagaaggcgatcctgcatgtgtactgggaagagttccagaaggaccctgtgggcctgatgagccgggtggcccagcctgccagcaagaagatcgatcagaacaagctgaaacctgagatggacgagaagggcaacctgaccaccgccggctttgcctgctctcagtgtggccagcccctgttcgtgtacaagctggagcaggtgtctgagaagggcaaggcttacaccaactacttcggacggtgcaatgtggccgagcacgaaaagctgatcctgctggcccagctgaagcccgagaaggatagcgacgaagccgtgacatatagcctgggaaagtttgggcagagggccctggatttctacagcattcatgtgaccaaggagtccacccaccccgtgaagcccctggcccagatcgccggaaacagatacgcctccggacctgtgggaaaggccctgagcgacgcatgtatgggcacaatcgcctccttcctgtctaagtaccaggacatcatcatcgaacaccagaaggtggtgaagggcaaccagaagagactggagagcctgcgggagctggccggcaaggaaaacctggaataccctagcgtgaccctgccacctcagcctcacaccaaggagggcgttgatgcctacaacgaagtgatcgcccgggtgcgaatgtgggtgaacctgaacctgtggcagaagctgaagctaagcagagatgatgccaagcctctgctgagactgaagggattcccttcctttcctctggtcgagagacaggccaacgaagtggactggtgggacatggtgtgtaacgtgaagaagctgatcaacgagaaaaaggaggatggcaaggtgttttggcagaatctggctggctacaagagacaggaagccctgagaccatacctgagcagcgaggaagatcggaagaagggaaagaaattcgctcggtaccagctgggcgacctgctgctgcacctggaaaagaagcacggcgaggactggggaaaggtgtacgacgaggcctgggagcggattgacaagaaagtggaaggcctgagcaagcacatcaagctggaagaggaacggagaagcgaggacgcccagagcaaggccgccctgaccgactggctgcgggctaaggccagcttcgtgatcgagggcctgaaggaggccgacaaggacgagttctgcagatgcgagctgaagctgcagaagtggtacggggacctgcggggaaagcccttcgccatcgaagccgagaacagcatcctggacatcagcggcttcagcaagcagtacaactgtgccttcatctggcagaaggacggcgtgaagaagctgaacctgtacctgatcatcaactacttcaagggcggcaagctgcggttcaagaagatcaaacctgaagccttcgaagccaacagattctacaccgtgatcaacaaaaagagcggcgagatcgtgcccatggaggtgaacttcaacttcgacgaccccaacctgatcatcctgcctctggcctttggcaagagacagggcagagaattcatctggaacgacctgctgtccctggaaaccggcagcctgaagctggccaacggaagagtgatcgagaagacactgtacaacagaagaacccggcaggatgagcctgccctgttcgtggccctgaccttcgagcggcgggaggtcctggactcctccaatatcaaaccaatgaacctgatcggcgtggcaagaggcgaaaacatccccgccgtgatcgccctgaccgaccccgagggctgcccactgagccggtttaaggatagcctgggaaacccaacccacatcctgagaatcggcgagagctataaggagaagcagcggaccatccaggccaagaaggaggtggagcagcggagagccggcggctacagccggaagtacgccagcaaagccaagaatctggcagacgatatggtgagaaacaccgctagagatctgctgtactacgccgtgacccaggatgccatgctgatcttcgccaacctgagccggggcttcggccggcagggcaagcggaccttcatggccgagagacagtacacacggatggaggactggctgaccgccaagctggcctacgagggcctgagcaagacctacctgtccaagacactggcccagtacacctccaagacatgcagcaactgtgggtttaccatcaccagcgccgactacgacagggtgctggagaagctgaagaagacagcaacaggctggatgaccacaattaacggcaaggagctgaaggtggagggccagattacctactacaacagatacaagagacagaacgtagtcaaggacctgtccgtcgagctggatagactgagcgaagaatctgtgaacaacgacatctcctcctggacaaagggcagaagcggagaagctctgagcctcctgaagaaaagattctcccatagacccgtgcaggagaagttcgtgtgcctgaactgcggcttcgagacacacgcagccgagcaagccgccctgaacatcgccagatcctggctgttcctgcggagccaggagtacaagaaataccagacaaacaagacaaccggcaacaccgataagagagccttcgtcgagacctggcagtccttttaccggaagaagcttaaggaggtgtggaaacctgccgtgcggtctggcggatctggcggaggctccaccagccccaagaaaaagagaaaagtctaagctgccttctgcggggcttgccttctggccatgcccttcttctctcccttgcacctgtacctcttggtctttgaataaagcctgagtaggaaggctagcaaaaaaaaaaaaaaaaaaaaaaaaaaaaaaaaaaaaaaaaaaaaaaaaaaaaaaaaaaaaaaaaaaaaaaaaaaaaaaaa

SEQ ID NO: 13047 - RNA, 5785 nt, synthetic construct
  source 1..5785: mol_type = other RNA
aggaaataagagagaaaagaagagtaagaagaaatataagagccaccatggcccctaagaagaagcgtaaagtgagccggatggaacgcctcgtctacgaggtgcggcagaagtgcagaaacatcgaggacatctgcatctcctgcggatctctgaacgtgaccctggagcacccactgttcatcggcggcatgtgccagaactgtaaaaactgttttctggagtgtgcctatcaatacgacgatgacggctaccagagctactgcaccatctgttgcggcggaagagaggtgctgatgtgtggaaataacaactgctgccggtgcttctgcgtggaatgcgtggacctgctggtgggccccggcgccgcccaggccgctattaaggaagatccttggaactgctacatgtgcggccacaagggcacatacggcctgctgagacggagagaggactggcctagcagactgcagatgttcttcgccaataaccacgaccaggagttcgacccccctaaggtgtaccctcccgtccccgccgagaagagaaagcccatccgggtcctgagcctgttcgatggcatcgccaccggtctgctggtgctgaaggacctgggcatccaggtggataggtacattgcctccgaggtgtgcgaggactccatcaccgtgggaatggtgcgtcatcagggcaagatcatgtacgtgggcgacgtgcggagcgtgacacagaagcatatccaggagtggggccctttcgacctggtgatcggcggcagcccttgcaatgacctgagcatcgtgaacccagcccggaagggcctgtacgagggaaccggcagactgttcttcgagttttacagactgctgcacgacgcccggcctaaggaaggcgacgaccggcccttcttttggctgttcgagaatgtggtggccatgggagtcagcgacaagcgggatattagccggttcctggagagcaaccccgtgatgatcgatgccaaggaagtgagcgccgcccaccgggccagatacttctggggcaatctgcctggcatgaacagacccctggccagcaccgtgaacgacaagctggagctgcaggagtgcctggagcacggccggatcgccaagttcagcaaggtgagaaccatcaccacccgaagcaacagcatcaaacaaggcaaggaccagcactttcctgtgttcatgaacgagaaggaggacatcctgtggtgtaccgagatggagagagtgttcgggttcccagtccactacacagatgtcagcaacatgtctagactggccagacagagactgctgggaagaagctggtccgtccctgtgatcagacacctgttcgcccctctgaaggagtacttcgcctgcgtgagcagcggcaacagcaacgccaacagccggggccccagcttctctagcggcctggtgccactgtccctgagagggagccacatgggccccatggagatctacaaaaccgtgagcgcctggaagcggcagcctgtgcgcgtgctgagcctgtttcggaatatcgataaagtcctgaaaagcctgggattcctggagagcggctctggctccggcggtggcaccctgaagtacgtggaggatgtgacaaacgtggtcagacgggatgtggagaagtggggccccttcgatctggtgtacggcagcacccaacccctgggcagctcttgtgaccggtgccctggctggtacatgtttcagttccaccggatcctgcagtacgccctgccgagacaggagtcccagcggccattcttttggattttcatggacaacttgctgctgaccgaggatgaccaggaaactaccactcggttcctgcagaccgaagccgtgaccctgcaggacgtgagaggccgggactaccagaacgccatgcgggtgtggtccaacatccctggactgaaaagcaagcacgcacctctgacccctaaagaagaggagtacctgcaggcccaggtgcggagcagaagcaagctggacgcccctaaggtggatctgctggtgaagaattgcctcctgcccctgagagagtacttcaagtatttcagccagaatagtctgcccctgggaggcagcggcggcggcagccagatccccctgaccttccaggacgtggccgtggacttcacctgggaggagtggggcctgctggagcccagccagaaggacatgtactgggacgtgatgctggagatctacgagaacttcatcagcctgggcggcgtgcccctgagcatccccgacgtgatcagccagctggagaggatggaggccccctggatgacccagggcggcgtgctgatcagcaccttcctggacagcagcaccggcggcccaagcagcggcgcccctcctcccagcggcggcagcccagccggctccccaacctctaccgaggagggcacctctgagtccgccacccccgagagcggccctggcacctccaccgagcccagcgagggcagcgcacccggcagccctgccggcagccccacctccacagaggagggaaccagcaccgagcccagcgaaggcagcgccccaggcaccagcaccgagcctagtgagcaggagattaaacggatcaacaagatcagaagaagacttgtgaaagacagcaacaccaagaaggccggcaagacaggccccatgaaaaccctgctggttagagtgatgacacccgatctgagagagcggctggaaaacctgagaaagaagcctgaaaatatcccccagcccatcagcaatacatctagagccaacctgaataagctgctgaccgattacaccgaaatgaagaaggcgatcctgcatgtgtactgggaagagttccagaaggaccctgtgggcctgatgagccgggtggcccagcctgccagcaagaagatcgatcagaacaagctgaaacctgagatggacgagaagggcaacctgaccaccgccggctttgcctgctctcagtgtggccagcccctgttcgtgtacaagctggagcaggtgtctgagaagggcaaggcttacaccaactacttcggacggtgcaatgtggccgagcacgaaaagctgatcctgctggcccagctgaagcccgagaaggatagcgacgaagccgtgacatatagcctgggaaagtttgggcagagggccctggatttctacagcattcatgtgaccaaggagtccacccaccccgtgaagcccctggcccagatcgccggaaacagatacgcctccggacctgtgggaaaggccctgagcgacgcatgtatgggcacaatcgcctccttcctgtctaagtaccaggacatcatcatcgaacaccagaaggtggtgaagggcaaccagaagagactggagagcctgcgggagctggccggcaaggaaaacctggaataccctagcgtgaccctgccacctcagcctcacaccaaggagggcgttgatgcctacaacgaagtgatcgcccgggtgcgaatgtgggtgaacctgaacctgtggcagaagctgaagctaagcagagatgatgccaagcctctgctgagactgaagggattcccttcctttcctctggtcgagagacaggccaacgaagtggactggtgggacatggtgtgtaacgtgaagaagctgatcaacgagaaaaaggaggatggcaaggtgttttggcagaatctggctggctacaagagacaggaagccctgagaccatacctgagcagcgaggaagatcggaagaagggaaagaaattcgctcggtaccagctgggcgacctgctgctgcacctggaaaagaagcacggcgaggactggggaaaggtgtacgacgaggcctgggagcggattgacaagaaagtggaaggcctgagcaagcacatcaagctggaagaggaacggagaagcgaggacgcccagagcaaggccgccctgaccgactggctgcgggctaaggccagcttcgtgatcgagggcctgaaggaggccgacaaggacgagttctgcagatgcgagctgaagctgcagaagtggtacggggacctgcggggaaagcccttcgccatcgaagccgagaacagcatcctggacatcagcggcttcagcaagcagtacaactgtgccttcatctggcagaaggacggcgtgaagaagctgaacctgtacctgatcatcaactacttcaagggcggcaagctgcggttcaagaagatcaaacctgaagccttcgaagccaacagattctacaccgtgatcaacaaaaagagcggcgagatcgtgcccatggaggtgaacttcaacttcgacgaccccaacctgatcatcctgcctctggcctttggcaagagacagggcagagaattcatctggaacgacctgctgtccctggaaaccggcagcctgaagctggccaacggaagagtgatcgagaagacactgtacaacagaagaacccggcaggatgagcctgccctgttcgtggccctgaccttcgagcggcgggaggtcctggactcctccaatatcaaaccaatgaacctgatcggcgtggcaagaggcgaaaacatccccgccgtgatcgccctgaccgaccccgagggctgcccactgagccggtttaaggatagcctgggaaacccaacccacatcctgagaatcggcgagagctataaggagaagcagcggaccatccaggccaagaaggaggtggagcagcggagagccggcggctacagccggaagtacgccagcaaagccaagaatctggcagacgatatggtgagaaacaccgctagagatctgctgtactacgccgtgacccaggatgccatgctgatcttcgccaacctgagccggggcttcggccggcagggcaagcggaccttcatggccgagagacagtacacacggatggaggactggctgaccgccaagctggcctacgagggcctgagcaagacctacctgtccaagacactggcccagtacacctccaagacatgcagcaactgtgggtttaccatcaccagcgccgactacgacagggtgctggagaagctgaagaagacagcaacaggctggatgaccacaattaacggcaaggagctgaaggtggagggccagattacctactacaacagatacaagagacagaacgtagtcaaggacctgtccgtcgagctggatagactgagcgaagaatctgtgaacaacgacatctcctcctggacaaagggcagaagcggagaagctctgagcctcctgaagaaaagattctcccatagacccgtgcaggagaagttcgtgtgcctgaactgcggcttcgagacacacgcagccgagcaagccgccctgaacatcgccagatcctggctgttcctgcggagccaggagtacaagaaataccagacaaacaagacaaccggcaacaccgataagagagccttcgtcgagacctggcagtccttttaccggaagaagcttaaggaggtgtggaaacctgccgtgcggtctggcggatctggcggaggctccaccagccccaagaaaaagagaaaagtctaagctgccttctgcggggcttgccttctggccatgcccttcttctctcccttgcacctgtacctcttggtctttgaataaagcctgagtaggaaggctagcaaaaaaaaaaaaaaaaaaaaaaaaaaaaaaaaaaaaaaaaaaaaaaaaaaaaaaaaaaaaaaaaaaaaaaaaaaaaaaaa

SEQ ID NO: 13048 - RNA, 5785 nt, synthetic construct
  source 1..5785: mol_type = other RNA
aggaaataagagagaaaagaagagtaagaagaaatataagagccaccatggcccctaagaagaagcgtaaagtgagccggatggaacgcctcgtctacgaggtgcggcagaagtgcagaaacatcgaggacatctgcatctcctgcggatctctgaacgtgaccctggagcacccactgttcatcggcggcatgtgccagaactgtaaaaactgttttctggagtgtgcctatcaatacgacgatgacggctaccagagctactgcaccatctgttgcggcggaagagaggtgctgatgtgtggaaataacaactgctgccggtgcttctgcgtggaatgcgtggacctgctggtgggccccggcgccgcccaggccgctattaaggaagatccttggaactgctacatgtgcggccacaagggcacatacggcctgctgagacggagagaggactggcctagcagactgcagatgttcttcgccaataaccacgaccaggagttcgacccccctaaggtgtaccctcccgtccccgccgagaagagaaagcccatccgggtcctgagcctgttcgatggcatcgccaccggtctgctggtgctgaaggacctgggcatccaggtggataggtacattgcctccgaggtgtgcgaggactccatcaccgtgggaatggtgcgtcatcagggcaagatcatgtacgtgggcgacgtgcggagcgtgacacagaagcatatccaggagtggggccctttcgacctggtgatcggcggcagcccttgcaatgacctgagcatcgtgaacccagcccggaagggcctgtacgagggaaccggcagactgttcttcgagttttacagactgctgcacgacgcccggcctaaggaaggcgacgaccggcccttcttttggctgttcgagaatgtggtggccatgggagtcagcgacaagcgggatattagccggttcctggagagcaaccccgtgatgatcgatgccaaggaagtgagcgccgcccaccgggccagatacttctggggcaatctgcctggcatgaacagacccctggccagcaccgtgaacgacaagctggagctgcaggagtgcctggagcacggccggatcgccaagttcagcaaggtgagaaccatcaccacccgaagcaacagcatcaaacaaggcaaggaccagcactttcctgtgttcatgaacgagaaggaggacatcctgtggtgtaccgagatggagagagtgttcgggttcccagtccactacacagatgtcagcaacatgtctagactggccagacagagactgctgggaagaagctggtccgtccctgtgatcagacacctgttcgcccctctgaaggagtacttcgcctgcgtgagcagcggcaacagcaacgccaacagccggggccccagcttctctagcggcctggtgccactgtccctgagagggagccacatgggccccatggagatctacaaaaccgtgagcgcctggaagcggcagcctgtgcgcgtgctgagcctgtttcggaatatcgataaagtcctgaaaagcctgggattcctggagagcggctctggctccggcggtggcaccctgaagtacgtggaggatgtgacaaacgtggtcagacgggatgtggagaagtggggccccttcgatctggtgtacggcagcacccaacccctgggcagctcttgtgaccggtgccctggctggtacatgtttcagttccaccggatcctgcagtacgccctgccgagacaggagtcccagcggccattcttttggattttcatggacaacttgctgctgaccgaggatgaccaggaaactaccactcggttcctgcagaccgaagccgtgaccctgcaggacgtgagaggccgggactaccagaacgccatgcgggtgtggtccaacatccctggactgaaaagcaagcacgcacctctgacccctaaagaagaggagtacctgcaggcccaggtgcggagcagaagcaagctggacgcccctaaggtggatctgctggtgaagaattgcctcctgcccctgagagagtacttcaagtatttcagccagaatagtctgcccctgggaggcagcggcggcggcgcccaggagagcgtgatgttcagcgacgtgagcatcgacttcagccaggaggagtgggagtgcctgaacgacgaccagagggacctgtacagggacgtgatgctggagaactacagcaacctggtgagcatggccggccacagcatcagcaagcccaacgtgatcagctacctggagcagggcaaggagccctggctggtggacagggagatcaccagcggccagtggcccgtgctggagagcggcggcccaagcagcggcgcccctcctcccagcggcggcagcccagccggctccccaacctctaccgaggagggcacctctgagtccgccacccccgagagcggccctggcacctccaccgagcccagcgagggcagcgcacccggcagccctgccggcagccccacctccacagaggagggaaccagcaccgagcccagcgaaggcagcgccccaggcaccagcaccgagcctagtgagcaggagattaaacggatcaacaagatcagaagaagacttgtgaaagacagcaacaccaagaaggccggcaagacaggccccatgaaaaccctgctggttagagtgatgacacccgatctgagagagcggctggaaaacctgagaaagaagcctgaaaatatcccccagcccatcagcaatacatctagagccaacctgaataagctgctgaccgattacaccgaaatgaagaaggcgatcctgcatgtgtactgggaagagttccagaaggaccctgtgggcctgatgagccgggtggcccagcctgccagcaagaagatcgatcagaacaagctgaaacctgagatggacgagaagggcaacctgaccaccgccggctttgcctgctctcagtgtggccagcccctgttcgtgtacaagctggagcaggtgtctgagaagggcaaggcttacaccaactacttcggacggtgcaatgtggccgagcacgaaaagctgatcctgctggcccagctgaagcccgagaaggatagcgacgaagccgtgacatatagcctgggaaagtttgggcagagggccctggatttctacagcattcatgtgaccaaggagtccacccaccccgtgaagcccctggcccagatcgccggaaacagatacgcctccggacctgtgggaaaggccctgagcgacgcatgtatgggcacaatcgcctccttcctgtctaagtaccaggacatcatcatcgaacaccagaaggtggtgaagggcaaccagaagagactggagagcctgcgggagctggccggcaaggaaaacctggaataccctagcgtgaccctgccacctcagcctcacaccaaggagggcgttgatgcctacaacgaagtgatcgcccgggtgcgaatgtgggtgaacctgaacctgtggcagaagctgaagctaagcagagatgatgccaagcctctgctgagactgaagggattcccttcctttcctctggtcgagagacaggccaacgaagtggactggtgggacatggtgtgtaacgtgaagaagctgatcaacgagaaaaaggaggatggcaaggtgttttggcagaatctggctggctacaagagacaggaagccctgagaccatacctgagcagcgaggaagatcggaagaagggaaagaaattcgctcggtaccagctgggcgacctgctgctgcacctggaaaagaagcacggcgaggactggggaaaggtgtacgacgaggcctgggagcggattgacaagaaagtggaaggcctgagcaagcacatcaagctggaagaggaacggagaagcgaggacgcccagagcaaggccgccctgaccgactggctgcgggctaaggccagcttcgtgatcgagggcctgaaggaggccgacaaggacgagttctgcagatgcgagctgaagctgcagaagtggtacggggacctgcggggaaagcccttcgccatcgaagccgagaacagcatcctggacatcagcggcttcagcaagcagtacaactgtgccttcatctggcagaaggacggcgtgaagaagctgaacctgtacctgatcatcaactacttcaagggcggcaagctgcggttcaagaagatcaaacctgaagccttcgaagccaacagattctacaccgtgatcaacaaaaagagcggcgagatcgtgcccatggaggtgaacttcaacttcgacgaccccaacctgatcatcctgcctctggcctttggcaagagacagggcagagaattcatctggaacgacctgctgtccctggaaaccggcagcctgaagctggccaacggaagagtgatcgagaagacactgtacaacagaagaacccggcaggatgagcctgccctgttcgtggccctgaccttcgagcggcgggaggtcctggactcctccaatatcaaaccaatgaacctgatcggcgtggcaagaggcgaaaacatccccgccgtgatcgccctgaccgaccccgagggctgcccactgagccggtttaaggatagcctgggaaacccaacccacatcctgagaatcggcgagagctataaggagaagcagcggaccatccaggccaagaaggaggtggagcagcggagagccggcggctacagccggaagtacgccagcaaagccaagaatctggcagacgatatggtgagaaacaccgctagagatctgctgtactacgccgtgacccaggatgccatgctgatcttcgccaacctgagccggggcttcggccggcagggcaagcggaccttcatggccgagagacagtacacacggatggaggactggctgaccgccaagctggcctacgagggcctgagcaagacctacctgtccaagacactggcccagtacacctccaagacatgcagcaactgtgggtttaccatcaccagcgccgactacgacagggtgctggagaagctgaagaagacagcaacaggctggatgaccacaattaacggcaaggagctgaaggtggagggccagattacctactacaacagatacaagagacagaacgtagtcaaggacctgtccgtcgagctggatagactgagcgaagaatctgtgaacaacgacatctcctcctggacaaagggcagaagcggagaagctctgagcctcctgaagaaaagattctcccatagacccgtgcaggagaagttcgtgtgcctgaactgcggcttcgagacacacgcagccgagcaagccgccctgaacatcgccagatcctggctgttcctgcggagccaggagtacaagaaataccagacaaacaagacaaccggcaacaccgataagagagccttcgtcgagacctggcagtccttttaccggaagaagcttaaggaggtgtggaaacctgccgtgcggtctggcggatctggcggaggctccaccagccccaagaaaaagagaaaagtctaagctgccttctgcggggcttgccttctggccatgcccttcttctctcccttgcacctgtacctcttggtctttgaataaagcctgagtaggaaggctagcaaaaaaaaaaaaaaaaaaaaaaaaaaaaaaaaaaaaaaaaaaaaaaaaaaaaaaaaaaaaaaaaaaaaaaaaaaaaaaaa

SEQ ID NO: 13049 - RNA, 5785 nt, synthetic construct
  source 1..5785: mol_type = other RNA
aggaaataagagagaaaagaagagtaagaagaaatataagagccaccatggcccctaagaagaagcgtaaagtgagccggatggaacgcctcgtctacgaggtgcggcagaagtgcagaaacatcgaggacatctgcatctcctgcggatctctgaacgtgaccctggagcacccactgttcatcggcggcatgtgccagaactgtaaaaactgttttctggagtgtgcctatcaatacgacgatgacggctaccagagctactgcaccatctgttgcggcggaagagaggtgctgatgtgtggaaataacaactgctgccggtgcttctgcgtggaatgcgtggacctgctggtgggccccggcgccgcccaggccgctattaaggaagatccttggaactgctacatgtgcggccacaagggcacatacggcctgctgagacggagagaggactggcctagcagactgcagatgttcttcgccaataaccacgaccaggagttcgacccccctaaggtgtaccctcccgtccccgccgagaagagaaagcccatccgggtcctgagcctgttcgatggcatcgccaccggtctgctggtgctgaaggacctgggcatccaggtggataggtacattgcctccgaggtgtgcgaggactccatcaccgtgggaatggtgcgtcatcagggcaagatcatgtacgtgggcgacgtgcggagcgtgacacagaagcatatccaggagtggggccctttcgacctggtgatcggcggcagcccttgcaatgacctgagcatcgtgaacccagcccggaagggcctgtacgagggaaccggcagactgttcttcgagttttacagactgctgcacgacgcccggcctaaggaaggcgacgaccggcccttcttttggctgttcgagaatgtggtggccatgggagtcagcgacaagcgggatattagccggttcctggagagcaaccccgtgatgatcgatgccaaggaagtgagcgccgcccaccgggccagatacttctggggcaatctgcctggcatgaacagacccctggccagcaccgtgaacgacaagctggagctgcaggagtgcctggagcacggccggatcgccaagttcagcaaggtgagaaccatcaccacccgaagcaacagcatcaaacaaggcaaggaccagcactttcctgtgttcatgaacgagaaggaggacatcctgtggtgtaccgagatggagagagtgttcgggttcccagtccactacacagatgtcagcaacatgtctagactggccagacagagactgctgggaagaagctggtccgtccctgtgatcagacacctgttcgcccctctgaaggagtacttcgcctgcgtgagcagcggcaacagcaacgccaacagccggggccccagcttctctagcggcctggtgccactgtccctgagagggagccacatgggccccatggagatctacaaaaccgtgagcgcctggaagcggcagcctgtgcgcgtgctgagcctgtttcggaatatcgataaagtcctgaaaagcctgggattcctggagagcggctctggctccggcggtggcaccctgaagtacgtggaggatgtgacaaacgtggtcagacgggatgtggagaagtggggccccttcgatctggtgtacggcagcacccaacccctgggcagctcttgtgaccggtgccctggctggtacatgtttcagttccaccggatcctgcagtacgccctgccgagacaggagtcccagcggccattcttttggattttcatggacaacttgctgctgaccgaggatgaccaggaaactaccactcggttcctgcagaccgaagccgtgaccctgcaggacgtgagaggccgggactaccagaacgccatgcgggtgtggtccaacatccctggactgaaaagcaagcacgcacctctgacccctaaagaagaggagtacctgcaggcccaggtgcggagcagaagcaagctggacgcccctaaggtggatctgctggtgaagaattgcctcctgcccctgagagagtacttcaagtatttcagccagaatagtctgcccctgggaggcagcggcggcggcatggccctggtgaccttcagggacgtggccatcgacttcagccagaaggagtgggagtgcctggacaccacccagaggaagctgtacagggacgtgatgctggagaactacaacaacctggtgagcctgggctacagcggcagcaagcccgacgtgatcaccctgctggagcagggcaaggagccctgcgtggccgccagggacgtgaccggcaggcagtgccccggcctgctgagcaggcacggcggcccaagcagcggcgcccctcctcccagcggcggcagcccagccggctccccaacctctaccgaggagggcacctctgagtccgccacccccgagagcggccctggcacctccaccgagcccagcgagggcagcgcacccggcagccctgccggcagccccacctccacagaggagggaaccagcaccgagcccagcgaaggcagcgccccaggcaccagcaccgagcctagtgagcaggagattaaacggatcaacaagatcagaagaagacttgtgaaagacagcaacaccaagaaggccggcaagacaggccccatgaaaaccctgctggttagagtgatgacacccgatctgagagagcggctggaaaacctgagaaagaagcctgaaaatatcccccagcccatcagcaatacatctagagccaacctgaataagctgctgaccgattacaccgaaatgaagaaggcgatcctgcatgtgtactgggaagagttccagaaggaccctgtgggcctgatgagccgggtggcccagcctgccagcaagaagatcgatcagaacaagctgaaacctgagatggacgagaagggcaacctgaccaccgccggctttgcctgctctcagtgtggccagcccctgttcgtgtacaagctggagcaggtgtctgagaagggcaaggcttacaccaactacttcggacggtgcaatgtggccgagcacgaaaagctgatcctgctggcccagctgaagcccgagaaggatagcgacgaagccgtgacatatagcctgggaaagtttgggcagagggccctggatttctacagcattcatgtgaccaaggagtccacccaccccgtgaagcccctggcccagatcgccggaaacagatacgcctccggacctgtgggaaaggccctgagcgacgcatgtatgggcacaatcgcctccttcctgtctaagtaccaggacatcatcatcgaacaccagaaggtggtgaagggcaaccagaagagactggagagcctgcgggagctggccggcaaggaaaacctggaataccctagcgtgaccctgccacctcagcctcacaccaaggagggcgttgatgcctacaacgaagtgatcgcccgggtgcgaatgtgggtgaacctgaacctgtggcagaagctgaagctaagcagagatgatgccaagcctctgctgagactgaagggattcccttcctttcctctggtcgagagacaggccaacgaagtggactggtgggacatggtgtgtaacgtgaagaagctgatcaacgagaaaaaggaggatggcaaggtgttttggcagaatctggctggctacaagagacaggaagccctgagaccatacctgagcagcgaggaagatcggaagaagggaaagaaattcgctcggtaccagctgggcgacctgctgctgcacctggaaaagaagcacggcgaggactggggaaaggtgtacgacgaggcctgggagcggattgacaagaaagtggaaggcctgagcaagcacatcaagctggaagaggaacggagaagcgaggacgcccagagcaaggccgccctgaccgactggctgcgggctaaggccagcttcgtgatcgagggcctgaaggaggccgacaaggacgagttctgcagatgcgagctgaagctgcagaagtggtacggggacctgcggggaaagcccttcgccatcgaagccgagaacagcatcctggacatcagcggcttcagcaagcagtacaactgtgccttcatctggcagaaggacggcgtgaagaagctgaacctgtacctgatcatcaactacttcaagggcggcaagctgcggttcaagaagatcaaacctgaagccttcgaagccaacagattctacaccgtgatcaacaaaaagagcggcgagatcgtgcccatggaggtgaacttcaacttcgacgaccccaacctgatcatcctgcctctggcctttggcaagagacagggcagagaattcatctggaacgacctgctgtccctggaaaccggcagcctgaagctggccaacggaagagtgatcgagaagacactgtacaacagaagaacccggcaggatgagcctgccctgttcgtggccctgaccttcgagcggcgggaggtcctggactcctccaatatcaaaccaatgaacctgatcggcgtggcaagaggcgaaaacatccccgccgtgatcgccctgaccgaccccgagggctgcccactgagccggtttaaggatagcctgggaaacccaacccacatcctgagaatcggcgagagctataaggagaagcagcggaccatccaggccaagaaggaggtggagcagcggagagccggcggctacagccggaagtacgccagcaaagccaagaatctggcagacgatatggtgagaaacaccgctagagatctgctgtactacgccgtgacccaggatgccatgctgatcttcgccaacctgagccggggcttcggccggcagggcaagcggaccttcatggccgagagacagtacacacggatggaggactggctgaccgccaagctggcctacgagggcctgagcaagacctacctgtccaagacactggcccagtacacctccaagacatgcagcaactgtgggtttaccatcaccagcgccgactacgacagggtgctggagaagctgaagaagacagcaacaggctggatgaccacaattaacggcaaggagctgaaggtggagggccagattacctactacaacagatacaagagacagaacgtagtcaaggacctgtccgtcgagctggatagactgagcgaagaatctgtgaacaacgacatctcctcctggacaaagggcagaagcggagaagctctgagcctcctgaagaaaagattctcccatagacccgtgcaggagaagttcgtgtgcctgaactgcggcttcgagacacacgcagccgagcaagccgccctgaacatcgccagatcctggctgttcctgcggagccaggagtacaagaaataccagacaaacaagacaaccggcaacaccgataagagagccttcgtcgagacctggcagtccttttaccggaagaagcttaaggaggtgtggaaacctgccgtgcggtctggcggatctggcggaggctccaccagccccaagaaaaagagaaaagtctaagctgccttctgcggggcttgccttctggccatgcccttcttctctcccttgcacctgtacctcttggtctttgaataaagcctgagtaggaaggctagcaaaaaaaaaaaaaaaaaaaaaaaaaaaaaaaaaaaaaaaaaaaaaaaaaaaaaaaaaaaaaaaaaaaaaaaaaaaaaaaa

SEQ ID NO: 13050 - RNA, 5785 nt, synthetic construct
  source 1..5785: mol_type = other RNA
aggaaataagagagaaaagaagagtaagaagaaatataagagccaccatggcccctaagaagaagcgtaaagtgagccggatggaacgcctcgtctacgaggtgcggcagaagtgcagaaacatcgaggacatctgcatctcctgcggatctctgaacgtgaccctggagcacccactgttcatcggcggcatgtgccagaactgtaaaaactgttttctggagtgtgcctatcaatacgacgatgacggctaccagagctactgcaccatctgttgcggcggaagagaggtgctgatgtgtggaaataacaactgctgccggtgcttctgcgtggaatgcgtggacctgctggtgggccccggcgccgcccaggccgctattaaggaagatccttggaactgctacatgtgcggccacaagggcacatacggcctgctgagacggagagaggactggcctagcagactgcagatgttcttcgccaataaccacgaccaggagttcgacccccctaaggtgtaccctcccgtccccgccgagaagagaaagcccatccgggtcctgagcctgttcgatggcatcgccaccggtctgctggtgctgaaggacctgggcatccaggtggataggtacattgcctccgaggtgtgcgaggactccatcaccgtgggaatggtgcgtcatcagggcaagatcatgtacgtgggcgacgtgcggagcgtgacacagaagcatatccaggagtggggccctttcgacctggtgatcggcggcagcccttgcaatgacctgagcatcgtgaacccagcccggaagggcctgtacgagggaaccggcagactgttcttcgagttttacagactgctgcacgacgcccggcctaaggaaggcgacgaccggcccttcttttggctgttcgagaatgtggtggccatgggagtcagcgacaagcgggatattagccggttcctggagagcaaccccgtgatgatcgatgccaaggaagtgagcgccgcccaccgggccagatacttctggggcaatctgcctggcatgaacagacccctggccagcaccgtgaacgacaagctggagctgcaggagtgcctggagcacggccggatcgccaagttcagcaaggtgagaaccatcaccacccgaagcaacagcatcaaacaaggcaaggaccagcactttcctgtgttcatgaacgagaaggaggacatcctgtggtgtaccgagatggagagagtgttcgggttcccagtccactacacagatgtcagcaacatgtctagactggccagacagagactgctgggaagaagctggtccgtccctgtgatcagacacctgttcgcccctctgaaggagtacttcgcctgcgtgagcagcggcaacagcaacgccaacagccggggccccagcttctctagcggcctggtgccactgtccctgagagggagccacatgggccccatggagatctacaaaaccgtgagcgcctggaagcggcagcctgtgcgcgtgctgagcctgtttcggaatatcgataaagtcctgaaaagcctgggattcctggagagcggctctggctccggcggtggcaccctgaagtacgtggaggatgtgacaaacgtggtcagacgggatgtggagaagtggggccccttcgatctggtgtacggcagcacccaacccctgggcagctcttgtgaccggtgccctggctggtacatgtttcagttccaccggatcctgcagtacgccctgccgagacaggagtcccagcggccattcttttggattttcatggacaacttgctgctgaccgaggatgaccaggaaactaccactcggttcctgcagaccgaagccgtgaccctgcaggacgtgagaggccgggactaccagaacgccatgcgggtgtggtccaacatccctggactgaaaagcaagcacgcacctctgacccctaaagaagaggagtacctgcaggcccaggtgcggagcagaagcaagctggacgcccctaaggtggatctgctggtgaagaattgcctcctgcccctgagagagtacttcaagtatttcagccagaatagtctgcccctgggaggcagcggcggcggcgccgtgacccagctgaccttcgaggacgtggccgtggacttcacccaggaggagtggaggtgcctgacccaggcccagaggaccctgtacagggacgtgatgctggacacctacggcaacctggtgagcgtgggcgtgagcccccccagcatgagcgtgatcctgcccctggagttccaggaggacccctgggtggccaagagccacgtgaccacccccggcgagctgaacggctgggagggcggcggcccaagcagcggcgcccctcctcccagcggcggcagcccagccggctccccaacctctaccgaggagggcacctctgagtccgccacccccgagagcggccctggcacctccaccgagcccagcgagggcagcgcacccggcagccctgccggcagccccacctccacagaggagggaaccagcaccgagcccagcgaaggcagcgccccaggcaccagcaccgagcctagtgagcaggagattaaacggatcaacaagatcagaagaagacttgtgaaagacagcaacaccaagaaggccggcaagacaggccccatgaaaaccctgctggttagagtgatgacacccgatctgagagagcggctggaaaacctgagaaagaagcctgaaaatatcccccagcccatcagcaatacatctagagccaacctgaataagctgctgaccgattacaccgaaatgaagaaggcgatcctgcatgtgtactgggaagagttccagaaggaccctgtgggcctgatgagccgggtggcccagcctgccagcaagaagatcgatcagaacaagctgaaacctgagatggacgagaagggcaacctgaccaccgccggctttgcctgctctcagtgtggccagcccctgttcgtgtacaagctggagcaggtgtctgagaagggcaaggcttacaccaactacttcggacggtgcaatgtggccgagcacgaaaagctgatcctgctggcccagctgaagcccgagaaggatagcgacgaagccgtgacatatagcctgggaaagtttgggcagagggccctggatttctacagcattcatgtgaccaaggagtccacccaccccgtgaagcccctggcccagatcgccggaaacagatacgcctccggacctgtgggaaaggccctgagcgacgcatgtatgggcacaatcgcctccttcctgtctaagtaccaggacatcatcatcgaacaccagaaggtggtgaagggcaaccagaagagactggagagcctgcgggagctggccggcaaggaaaacctggaataccctagcgtgaccctgccacctcagcctcacaccaaggagggcgttgatgcctacaacgaagtgatcgcccgggtgcgaatgtgggtgaacctgaacctgtggcagaagctgaagctaagcagagatgatgccaagcctctgctgagactgaagggattcccttcctttcctctggtcgagagacaggccaacgaagtggactggtgggacatggtgtgtaacgtgaagaagctgatcaacgagaaaaaggaggatggcaaggtgttttggcagaatctggctggctacaagagacaggaagccctgagaccatacctgagcagcgaggaagatcggaagaagggaaagaaattcgctcggtaccagctgggcgacctgctgctgcacctggaaaagaagcacggcgaggactggggaaaggtgtacgacgaggcctgggagcggattgacaagaaagtggaaggcctgagcaagcacatcaagctggaagaggaacggagaagcgaggacgcccagagcaaggccgccctgaccgactggctgcgggctaaggccagcttcgtgatcgagggcctgaaggaggccgacaaggacgagttctgcagatgcgagctgaagctgcagaagtggtacggggacctgcggggaaagcccttcgccatcgaagccgagaacagcatcctggacatcagcggcttcagcaagcagtacaactgtgccttcatctggcagaaggacggcgtgaagaagctgaacctgtacctgatcatcaactacttcaagggcggcaagctgcggttcaagaagatcaaacctgaagccttcgaagccaacagattctacaccgtgatcaacaaaaagagcggcgagatcgtgcccatggaggtgaacttcaacttcgacgaccccaacctgatcatcctgcctctggcctttggcaagagacagggcagagaattcatctggaacgacctgctgtccctggaaaccggcagcctgaagctggccaacggaagagtgatcgagaagacactgtacaacagaagaacccggcaggatgagcctgccctgttcgtggccctgaccttcgagcggcgggaggtcctggactcctccaatatcaaaccaatgaacctgatcggcgtggcaagaggcgaaaacatccccgccgtgatcgccctgaccgaccccgagggctgcccactgagccggtttaaggatagcctgggaaacccaacccacatcctgagaatcggcgagagctataaggagaagcagcggaccatccaggccaagaaggaggtggagcagcggagagccggcggctacagccggaagtacgccagcaaagccaagaatctggcagacgatatggtgagaaacaccgctagagatctgctgtactacgccgtgacccaggatgccatgctgatcttcgccaacctgagccggggcttcggccggcagggcaagcggaccttcatggccgagagacagtacacacggatggaggactggctgaccgccaagctggcctacgagggcctgagcaagacctacctgtccaagacactggcccagtacacctccaagacatgcagcaactgtgggtttaccatcaccagcgccgactacgacagggtgctggagaagctgaagaagacagcaacaggctggatgaccacaattaacggcaaggagctgaaggtggagggccagattacctactacaacagatacaagagacagaacgtagtcaaggacctgtccgtcgagctggatagactgagcgaagaatctgtgaacaacgacatctcctcctggacaaagggcagaagcggagaagctctgagcctcctgaagaaaagattctcccatagacccgtgcaggagaagttcgtgtgcctgaactgcggcttcgagacacacgcagccgagcaagccgccctgaacatcgccagatcctggctgttcctgcggagccaggagtacaagaaataccagacaaacaagacaaccggcaacaccgataagagagccttcgtcgagacctggcagtccttttaccggaagaagcttaaggaggtgtggaaacctgccgtgcggtctggcggatctggcggaggctccaccagccccaagaaaaagagaaaagtctaagctgccttctgcggggcttgccttctggccatgcccttcttctctcccttgcacctgtacctcttggtctttgaataaagcctgagtaggaaggctagcaaaaaaaaaaaaaaaaaaaaaaaaaaaaaaaaaaaaaaaaaaaaaaaaaaaaaaaaaaaaaaaaaaaaaaaaaaaaaaaa

SEQ ID NO: 13051 - RNA, 5785 nt, synthetic construct
  source 1..5785: mol_type = other RNA
aggaaataagagagaaaagaagagtaagaagaaatataagagccaccatggcccctaagaagaagcgtaaagtgagccggatggaacgcctcgtctacgaggtgcggcagaagtgcagaaacatcgaggacatctgcatctcctgcggatctctgaacgtgaccctggagcacccactgttcatcggcggcatgtgccagaactgtaaaaactgttttctggagtgtgcctatcaatacgacgatgacggctaccagagctactgcaccatctgttgcggcggaagagaggtgctgatgtgtggaaataacaactgctgccggtgcttctgcgtggaatgcgtggacctgctggtgggccccggcgccgcccaggccgctattaaggaagatccttggaactgctacatgtgcggccacaagggcacatacggcctgctgagacggagagaggactggcctagcagactgcagatgttcttcgccaataaccacgaccaggagttcgacccccctaaggtgtaccctcccgtccccgccgagaagagaaagcccatccgggtcctgagcctgttcgatggcatcgccaccggtctgctggtgctgaaggacctgggcatccaggtggataggtacattgcctccgaggtgtgcgaggactccatcaccgtgggaatggtgcgtcatcagggcaagatcatgtacgtgggcgacgtgcggagcgtgacacagaagcatatccaggagtggggccctttcgacctggtgatcggcggcagcccttgcaatgacctgagcatcgtgaacccagcccggaagggcctgtacgagggaaccggcagactgttcttcgagttttacagactgctgcacgacgcccggcctaaggaaggcgacgaccggcccttcttttggctgttcgagaatgtggtggccatgggagtcagcgacaagcgggatattagccggttcctggagagcaaccccgtgatgatcgatgccaaggaagtgagcgccgcccaccgggccagatacttctggggcaatctgcctggcatgaacagacccctggccagcaccgtgaacgacaagctggagctgcaggagtgcctggagcacggccggatcgccaagttcagcaaggtgagaaccatcaccacccgaagcaacagcatcaaacaaggcaaggaccagcactttcctgtgttcatgaacgagaaggaggacatcctgtggtgtaccgagatggagagagtgttcgggttcccagtccactacacagatgtcagcaacatgtctagactggccagacagagactgctgggaagaagctggtccgtccctgtgatcagacacctgttcgcccctctgaaggagtacttcgcctgcgtgagcagcggcaacagcaacgccaacagccggggccccagcttctctagcggcctggtgccactgtccctgagagggagccacatgggccccatggagatctacaaaaccgtgagcgcctggaagcggcagcctgtgcgcgtgctgagcctgtttcggaatatcgataaagtcctgaaaagcctgggattcctggagagcggctctggctccggcggtggcaccctgaagtacgtggaggatgtgacaaacgtggtcagacgggatgtggagaagtggggccccttcgatctggtgtacggcagcacccaacccctgggcagctcttgtgaccggtgccctggctggtacatgtttcagttccaccggatcctgcagtacgccctgccgagacaggagtcccagcggccattcttttggattttcatggacaacttgctgctgaccgaggatgaccaggaaactaccactcggttcctgcagaccgaagccgtgaccctgcaggacgtgagaggccgggactaccagaacgccatgcgggtgtggtccaacatccctggactgaaaagcaagcacgcacctctgacccctaaagaagaggagtacctgcaggcccaggtgcggagcagaagcaagctggacgcccctaaggtggatctgctggtgaagaattgcctcctgcccctgagagagtacttcaagtatttcagccagaatagtctgcccctgggaggcagcggcggcggccaggccgaggtgaccttcgaggacgtggccgtgctgctgagcagggaggagtggggcaggctgggccccgtgcagaagggcctgtacagggacgtgatgctggagacctacaggaacctggtgagcctgggcgccggccccaccggccccaagcccgaggtgatcacccagctggagaggggcgacgagccctgggtgctggacgtgcagggcagggagggccccaccatcgacggcagcgccggcggcccaagcagcggcgcccctcctcccagcggcggcagcccagccggctccccaacctctaccgaggagggcacctctgagtccgccacccccgagagcggccctggcacctccaccgagcccagcgagggcagcgcacccggcagccctgccggcagccccacctccacagaggagggaaccagcaccgagcccagcgaaggcagcgccccaggcaccagcaccgagcctagtgagcaggagattaaacggatcaacaagatcagaagaagacttgtgaaagacagcaacaccaagaaggccggcaagacaggccccatgaaaaccctgctggttagagtgatgacacccgatctgagagagcggctggaaaacctgagaaagaagcctgaaaatatcccccagcccatcagcaatacatctagagccaacctgaataagctgctgaccgattacaccgaaatgaagaaggcgatcctgcatgtgtactgggaagagttccagaaggaccctgtgggcctgatgagccgggtggcccagcctgccagcaagaagatcgatcagaacaagctgaaacctgagatggacgagaagggcaacctgaccaccgccggctttgcctgctctcagtgtggccagcccctgttcgtgtacaagctggagcaggtgtctgagaagggcaaggcttacaccaactacttcggacggtgcaatgtggccgagcacgaaaagctgatcctgctggcccagctgaagcccgagaaggatagcgacgaagccgtgacatatagcctgggaaagtttgggcagagggccctggatttctacagcattcatgtgaccaaggagtccacccaccccgtgaagcccctggcccagatcgccggaaacagatacgcctccggacctgtgggaaaggccctgagcgacgcatgtatgggcacaatcgcctccttcctgtctaagtaccaggacatcatcatcgaacaccagaaggtggtgaagggcaaccagaagagactggagagcctgcgggagctggccggcaaggaaaacctggaataccctagcgtgaccctgccacctcagcctcacaccaaggagggcgttgatgcctacaacgaagtgatcgcccgggtgcgaatgtgggtgaacctgaacctgtggcagaagctgaagctaagcagagatgatgccaagcctctgctgagactgaagggattcccttcctttcctctggtcgagagacaggccaacgaagtggactggtgggacatggtgtgtaacgtgaagaagctgatcaacgagaaaaaggaggatggcaaggtgttttggcagaatctggctggctacaagagacaggaagccctgagaccatacctgagcagcgaggaagatcggaagaagggaaagaaattcgctcggtaccagctgggcgacctgctgctgcacctggaaaagaagcacggcgaggactggggaaaggtgtacgacgaggcctgggagcggattgacaagaaagtggaaggcctgagcaagcacatcaagctggaagaggaacggagaagcgaggacgcccagagcaaggccgccctgaccgactggctgcgggctaaggccagcttcgtgatcgagggcctgaaggaggccgacaaggacgagttctgcagatgcgagctgaagctgcagaagtggtacggggacctgcggggaaagcccttcgccatcgaagccgagaacagcatcctggacatcagcggcttcagcaagcagtacaactgtgccttcatctggcagaaggacggcgtgaagaagctgaacctgtacctgatcatcaactacttcaagggcggcaagctgcggttcaagaagatcaaacctgaagccttcgaagccaacagattctacaccgtgatcaacaaaaagagcggcgagatcgtgcccatggaggtgaacttcaacttcgacgaccccaacctgatcatcctgcctctggcctttggcaagagacagggcagagaattcatctggaacgacctgctgtccctggaaaccggcagcctgaagctggccaacggaagagtgatcgagaagacactgtacaacagaagaacccggcaggatgagcctgccctgttcgtggccctgaccttcgagcggcgggaggtcctggactcctccaatatcaaaccaatgaacctgatcggcgtggcaagaggcgaaaacatccccgccgtgatcgccctgaccgaccccgagggctgcccactgagccggtttaaggatagcctgggaaacccaacccacatcctgagaatcggcgagagctataaggagaagcagcggaccatccaggccaagaaggaggtggagcagcggagagccggcggctacagccggaagtacgccagcaaagccaagaatctggcagacgatatggtgagaaacaccgctagagatctgctgtactacgccgtgacccaggatgccatgctgatcttcgccaacctgagccggggcttcggccggcagggcaagcggaccttcatggccgagagacagtacacacggatggaggactggctgaccgccaagctggcctacgagggcctgagcaagacctacctgtccaagacactggcccagtacacctccaagacatgcagcaactgtgggtttaccatcaccagcgccgactacgacagggtgctggagaagctgaagaagacagcaacaggctggatgaccacaattaacggcaaggagctgaaggtggagggccagattacctactacaacagatacaagagacagaacgtagtcaaggacctgtccgtcgagctggatagactgagcgaagaatctgtgaacaacgacatctcctcctggacaaagggcagaagcggagaagctctgagcctcctgaagaaaagattctcccatagacccgtgcaggagaagttcgtgtgcctgaactgcggcttcgagacacacgcagccgagcaagccgccctgaacatcgccagatcctggctgttcctgcggagccaggagtacaagaaataccagacaaacaagacaaccggcaacaccgataagagagccttcgtcgagacctggcagtccttttaccggaagaagcttaaggaggtgtggaaacctgccgtgcggtctggcggatctggcggaggctccaccagccccaagaaaaagagaaaagtctaagctgccttctgcggggcttgccttctggccatgcccttcttctctcccttgcacctgtacctcttggtctttgaataaagcctgagtaggaaggctagcaaaaaaaaaaaaaaaaaaaaaaaaaaaaaaaaaaaaaaaaaaaaaaaaaaaaaaaaaaaaaaaaaaaaaaaaaaaaaaaa

SEQ ID NO: 13052 - RNA, 5785 nt, synthetic construct
  source 1..5785: mol_type = other RNA
aggaaataagagagaaaagaagagtaagaagaaatataagagccaccatggcccctaagaagaagcgtaaagtgagccggatggaacgcctcgtctacgaggtgcggcagaagtgcagaaacatcgaggacatctgcatctcctgcggatctctgaacgtgaccctggagcacccactgttcatcggcggcatgtgccagaactgtaaaaactgttttctggagtgtgcctatcaatacgacgatgacggctaccagagctactgcaccatctgttgcggcggaagagaggtgctgatgtgtggaaataacaactgctgccggtgcttctgcgtggaatgcgtggacctgctggtgggccccggcgccgcccaggccgctattaaggaagatccttggaactgctacatgtgcggccacaagggcacatacggcctgctgagacggagagaggactggcctagcagactgcagatgttcttcgccaataaccacgaccaggagttcgacccccctaaggtgtaccctcccgtccccgccgagaagagaaagcccatccgggtcctgagcctgttcgatggcatcgccaccggtctgctggtgctgaaggacctgggcatccaggtggataggtacattgcctccgaggtgtgcgaggactccatcaccgtgggaatggtgcgtcatcagggcaagatcatgtacgtgggcgacgtgcggagcgtgacacagaagcatatccaggagtggggccctttcgacctggtgatcggcggcagcccttgcaatgacctgagcatcgtgaacccagcccggaagggcctgtacgagggaaccggcagactgttcttcgagttttacagactgctgcacgacgcccggcctaaggaaggcgacgaccggcccttcttttggctgttcgagaatgtggtggccatgggagtcagcgacaagcgggatattagccggttcctggagagcaaccccgtgatgatcgatgccaaggaagtgagcgccgcccaccgggccagatacttctggggcaatctgcctggcatgaacagacccctggccagcaccgtgaacgacaagctggagctgcaggagtgcctggagcacggccggatcgccaagttcagcaaggtgagaaccatcaccacccgaagcaacagcatcaaacaaggcaaggaccagcactttcctgtgttcatgaacgagaaggaggacatcctgtggtgtaccgagatggagagagtgttcgggttcccagtccactacacagatgtcagcaacatgtctagactggccagacagagactgctgggaagaagctggtccgtccctgtgatcagacacctgttcgcccctctgaaggagtacttcgcctgcgtgagcagcggcaacagcaacgccaacagccggggccccagcttctctagcggcctggtgccactgtccctgagagggagccacatgggccccatggagatctacaaaaccgtgagcgcctggaagcggcagcctgtgcgcgtgctgagcctgtttcggaatatcgataaagtcctgaaaagcctgggattcctggagagcggctctggctccggcggtggcaccctgaagtacgtggaggatgtgacaaacgtggtcagacgggatgtggagaagtggggccccttcgatctggtgtacggcagcacccaacccctgggcagctcttgtgaccggtgccctggctggtacatgtttcagttccaccggatcctgcagtacgccctgccgagacaggagtcccagcggccattcttttggattttcatggacaacttgctgctgaccgaggatgaccaggaaactaccactcggttcctgcagaccgaagccgtgaccctgcaggacgtgagaggccgggactaccagaacgccatgcgggtgtggtccaacatccctggactgaaaagcaagcacgcacctctgacccctaaagaagaggagtacctgcaggcccaggtgcggagcagaagcaagctggacgcccctaaggtggatctgctggtgaagaattgcctcctgcccctgagagagtacttcaagtatttcagccagaatagtctgcccctgggaggcagcggcggcggccccagcgtgcccgtgaccttcagggacgtgttcgtgcagttcagcagggacgagtgggccctgctggacgacgagcagaaggagctgcaccagagcgtgatgcagagcaactacgaggtgctgatgagcctgtactgcgacctggccaagcccgaggtgctgctgcagatggagaggggcgagccctgcctgcccgccgagcccgacctgcagggcgccgccgtgagcctgaaccccgccgccggcggcccaagcagcggcgcccctcctcccagcggcggcagcccagccggctccccaacctctaccgaggagggcacctctgagtccgccacccccgagagcggccctggcacctccaccgagcccagcgagggcagcgcacccggcagccctgccggcagccccacctccacagaggagggaaccagcaccgagcccagcgaaggcagcgccccaggcaccagcaccgagcctagtgagcaggagattaaacggatcaacaagatcagaagaagacttgtgaaagacagcaacaccaagaaggccggcaagacaggccccatgaaaaccctgctggttagagtgatgacacccgatctgagagagcggctggaaaacctgagaaagaagcctgaaaatatcccccagcccatcagcaatacatctagagccaacctgaataagctgctgaccgattacaccgaaatgaagaaggcgatcctgcatgtgtactgggaagagttccagaaggaccctgtgggcctgatgagccgggtggcccagcctgccagcaagaagatcgatcagaacaagctgaaacctgagatggacgagaagggcaacctgaccaccgccggctttgcctgctctcagtgtggccagcccctgttcgtgtacaagctggagcaggtgtctgagaagggcaaggcttacaccaactacttcggacggtgcaatgtggccgagcacgaaaagctgatcctgctggcccagctgaagcccgagaaggatagcgacgaagccgtgacatatagcctgggaaagtttgggcagagggccctggatttctacagcattcatgtgaccaaggagtccacccaccccgtgaagcccctggcccagatcgccggaaacagatacgcctccggacctgtgggaaaggccctgagcgacgcatgtatgggcacaatcgcctccttcctgtctaagtaccaggacatcatcatcgaacaccagaaggtggtgaagggcaaccagaagagactggagagcctgcgggagctggccggcaaggaaaacctggaataccctagcgtgaccctgccacctcagcctcacaccaaggagggcgttgatgcctacaacgaagtgatcgcccgggtgcgaatgtgggtgaacctgaacctgtggcagaagctgaagctaagcagagatgatgccaagcctctgctgagactgaagggattcccttcctttcctctggtcgagagacaggccaacgaagtggactggtgggacatggtgtgtaacgtgaagaagctgatcaacgagaaaaaggaggatggcaaggtgttttggcagaatctggctggctacaagagacaggaagccctgagaccatacctgagcagcgaggaagatcggaagaagggaaagaaattcgctcggtaccagctgggcgacctgctgctgcacctggaaaagaagcacggcgaggactggggaaaggtgtacgacgaggcctgggagcggattgacaagaaagtggaaggcctgagcaagcacatcaagctggaagaggaacggagaagcgaggacgcccagagcaaggccgccctgaccgactggctgcgggctaaggccagcttcgtgatcgagggcctgaaggaggccgacaaggacgagttctgcagatgcgagctgaagctgcagaagtggtacggggacctgcggggaaagcccttcgccatcgaagccgagaacagcatcctggacatcagcggcttcagcaagcagtacaactgtgccttcatctggcagaaggacggcgtgaagaagctgaacctgtacctgatcatcaactacttcaagggcggcaagctgcggttcaagaagatcaaacctgaagccttcgaagccaacagattctacaccgtgatcaacaaaaagagcggcgagatcgtgcccatggaggtgaacttcaacttcgacgaccccaacctgatcatcctgcctctggcctttggcaagagacagggcagagaattcatctggaacgacctgctgtccctggaaaccggcagcctgaagctggccaacggaagagtgatcgagaagacactgtacaacagaagaacccggcaggatgagcctgccctgttcgtggccctgaccttcgagcggcgggaggtcctggactcctccaatatcaaaccaatgaacctgatcggcgtggcaagaggcgaaaacatccccgccgtgatcgccctgaccgaccccgagggctgcccactgagccggtttaaggatagcctgggaaacccaacccacatcctgagaatcggcgagagctataaggagaagcagcggaccatccaggccaagaaggaggtggagcagcggagagccggcggctacagccggaagtacgccagcaaagccaagaatctggcagacgatatggtgagaaacaccgctagagatctgctgtactacgccgtgacccaggatgccatgctgatcttcgccaacctgagccggggcttcggccggcagggcaagcggaccttcatggccgagagacagtacacacggatggaggactggctgaccgccaagctggcctacgagggcctgagcaagacctacctgtccaagacactggcccagtacacctccaagacatgcagcaactgtgggtttaccatcaccagcgccgactacgacagggtgctggagaagctgaagaagacagcaacaggctggatgaccacaattaacggcaaggagctgaaggtggagggccagattacctactacaacagatacaagagacagaacgtagtcaaggacctgtccgtcgagctggatagactgagcgaagaatctgtgaacaacgacatctcctcctggacaaagggcagaagcggagaagctctgagcctcctgaagaaaagattctcccatagacccgtgcaggagaagttcgtgtgcctgaactgcggcttcgagacacacgcagccgagcaagccgccctgaacatcgccagatcctggctgttcctgcggagccaggagtacaagaaataccagacaaacaagacaaccggcaacaccgataagagagccttcgtcgagacctggcagtccttttaccggaagaagcttaaggaggtgtggaaacctgccgtgcggtctggcggatctggcggaggctccaccagccccaagaaaaagagaaaagtctaagctgccttctgcggggcttgccttctggccatgcccttcttctctcccttgcacctgtacctcttggtctttgaataaagcctgagtaggaaggctagcaaaaaaaaaaaaaaaaaaaaaaaaaaaaaaaaaaaaaaaaaaaaaaaaaaaaaaaaaaaaaaaaaaaaaaaaaaaaaaaa

SEQ ID NO: 13053 - RNA, 5785 nt, synthetic construct
  source 1..5785: mol_type = other RNA
aggaaataagagagaaaagaagagtaagaagaaatataagagccaccatggcccctaagaagaagcgtaaagtgagccggatggaacgcctcgtctacgaggtgcggcagaagtgcagaaacatcgaggacatctgcatctcctgcggatctctgaacgtgaccctggagcacccactgttcatcggcggcatgtgccagaactgtaaaaactgttttctggagtgtgcctatcaatacgacgatgacggctaccagagctactgcaccatctgttgcggcggaagagaggtgctgatgtgtggaaataacaactgctgccggtgcttctgcgtggaatgcgtggacctgctggtgggccccggcgccgcccaggccgctattaaggaagatccttggaactgctacatgtgcggccacaagggcacatacggcctgctgagacggagagaggactggcctagcagactgcagatgttcttcgccaataaccacgaccaggagttcgacccccctaaggtgtaccctcccgtccccgccgagaagagaaagcccatccgggtcctgagcctgttcgatggcatcgccaccggtctgctggtgctgaaggacctgggcatccaggtggataggtacattgcctccgaggtgtgcgaggactccatcaccgtgggaatggtgcgtcatcagggcaagatcatgtacgtgggcgacgtgcggagcgtgacacagaagcatatccaggagtggggccctttcgacctggtgatcggcggcagcccttgcaatgacctgagcatcgtgaacccagcccggaagggcctgtacgagggaaccggcagactgttcttcgagttttacagactgctgcacgacgcccggcctaaggaaggcgacgaccggcccttcttttggctgttcgagaatgtggtggccatgggagtcagcgacaagcgggatattagccggttcctggagagcaaccccgtgatgatcgatgccaaggaagtgagcgccgcccaccgggccagatacttctggggcaatctgcctggcatgaacagacccctggccagcaccgtgaacgacaagctggagctgcaggagtgcctggagcacggccggatcgccaagttcagcaaggtgagaaccatcaccacccgaagcaacagcatcaaacaaggcaaggaccagcactttcctgtgttcatgaacgagaaggaggacatcctgtggtgtaccgagatggagagagtgttcgggttcccagtccactacacagatgtcagcaacatgtctagactggccagacagagactgctgggaagaagctggtccgtccctgtgatcagacacctgttcgcccctctgaaggagtacttcgcctgcgtgagcagcggcaacagcaacgccaacagccggggccccagcttctctagcggcctggtgccactgtccctgagagggagccacatgggccccatggagatctacaaaaccgtgagcgcctggaagcggcagcctgtgcgcgtgctgagcctgtttcggaatatcgataaagtcctgaaaagcctgggattcctggagagcggctctggctccggcggtggcaccctgaagtacgtggaggatgtgacaaacgtggtcagacgggatgtggagaagtggggccccttcgatctggtgtacggcagcacccaacccctgggcagctcttgtgaccggtgccctggctggtacatgtttcagttccaccggatcctgcagtacgccctgccgagacaggagtcccagcggccattcttttggattttcatggacaacttgctgctgaccgaggatgaccaggaaactaccactcggttcctgcagaccgaagccgtgaccctgcaggacgtgagaggccgggactaccagaacgccatgcgggtgtggtccaacatccctggactgaaaagcaagcacgcacctctgacccctaaagaagaggagtacctgcaggcccaggtgcggagcagaagcaagctggacgcccctaaggtggatctgctggtgaagaattgcctcctgcccctgagagagtacttcaagtatttcagccagaatagtctgcccctgggaggcagcggcggcggcttccaggagcccgtgaccttcgaggacgtggccgtgtacttcacccagaacgagtgggccagcctgcaccccacccagagggccctgtacagggaggtgatgctggagaactacgccaacgtgaccagcctgctggccttccccttccccaagcccgccctgatcagccacctggagaggggcgaggccccctggggccccgacccctgggacaccgagatccccaggggcatcagccagggcggcggcccaagcagcggcgcccctcctcccagcggcggcagcccagccggctccccaacctctaccgaggagggcacctctgagtccgccacccccgagagcggccctggcacctccaccgagcccagcgagggcagcgcacccggcagccctgccggcagccccacctccacagaggagggaaccagcaccgagcccagcgaaggcagcgccccaggcaccagcaccgagcctagtgagcaggagattaaacggatcaacaagatcagaagaagacttgtgaaagacagcaacaccaagaaggccggcaagacaggccccatgaaaaccctgctggttagagtgatgacacccgatctgagagagcggctggaaaacctgagaaagaagcctgaaaatatcccccagcccatcagcaatacatctagagccaacctgaataagctgctgaccgattacaccgaaatgaagaaggcgatcctgcatgtgtactgggaagagttccagaaggaccctgtgggcctgatgagccgggtggcccagcctgccagcaagaagatcgatcagaacaagctgaaacctgagatggacgagaagggcaacctgaccaccgccggctttgcctgctctcagtgtggccagcccctgttcgtgtacaagctggagcaggtgtctgagaagggcaaggcttacaccaactacttcggacggtgcaatgtggccgagcacgaaaagctgatcctgctggcccagctgaagcccgagaaggatagcgacgaagccgtgacatatagcctgggaaagtttgggcagagggccctggatttctacagcattcatgtgaccaaggagtccacccaccccgtgaagcccctggcccagatcgccggaaacagatacgcctccggacctgtgggaaaggccctgagcgacgcatgtatgggcacaatcgcctccttcctgtctaagtaccaggacatcatcatcgaacaccagaaggtggtgaagggcaaccagaagagactggagagcctgcgggagctggccggcaaggaaaacctggaataccctagcgtgaccctgccacctcagcctcacaccaaggagggcgttgatgcctacaacgaagtgatcgcccgggtgcgaatgtgggtgaacctgaacctgtggcagaagctgaagctaagcagagatgatgccaagcctctgctgagactgaagggattcccttcctttcctctggtcgagagacaggccaacgaagtggactggtgggacatggtgtgtaacgtgaagaagctgatcaacgagaaaaaggaggatggcaaggtgttttggcagaatctggctggctacaagagacaggaagccctgagaccatacctgagcagcgaggaagatcggaagaagggaaagaaattcgctcggtaccagctgggcgacctgctgctgcacctggaaaagaagcacggcgaggactggggaaaggtgtacgacgaggcctgggagcggattgacaagaaagtggaaggcctgagcaagcacatcaagctggaagaggaacggagaagcgaggacgcccagagcaaggccgccctgaccgactggctgcgggctaaggccagcttcgtgatcgagggcctgaaggaggccgacaaggacgagttctgcagatgcgagctgaagctgcagaagtggtacggggacctgcggggaaagcccttcgccatcgaagccgagaacagcatcctggacatcagcggcttcagcaagcagtacaactgtgccttcatctggcagaaggacggcgtgaagaagctgaacctgtacctgatcatcaactacttcaagggcggcaagctgcggttcaagaagatcaaacctgaagccttcgaagccaacagattctacaccgtgatcaacaaaaagagcggcgagatcgtgcccatggaggtgaacttcaacttcgacgaccccaacctgatcatcctgcctctggcctttggcaagagacagggcagagaattcatctggaacgacctgctgtccctggaaaccggcagcctgaagctggccaacggaagagtgatcgagaagacactgtacaacagaagaacccggcaggatgagcctgccctgttcgtggccctgaccttcgagcggcgggaggtcctggactcctccaatatcaaaccaatgaacctgatcggcgtggcaagaggcgaaaacatccccgccgtgatcgccctgaccgaccccgagggctgcccactgagccggtttaaggatagcctgggaaacccaacccacatcctgagaatcggcgagagctataaggagaagcagcggaccatccaggccaagaaggaggtggagcagcggagagccggcggctacagccggaagtacgccagcaaagccaagaatctggcagacgatatggtgagaaacaccgctagagatctgctgtactacgccgtgacccaggatgccatgctgatcttcgccaacctgagccggggcttcggccggcagggcaagcggaccttcatggccgagagacagtacacacggatggaggactggctgaccgccaagctggcctacgagggcctgagcaagacctacctgtccaagacactggcccagtacacctccaagacatgcagcaactgtgggtttaccatcaccagcgccgactacgacagggtgctggagaagctgaagaagacagcaacaggctggatgaccacaattaacggcaaggagctgaaggtggagggccagattacctactacaacagatacaagagacagaacgtagtcaaggacctgtccgtcgagctggatagactgagcgaagaatctgtgaacaacgacatctcctcctggacaaagggcagaagcggagaagctctgagcctcctgaagaaaagattctcccatagacccgtgcaggagaagttcgtgtgcctgaactgcggcttcgagacacacgcagccgagcaagccgccctgaacatcgccagatcctggctgttcctgcggagccaggagtacaagaaataccagacaaacaagacaaccggcaacaccgataagagagccttcgtcgagacctggcagtccttttaccggaagaagcttaaggaggtgtggaaacctgccgtgcggtctggcggatctggcggaggctccaccagccccaagaaaaagagaaaagtctaagctgccttctgcggggcttgccttctggccatgcccttcttctctcccttgcacctgtacctcttggtctttgaataaagcctgagtaggaaggctagcaaaaaaaaaaaaaaaaaaaaaaaaaaaaaaaaaaaaaaaaaaaaaaaaaaaaaaaaaaaaaaaaaaaaaaaaaaaaaaaa

SEQ ID NO: 13054 - RNA, 5785 nt, synthetic construct
  source 1..5785: mol_type = other RNA
aggaaataagagagaaaagaagagtaagaagaaatataagagccaccatggcccctaagaagaagcgtaaagtgagccggatggaacgcctcgtctacgaggtgcggcagaagtgcagaaacatcgaggacatctgcatctcctgcggatctctgaacgtgaccctggagcacccactgttcatcggcggcatgtgccagaactgtaaaaactgttttctggagtgtgcctatcaatacgacgatgacggctaccagagctactgcaccatctgttgcggcggaagagaggtgctgatgtgtggaaataacaactgctgccggtgcttctgcgtggaatgcgtggacctgctggtgggccccggcgccgcccaggccgctattaaggaagatccttggaactgctacatgtgcggccacaagggcacatacggcctgctgagacggagagaggactggcctagcagactgcagatgttcttcgccaataaccacgaccaggagttcgacccccctaaggtgtaccctcccgtccccgccgagaagagaaagcccatccgggtcctgagcctgttcgatggcatcgccaccggtctgctggtgctgaaggacctgggcatccaggtggataggtacattgcctccgaggtgtgcgaggactccatcaccgtgggaatggtgcgtcatcagggcaagatcatgtacgtgggcgacgtgcggagcgtgacacagaagcatatccaggagtggggccctttcgacctggtgatcggcggcagcccttgcaatgacctgagcatcgtgaacccagcccggaagggcctgtacgagggaaccggcagactgttcttcgagttttacagactgctgcacgacgcccggcctaaggaaggcgacgaccggcccttcttttggctgttcgagaatgtggtggccatgggagtcagcgacaagcgggatattagccggttcctggagagcaaccccgtgatgatcgatgccaaggaagtgagcgccgcccaccgggccagatacttctggggcaatctgcctggcatgaacagacccctggccagcaccgtgaacgacaagctggagctgcaggagtgcctggagcacggccggatcgccaagttcagcaaggtgagaaccatcaccacccgaagcaacagcatcaaacaaggcaaggaccagcactttcctgtgttcatgaacgagaaggaggacatcctgtggtgtaccgagatggagagagtgttcgggttcccagtccactacacagatgtcagcaacatgtctagactggccagacagagactgctgggaagaagctggtccgtccctgtgatcagacacctgttcgcccctctgaaggagtacttcgcctgcgtgagcagcggcaacagcaacgccaacagccggggccccagcttctctagcggcctggtgccactgtccctgagagggagccacatgggccccatggagatctacaaaaccgtgagcgcctggaagcggcagcctgtgcgcgtgctgagcctgtttcggaatatcgataaagtcctgaaaagcctgggattcctggagagcggctctggctccggcggtggcaccctgaagtacgtggaggatgtgacaaacgtggtcagacgggatgtggagaagtggggccccttcgatctggtgtacggcagcacccaacccctgggcagctcttgtgaccggtgccctggctggtacatgtttcagttccaccggatcctgcagtacgccctgccgagacaggagtcccagcggccattcttttggattttcatggacaacttgctgctgaccgaggatgaccaggaaactaccactcggttcctgcagaccgaagccgtgaccctgcaggacgtgagaggccgggactaccagaacgccatgcgggtgtggtccaacatccctggactgaaaagcaagcacgcacctctgacccctaaagaagaggagtacctgcaggcccaggtgcggagcagaagcaagctggacgcccctaaggtggatctgctggtgaagaattgcctcctgcccctgagagagtacttcaagtatttcagccagaatagtctgcccctgggaggcagcggcggcggcggcgaggaggccgtgaccttcagggacgtggccctggacttcacctgggaggagtggggctgcctgagcgccgcccagagggagctgtacaaggacgtgatgctggagaactacaggaacctggtgagcctgggcctgcccggccccaagcccggcctgatcagctggctggagggcgaggaggagccccacccctgggacagcctggtgcacgccgccaggagcaccagcctgagcaaggccggcggcccaagcagcggcgcccctcctcccagcggcggcagcccagccggctccccaacctctaccgaggagggcacctctgagtccgccacccccgagagcggccctggcacctccaccgagcccagcgagggcagcgcacccggcagccctgccggcagccccacctccacagaggagggaaccagcaccgagcccagcgaaggcagcgccccaggcaccagcaccgagcctagtgagcaggagattaaacggatcaacaagatcagaagaagacttgtgaaagacagcaacaccaagaaggccggcaagacaggccccatgaaaaccctgctggttagagtgatgacacccgatctgagagagcggctggaaaacctgagaaagaagcctgaaaatatcccccagcccatcagcaatacatctagagccaacctgaataagctgctgaccgattacaccgaaatgaagaaggcgatcctgcatgtgtactgggaagagttccagaaggaccctgtgggcctgatgagccgggtggcccagcctgccagcaagaagatcgatcagaacaagctgaaacctgagatggacgagaagggcaacctgaccaccgccggctttgcctgctctcagtgtggccagcccctgttcgtgtacaagctggagcaggtgtctgagaagggcaaggcttacaccaactacttcggacggtgcaatgtggccgagcacgaaaagctgatcctgctggcccagctgaagcccgagaaggatagcgacgaagccgtgacatatagcctgggaaagtttgggcagagggccctggatttctacagcattcatgtgaccaaggagtccacccaccccgtgaagcccctggcccagatcgccggaaacagatacgcctccggacctgtgggaaaggccctgagcgacgcatgtatgggcacaatcgcctccttcctgtctaagtaccaggacatcatcatcgaacaccagaaggtggtgaagggcaaccagaagagactggagagcctgcgggagctggccggcaaggaaaacctggaataccctagcgtgaccctgccacctcagcctcacaccaaggagggcgttgatgcctacaacgaagtgatcgcccgggtgcgaatgtgggtgaacctgaacctgtggcagaagctgaagctaagcagagatgatgccaagcctctgctgagactgaagggattcccttcctttcctctggtcgagagacaggccaacgaagtggactggtgggacatggtgtgtaacgtgaagaagctgatcaacgagaaaaaggaggatggcaaggtgttttggcagaatctggctggctacaagagacaggaagccctgagaccatacctgagcagcgaggaagatcggaagaagggaaagaaattcgctcggtaccagctgggcgacctgctgctgcacctggaaaagaagcacggcgaggactggggaaaggtgtacgacgaggcctgggagcggattgacaagaaagtggaaggcctgagcaagcacatcaagctggaagaggaacggagaagcgaggacgcccagagcaaggccgccctgaccgactggctgcgggctaaggccagcttcgtgatcgagggcctgaaggaggccgacaaggacgagttctgcagatgcgagctgaagctgcagaagtggtacggggacctgcggggaaagcccttcgccatcgaagccgagaacagcatcctggacatcagcggcttcagcaagcagtacaactgtgccttcatctggcagaaggacggcgtgaagaagctgaacctgtacctgatcatcaactacttcaagggcggcaagctgcggttcaagaagatcaaacctgaagccttcgaagccaacagattctacaccgtgatcaacaaaaagagcggcgagatcgtgcccatggaggtgaacttcaacttcgacgaccccaacctgatcatcctgcctctggcctttggcaagagacagggcagagaattcatctggaacgacctgctgtccctggaaaccggcagcctgaagctggccaacggaagagtgatcgagaagacactgtacaacagaagaacccggcaggatgagcctgccctgttcgtggccctgaccttcgagcggcgggaggtcctggactcctccaatatcaaaccaatgaacctgatcggcgtggcaagaggcgaaaacatccccgccgtgatcgccctgaccgaccccgagggctgcccactgagccggtttaaggatagcctgggaaacccaacccacatcctgagaatcggcgagagctataaggagaagcagcggaccatccaggccaagaaggaggtggagcagcggagagccggcggctacagccggaagtacgccagcaaagccaagaatctggcagacgatatggtgagaaacaccgctagagatctgctgtactacgccgtgacccaggatgccatgctgatcttcgccaacctgagccggggcttcggccggcagggcaagcggaccttcatggccgagagacagtacacacggatggaggactggctgaccgccaagctggcctacgagggcctgagcaagacctacctgtccaagacactggcccagtacacctccaagacatgcagcaactgtgggtttaccatcaccagcgccgactacgacagggtgctggagaagctgaagaagacagcaacaggctggatgaccacaattaacggcaaggagctgaaggtggagggccagattacctactacaacagatacaagagacagaacgtagtcaaggacctgtccgtcgagctggatagactgagcgaagaatctgtgaacaacgacatctcctcctggacaaagggcagaagcggagaagctctgagcctcctgaagaaaagattctcccatagacccgtgcaggagaagttcgtgtgcctgaactgcggcttcgagacacacgcagccgagcaagccgccctgaacatcgccagatcctggctgttcctgcggagccaggagtacaagaaataccagacaaacaagacaaccggcaacaccgataagagagccttcgtcgagacctggcagtccttttaccggaagaagcttaaggaggtgtggaaacctgccgtgcggtctggcggatctggcggaggctccaccagccccaagaaaaagagaaaagtctaagctgccttctgcggggcttgccttctggccatgcccttcttctctcccttgcacctgtacctcttggtctttgaataaagcctgagtaggaaggctagcaaaaaaaaaaaaaaaaaaaaaaaaaaaaaaaaaaaaaaaaaaaaaaaaaaaaaaaaaaaaaaaaaaaaaaaaaaaaaaaa

SEQ ID NO: 13055 - RNA, 5785 nt, synthetic construct
  source 1..5785: mol_type = other RNA
aggaaataagagagaaaagaagagtaagaagaaatataagagccaccatggcccctaagaagaagcgtaaagtgagccggatggaacgcctcgtctacgaggtgcggcagaagtgcagaaacatcgaggacatctgcatctcctgcggatctctgaacgtgaccctggagcacccactgttcatcggcggcatgtgccagaactgtaaaaactgttttctggagtgtgcctatcaatacgacgatgacggctaccagagctactgcaccatctgttgcggcggaagagaggtgctgatgtgtggaaataacaactgctgccggtgcttctgcgtggaatgcgtggacctgctggtgggccccggcgccgcccaggccgctattaaggaagatccttggaactgctacatgtgcggccacaagggcacatacggcctgctgagacggagagaggactggcctagcagactgcagatgttcttcgccaataaccacgaccaggagttcgacccccctaaggtgtaccctcccgtccccgccgagaagagaaagcccatccgggtcctgagcctgttcgatggcatcgccaccggtctgctggtgctgaaggacctgggcatccaggtggataggtacattgcctccgaggtgtgcgaggactccatcaccgtgggaatggtgcgtcatcagggcaagatcatgtacgtgggcgacgtgcggagcgtgacacagaagcatatccaggagtggggccctttcgacctggtgatcggcggcagcccttgcaatgacctgagcatcgtgaacccagcccggaagggcctgtacgagggaaccggcagactgttcttcgagttttacagactgctgcacgacgcccggcctaaggaaggcgacgaccggcccttcttttggctgttcgagaatgtggtggccatgggagtcagcgacaagcgggatattagccggttcctggagagcaaccccgtgatgatcgatgccaaggaagtgagcgccgcccaccgggccagatacttctggggcaatctgcctggcatgaacagacccctggccagcaccgtgaacgacaagctggagctgcaggagtgcctggagcacggccggatcgccaagttcagcaaggtgagaaccatcaccacccgaagcaacagcatcaaacaaggcaaggaccagcactttcctgtgttcatgaacgagaaggaggacatcctgtggtgtaccgagatggagagagtgttcgggttcccagtccactacacagatgtcagcaacatgtctagactggccagacagagactgctgggaagaagctggtccgtccctgtgatcagacacctgttcgcccctctgaaggagtacttcgcctgcgtgagcagcggcaacagcaacgccaacagccggggccccagcttctctagcggcctggtgccactgtccctgagagggagccacatgggccccatggagatctacaaaaccgtgagcgcctggaagcggcagcctgtgcgcgtgctgagcctgtttcggaatatcgataaagtcctgaaaagcctgggattcctggagagcggctctggctccggcggtggcaccctgaagtacgtggaggatgtgacaaacgtggtcagacgggatgtggagaagtggggccccttcgatctggtgtacggcagcacccaacccctgggcagctcttgtgaccggtgccctggctggtacatgtttcagttccaccggatcctgcagtacgccctgccgagacaggagtcccagcggccattcttttggattttcatggacaacttgctgctgaccgaggatgaccaggaaactaccactcggttcctgcagaccgaagccgtgaccctgcaggacgtgagaggccgggactaccagaacgccatgcgggtgtggtccaacatccctggactgaaaagcaagcacgcacctctgacccctaaagaagaggagtacctgcaggcccaggtgcggagcagaagcaagctggacgcccctaaggtggatctgctggtgaagaattgcctcctgcccctgagagagtacttcaagtatttcagccagaatagtctgcccctgggaggcagcggcggcggcagccagaccctggtgaccttcaaggacgtgttcgtggacttcaccagggaggagtggaagctgctggacaccgcccagcagatcgtgtacaggaacgtgatgctggagaactacaagaacctggtgagcctgggctaccagctgaccaagcccgacgtgatcctgaggctggagaagggcgaggagccctgggtggtggagaggggcatccaccaggagacccaccccgacagcgagaccgccggcggcccaagcagcggcgcccctcctcccagcggcggcagcccagccggctccccaacctctaccgaggagggcacctctgagtccgccacccccgagagcggccctggcacctccaccgagcccagcgagggcagcgcacccggcagccctgccggcagccccacctccacagaggagggaaccagcaccgagcccagcgaaggcagcgccccaggcaccagcaccgagcctagtgagcaggagattaaacggatcaacaagatcagaagaagacttgtgaaagacagcaacaccaagaaggccggcaagacaggccccatgaaaaccctgctggttagagtgatgacacccgatctgagagagcggctggaaaacctgagaaagaagcctgaaaatatcccccagcccatcagcaatacatctagagccaacctgaataagctgctgaccgattacaccgaaatgaagaaggcgatcctgcatgtgtactgggaagagttccagaaggaccctgtgggcctgatgagccgggtggcccagcctgccagcaagaagatcgatcagaacaagctgaaacctgagatggacgagaagggcaacctgaccaccgccggctttgcctgctctcagtgtggccagcccctgttcgtgtacaagctggagcaggtgtctgagaagggcaaggcttacaccaactacttcggacggtgcaatgtggccgagcacgaaaagctgatcctgctggcccagctgaagcccgagaaggatagcgacgaagccgtgacatatagcctgggaaagtttgggcagagggccctggatttctacagcattcatgtgaccaaggagtccacccaccccgtgaagcccctggcccagatcgccggaaacagatacgcctccggacctgtgggaaaggccctgagcgacgcatgtatgggcacaatcgcctccttcctgtctaagtaccaggacatcatcatcgaacaccagaaggtggtgaagggcaaccagaagagactggagagcctgcgggagctggccggcaaggaaaacctggaataccctagcgtgaccctgccacctcagcctcacaccaaggagggcgttgatgcctacaacgaagtgatcgcccgggtgcgaatgtgggtgaacctgaacctgtggcagaagctgaagctaagcagagatgatgccaagcctctgctgagactgaagggattcccttcctttcctctggtcgagagacaggccaacgaagtggactggtgggacatggtgtgtaacgtgaagaagctgatcaacgagaaaaaggaggatggcaaggtgttttggcagaatctggctggctacaagagacaggaagccctgagaccatacctgagcagcgaggaagatcggaagaagggaaagaaattcgctcggtaccagctgggcgacctgctgctgcacctggaaaagaagcacggcgaggactggggaaaggtgtacgacgaggcctgggagcggattgacaagaaagtggaaggcctgagcaagcacatcaagctggaagaggaacggagaagcgaggacgcccagagcaaggccgccctgaccgactggctgcgggctaaggccagcttcgtgatcgagggcctgaaggaggccgacaaggacgagttctgcagatgcgagctgaagctgcagaagtggtacggggacctgcggggaaagcccttcgccatcgaagccgagaacagcatcctggacatcagcggcttcagcaagcagtacaactgtgccttcatctggcagaaggacggcgtgaagaagctgaacctgtacctgatcatcaactacttcaagggcggcaagctgcggttcaagaagatcaaacctgaagccttcgaagccaacagattctacaccgtgatcaacaaaaagagcggcgagatcgtgcccatggaggtgaacttcaacttcgacgaccccaacctgatcatcctgcctctggcctttggcaagagacagggcagagaattcatctggaacgacctgctgtccctggaaaccggcagcctgaagctggccaacggaagagtgatcgagaagacactgtacaacagaagaacccggcaggatgagcctgccctgttcgtggccctgaccttcgagcggcgggaggtcctggactcctccaatatcaaaccaatgaacctgatcggcgtggcaagaggcgaaaacatccccgccgtgatcgccctgaccgaccccgagggctgcccactgagccggtttaaggatagcctgggaaacccaacccacatcctgagaatcggcgagagctataaggagaagcagcggaccatccaggccaagaaggaggtggagcagcggagagccggcggctacagccggaagtacgccagcaaagccaagaatctggcagacgatatggtgagaaacaccgctagagatctgctgtactacgccgtgacccaggatgccatgctgatcttcgccaacctgagccggggcttcggccggcagggcaagcggaccttcatggccgagagacagtacacacggatggaggactggctgaccgccaagctggcctacgagggcctgagcaagacctacctgtccaagacactggcccagtacacctccaagacatgcagcaactgtgggtttaccatcaccagcgccgactacgacagggtgctggagaagctgaagaagacagcaacaggctggatgaccacaattaacggcaaggagctgaaggtggagggccagattacctactacaacagatacaagagacagaacgtagtcaaggacctgtccgtcgagctggatagactgagcgaagaatctgtgaacaacgacatctcctcctggacaaagggcagaagcggagaagctctgagcctcctgaagaaaagattctcccatagacccgtgcaggagaagttcgtgtgcctgaactgcggcttcgagacacacgcagccgagcaagccgccctgaacatcgccagatcctggctgttcctgcggagccaggagtacaagaaataccagacaaacaagacaaccggcaacaccgataagagagccttcgtcgagacctggcagtccttttaccggaagaagcttaaggaggtgtggaaacctgccgtgcggtctggcggatctggcggaggctccaccagccccaagaaaaagagaaaagtctaagctgccttctgcggggcttgccttctggccatgcccttcttctctcccttgcacctgtacctcttggtctttgaataaagcctgagtaggaaggctagcaaaaaaaaaaaaaaaaaaaaaaaaaaaaaaaaaaaaaaaaaaaaaaaaaaaaaaaaaaaaaaaaaaaaaaaaaaaaaaaa

SEQ ID NO: 13056 - RNA, 5785 nt, synthetic construct
  source 1..5785: mol_type = other RNA
aggaaataagagagaaaagaagagtaagaagaaatataagagccaccatggcccctaagaagaagcgtaaagtgagccggatggaacgcctcgtctacgaggtgcggcagaagtgcagaaacatcgaggacatctgcatctcctgcggatctctgaacgtgaccctggagcacccactgttcatcggcggcatgtgccagaactgtaaaaactgttttctggagtgtgcctatcaatacgacgatgacggctaccagagctactgcaccatctgttgcggcggaagagaggtgctgatgtgtggaaataacaactgctgccggtgcttctgcgtggaatgcgtggacctgctggtgggccccggcgccgcccaggccgctattaaggaagatccttggaactgctacatgtgcggccacaagggcacatacggcctgctgagacggagagaggactggcctagcagactgcagatgttcttcgccaataaccacgaccaggagttcgacccccctaaggtgtaccctcccgtccccgccgagaagagaaagcccatccgggtcctgagcctgttcgatggcatcgccaccggtctgctggtgctgaaggacctgggcatccaggtggataggtacattgcctccgaggtgtgcgaggactccatcaccgtgggaatggtgcgtcatcagggcaagatcatgtacgtgggcgacgtgcggagcgtgacacagaagcatatccaggagtggggccctttcgacctggtgatcggcggcagcccttgcaatgacctgagcatcgtgaacccagcccggaagggcctgtacgagggaaccggcagactgttcttcgagttttacagactgctgcacgacgcccggcctaaggaaggcgacgaccggcccttcttttggctgttcgagaatgtggtggccatgggagtcagcgacaagcgggatattagccggttcctggagagcaaccccgtgatgatcgatgccaaggaagtgagcgccgcccaccgggccagatacttctggggcaatctgcctggcatgaacagacccctggccagcaccgtgaacgacaagctggagctgcaggagtgcctggagcacggccggatcgccaagttcagcaaggtgagaaccatcaccacccgaagcaacagcatcaaacaaggcaaggaccagcactttcctgtgttcatgaacgagaaggaggacatcctgtggtgtaccgagatggagagagtgttcgggttcccagtccactacacagatgtcagcaacatgtctagactggccagacagagactgctgggaagaagctggtccgtccctgtgatcagacacctgttcgcccctctgaaggagtacttcgcctgcgtgagcagcggcaacagcaacgccaacagccggggccccagcttctctagcggcctggtgccactgtccctgagagggagccacatgggccccatggagatctacaaaaccgtgagcgcctggaagcggcagcctgtgcgcgtgctgagcctgtttcggaatatcgataaagtcctgaaaagcctgggattcctggagagcggctctggctccggcggtggcaccctgaagtacgtggaggatgtgacaaacgtggtcagacgggatgtggagaagtggggccccttcgatctggtgtacggcagcacccaacccctgggcagctcttgtgaccggtgccctggctggtacatgtttcagttccaccggatcctgcagtacgccctgccgagacaggagtcccagcggccattcttttggattttcatggacaacttgctgctgaccgaggatgaccaggaaactaccactcggttcctgcagaccgaagccgtgaccctgcaggacgtgagaggccgggactaccagaacgccatgcgggtgtggtccaacatccctggactgaaaagcaagcacgcacctctgacccctaaagaagaggagtacctgcaggcccaggtgcggagcagaagcaagctggacgcccctaaggtggatctgctggtgaagaattgcctcctgcccctgagagagtacttcaagtatttcagccagaatagtctgcccctgggaggcagcggcggcggccccaaggcccccgtgaccttcggcgacgtggccatctacttcagcaaggaggagtgggagtgcctgagccccaaccagaaggacctgtacgaggacgtgatgatggagaactaccagaacctggccagcatcggcttcagctgcaggaggcccaacgtgatcaccctgctggagaagggcgaggccccctggatggccgagcccctgaggaggaggcagggccccgacagcggcagcaagaagggcggcccaagcagcggcgcccctcctcccagcggcggcagcccagccggctccccaacctctaccgaggagggcacctctgagtccgccacccccgagagcggccctggcacctccaccgagcccagcgagggcagcgcacccggcagccctgccggcagccccacctccacagaggagggaaccagcaccgagcccagcgaaggcagcgccccaggcaccagcaccgagcctagtgagcaggagattaaacggatcaacaagatcagaagaagacttgtgaaagacagcaacaccaagaaggccggcaagacaggccccatgaaaaccctgctggttagagtgatgacacccgatctgagagagcggctggaaaacctgagaaagaagcctgaaaatatcccccagcccatcagcaatacatctagagccaacctgaataagctgctgaccgattacaccgaaatgaagaaggcgatcctgcatgtgtactgggaagagttccagaaggaccctgtgggcctgatgagccgggtggcccagcctgccagcaagaagatcgatcagaacaagctgaaacctgagatggacgagaagggcaacctgaccaccgccggctttgcctgctctcagtgtggccagcccctgttcgtgtacaagctggagcaggtgtctgagaagggcaaggcttacaccaactacttcggacggtgcaatgtggccgagcacgaaaagctgatcctgctggcccagctgaagcccgagaaggatagcgacgaagccgtgacatatagcctgggaaagtttgggcagagggccctggatttctacagcattcatgtgaccaaggagtccacccaccccgtgaagcccctggcccagatcgccggaaacagatacgcctccggacctgtgggaaaggccctgagcgacgcatgtatgggcacaatcgcctccttcctgtctaagtaccaggacatcatcatcgaacaccagaaggtggtgaagggcaaccagaagagactggagagcctgcgggagctggccggcaaggaaaacctggaataccctagcgtgaccctgccacctcagcctcacaccaaggagggcgttgatgcctacaacgaagtgatcgcccgggtgcgaatgtgggtgaacctgaacctgtggcagaagctgaagctaagcagagatgatgccaagcctctgctgagactgaagggattcccttcctttcctctggtcgagagacaggccaacgaagtggactggtgggacatggtgtgtaacgtgaagaagctgatcaacgagaaaaaggaggatggcaaggtgttttggcagaatctggctggctacaagagacaggaagccctgagaccatacctgagcagcgaggaagatcggaagaagggaaagaaattcgctcggtaccagctgggcgacctgctgctgcacctggaaaagaagcacggcgaggactggggaaaggtgtacgacgaggcctgggagcggattgacaagaaagtggaaggcctgagcaagcacatcaagctggaagaggaacggagaagcgaggacgcccagagcaaggccgccctgaccgactggctgcgggctaaggccagcttcgtgatcgagggcctgaaggaggccgacaaggacgagttctgcagatgcgagctgaagctgcagaagtggtacggggacctgcggggaaagcccttcgccatcgaagccgagaacagcatcctggacatcagcggcttcagcaagcagtacaactgtgccttcatctggcagaaggacggcgtgaagaagctgaacctgtacctgatcatcaactacttcaagggcggcaagctgcggttcaagaagatcaaacctgaagccttcgaagccaacagattctacaccgtgatcaacaaaaagagcggcgagatcgtgcccatggaggtgaacttcaacttcgacgaccccaacctgatcatcctgcctctggcctttggcaagagacagggcagagaattcatctggaacgacctgctgtccctggaaaccggcagcctgaagctggccaacggaagagtgatcgagaagacactgtacaacagaagaacccggcaggatgagcctgccctgttcgtggccctgaccttcgagcggcgggaggtcctggactcctccaatatcaaaccaatgaacctgatcggcgtggcaagaggcgaaaacatccccgccgtgatcgccctgaccgaccccgagggctgcccactgagccggtttaaggatagcctgggaaacccaacccacatcctgagaatcggcgagagctataaggagaagcagcggaccatccaggccaagaaggaggtggagcagcggagagccggcggctacagccggaagtacgccagcaaagccaagaatctggcagacgatatggtgagaaacaccgctagagatctgctgtactacgccgtgacccaggatgccatgctgatcttcgccaacctgagccggggcttcggccggcagggcaagcggaccttcatggccgagagacagtacacacggatggaggactggctgaccgccaagctggcctacgagggcctgagcaagacctacctgtccaagacactggcccagtacacctccaagacatgcagcaactgtgggtttaccatcaccagcgccgactacgacagggtgctggagaagctgaagaagacagcaacaggctggatgaccacaattaacggcaaggagctgaaggtggagggccagattacctactacaacagatacaagagacagaacgtagtcaaggacctgtccgtcgagctggatagactgagcgaagaatctgtgaacaacgacatctcctcctggacaaagggcagaagcggagaagctctgagcctcctgaagaaaagattctcccatagacccgtgcaggagaagttcgtgtgcctgaactgcggcttcgagacacacgcagccgagcaagccgccctgaacatcgccagatcctggctgttcctgcggagccaggagtacaagaaataccagacaaacaagacaaccggcaacaccgataagagagccttcgtcgagacctggcagtccttttaccggaagaagcttaaggaggtgtggaaacctgccgtgcggtctggcggatctggcggaggctccaccagccccaagaaaaagagaaaagtctaagctgccttctgcggggcttgccttctggccatgcccttcttctctcccttgcacctgtacctcttggtctttgaataaagcctgagtaggaaggctagcaaaaaaaaaaaaaaaaaaaaaaaaaaaaaaaaaaaaaaaaaaaaaaaaaaaaaaaaaaaaaaaaaaaaaaaaaaaaaaaa

SEQ ID NO: 13057 - RNA, 5785 nt, synthetic construct
  source 1..5785: mol_type = other RNA
aggaaataagagagaaaagaagagtaagaagaaatataagagccaccatggcccctaagaagaagcgtaaagtgagccggatggaacgcctcgtctacgaggtgcggcagaagtgcagaaacatcgaggacatctgcatctcctgcggatctctgaacgtgaccctggagcacccactgttcatcggcggcatgtgccagaactgtaaaaactgttttctggagtgtgcctatcaatacgacgatgacggctaccagagctactgcaccatctgttgcggcggaagagaggtgctgatgtgtggaaataacaactgctgccggtgcttctgcgtggaatgcgtggacctgctggtgggccccggcgccgcccaggccgctattaaggaagatccttggaactgctacatgtgcggccacaagggcacatacggcctgctgagacggagagaggactggcctagcagactgcagatgttcttcgccaataaccacgaccaggagttcgacccccctaaggtgtaccctcccgtccccgccgagaagagaaagcccatccgggtcctgagcctgttcgatggcatcgccaccggtctgctggtgctgaaggacctgggcatccaggtggataggtacattgcctccgaggtgtgcgaggactccatcaccgtgggaatggtgcgtcatcagggcaagatcatgtacgtgggcgacgtgcggagcgtgacacagaagcatatccaggagtggggccctttcgacctggtgatcggcggcagcccttgcaatgacctgagcatcgtgaacccagcccggaagggcctgtacgagggaaccggcagactgttcttcgagttttacagactgctgcacgacgcccggcctaaggaaggcgacgaccggcccttcttttggctgttcgagaatgtggtggccatgggagtcagcgacaagcgggatattagccggttcctggagagcaaccccgtgatgatcgatgccaaggaagtgagcgccgcccaccgggccagatacttctggggcaatctgcctggcatgaacagacccctggccagcaccgtgaacgacaagctggagctgcaggagtgcctggagcacggccggatcgccaagttcagcaaggtgagaaccatcaccacccgaagcaacagcatcaaacaaggcaaggaccagcactttcctgtgttcatgaacgagaaggaggacatcctgtggtgtaccgagatggagagagtgttcgggttcccagtccactacacagatgtcagcaacatgtctagactggccagacagagactgctgggaagaagctggtccgtccctgtgatcagacacctgttcgcccctctgaaggagtacttcgcctgcgtgagcagcggcaacagcaacgccaacagccggggccccagcttctctagcggcctggtgccactgtccctgagagggagccacatgggccccatggagatctacaaaaccgtgagcgcctggaagcggcagcctgtgcgcgtgctgagcctgtttcggaatatcgataaagtcctgaaaagcctgggattcctggagagcggctctggctccggcggtggcaccctgaagtacgtggaggatgtgacaaacgtggtcagacgggatgtggagaagtggggccccttcgatctggtgtacggcagcacccaacccctgggcagctcttgtgaccggtgccctggctggtacatgtttcagttccaccggatcctgcagtacgccctgccgagacaggagtcccagcggccattcttttggattttcatggacaacttgctgctgaccgaggatgaccaggaaactaccactcggttcctgcagaccgaagccgtgaccctgcaggacgtgagaggccgggactaccagaacgccatgcgggtgtggtccaacatccctggactgaaaagcaagcacgcacctctgacccctaaagaagaggagtacctgcaggcccaggtgcggagcagaagcaagctggacgcccctaaggtggatctgctggtgaagaattgcctcctgcccctgagagagtacttcaagtatttcagccagaatagtctgcccctgggaggcagcggcggcggcagcctggagagcgagctgttcagggacgtggccatcgtgttcagccaggaggagtggcagtgcctggcccccgcccagagggacctgtacagggacgtgatgctggagacctacagcaacctggtgagcctgggcctggccatcagcaagcccgacgtgatcagcttcctggagcagggcaaggagccctggatggtggagagggtggtgagcggcggcctgtgccccgtgctgaagtacaggggcggcccaagcagcggcgcccctcctcccagcggcggcagcccagccggctccccaacctctaccgaggagggcacctctgagtccgccacccccgagagcggccctggcacctccaccgagcccagcgagggcagcgcacccggcagccctgccggcagccccacctccacagaggagggaaccagcaccgagcccagcgaaggcagcgccccaggcaccagcaccgagcctagtgagcaggagattaaacggatcaacaagatcagaagaagacttgtgaaagacagcaacaccaagaaggccggcaagacaggccccatgaaaaccctgctggttagagtgatgacacccgatctgagagagcggctggaaaacctgagaaagaagcctgaaaatatcccccagcccatcagcaatacatctagagccaacctgaataagctgctgaccgattacaccgaaatgaagaaggcgatcctgcatgtgtactgggaagagttccagaaggaccctgtgggcctgatgagccgggtggcccagcctgccagcaagaagatcgatcagaacaagctgaaacctgagatggacgagaagggcaacctgaccaccgccggctttgcctgctctcagtgtggccagcccctgttcgtgtacaagctggagcaggtgtctgagaagggcaaggcttacaccaactacttcggacggtgcaatgtggccgagcacgaaaagctgatcctgctggcccagctgaagcccgagaaggatagcgacgaagccgtgacatatagcctgggaaagtttgggcagagggccctggatttctacagcattcatgtgaccaaggagtccacccaccccgtgaagcccctggcccagatcgccggaaacagatacgcctccggacctgtgggaaaggccctgagcgacgcatgtatgggcacaatcgcctccttcctgtctaagtaccaggacatcatcatcgaacaccagaaggtggtgaagggcaaccagaagagactggagagcctgcgggagctggccggcaaggaaaacctggaataccctagcgtgaccctgccacctcagcctcacaccaaggagggcgttgatgcctacaacgaagtgatcgcccgggtgcgaatgtgggtgaacctgaacctgtggcagaagctgaagctaagcagagatgatgccaagcctctgctgagactgaagggattcccttcctttcctctggtcgagagacaggccaacgaagtggactggtgggacatggtgtgtaacgtgaagaagctgatcaacgagaaaaaggaggatggcaaggtgttttggcagaatctggctggctacaagagacaggaagccctgagaccatacctgagcagcgaggaagatcggaagaagggaaagaaattcgctcggtaccagctgggcgacctgctgctgcacctggaaaagaagcacggcgaggactggggaaaggtgtacgacgaggcctgggagcggattgacaagaaagtggaaggcctgagcaagcacatcaagctggaagaggaacggagaagcgaggacgcccagagcaaggccgccctgaccgactggctgcgggctaaggccagcttcgtgatcgagggcctgaaggaggccgacaaggacgagttctgcagatgcgagctgaagctgcagaagtggtacggggacctgcggggaaagcccttcgccatcgaagccgagaacagcatcctggacatcagcggcttcagcaagcagtacaactgtgccttcatctggcagaaggacggcgtgaagaagctgaacctgtacctgatcatcaactacttcaagggcggcaagctgcggttcaagaagatcaaacctgaagccttcgaagccaacagattctacaccgtgatcaacaaaaagagcggcgagatcgtgcccatggaggtgaacttcaacttcgacgaccccaacctgatcatcctgcctctggcctttggcaagagacagggcagagaattcatctggaacgacctgctgtccctggaaaccggcagcctgaagctggccaacggaagagtgatcgagaagacactgtacaacagaagaacccggcaggatgagcctgccctgttcgtggccctgaccttcgagcggcgggaggtcctggactcctccaatatcaaaccaatgaacctgatcggcgtggcaagaggcgaaaacatccccgccgtgatcgccctgaccgaccccgagggctgcccactgagccggtttaaggatagcctgggaaacccaacccacatcctgagaatcggcgagagctataaggagaagcagcggaccatccaggccaagaaggaggtggagcagcggagagccggcggctacagccggaagtacgccagcaaagccaagaatctggcagacgatatggtgagaaacaccgctagagatctgctgtactacgccgtgacccaggatgccatgctgatcttcgccaacctgagccggggcttcggccggcagggcaagcggaccttcatggccgagagacagtacacacggatggaggactggctgaccgccaagctggcctacgagggcctgagcaagacctacctgtccaagacactggcccagtacacctccaagacatgcagcaactgtgggtttaccatcaccagcgccgactacgacagggtgctggagaagctgaagaagacagcaacaggctggatgaccacaattaacggcaaggagctgaaggtggagggccagattacctactacaacagatacaagagacagaacgtagtcaaggacctgtccgtcgagctggatagactgagcgaagaatctgtgaacaacgacatctcctcctggacaaagggcagaagcggagaagctctgagcctcctgaagaaaagattctcccatagacccgtgcaggagaagttcgtgtgcctgaactgcggcttcgagacacacgcagccgagcaagccgccctgaacatcgccagatcctggctgttcctgcggagccaggagtacaagaaataccagacaaacaagacaaccggcaacaccgataagagagccttcgtcgagacctggcagtccttttaccggaagaagcttaaggaggtgtggaaacctgccgtgcggtctggcggatctggcggaggctccaccagccccaagaaaaagagaaaagtctaagctgccttctgcggggcttgccttctggccatgcccttcttctctcccttgcacctgtacctcttggtctttgaataaagcctgagtaggaaggctagcaaaaaaaaaaaaaaaaaaaaaaaaaaaaaaaaaaaaaaaaaaaaaaaaaaaaaaaaaaaaaaaaaaaaaaaaaaaaaaaa

SEQ ID NO: 13058 - RNA, 5785 nt, synthetic construct
  source 1..5785: mol_type = other RNA
aggaaataagagagaaaagaagagtaagaagaaatataagagccaccatggcccctaagaagaagcgtaaagtgagccggatggaacgcctcgtctacgaggtgcggcagaagtgcagaaacatcgaggacatctgcatctcctgcggatctctgaacgtgaccctggagcacccactgttcatcggcggcatgtgccagaactgtaaaaactgttttctggagtgtgcctatcaatacgacgatgacggctaccagagctactgcaccatctgttgcggcggaagagaggtgctgatgtgtggaaataacaactgctgccggtgcttctgcgtggaatgcgtggacctgctggtgggccccggcgccgcccaggccgctattaaggaagatccttggaactgctacatgtgcggccacaagggcacatacggcctgctgagacggagagaggactggcctagcagactgcagatgttcttcgccaataaccacgaccaggagttcgacccccctaaggtgtaccctcccgtccccgccgagaagagaaagcccatccgggtcctgagcctgttcgatggcatcgccaccggtctgctggtgctgaaggacctgggcatccaggtggataggtacattgcctccgaggtgtgcgaggactccatcaccgtgggaatggtgcgtcatcagggcaagatcatgtacgtgggcgacgtgcggagcgtgacacagaagcatatccaggagtggggccctttcgacctggtgatcggcggcagcccttgcaatgacctgagcatcgtgaacccagcccggaagggcctgtacgagggaaccggcagactgttcttcgagttttacagactgctgcacgacgcccggcctaaggaaggcgacgaccggcccttcttttggctgttcgagaatgtggtggccatgggagtcagcgacaagcgggatattagccggttcctggagagcaaccccgtgatgatcgatgccaaggaagtgagcgccgcccaccgggccagatacttctggggcaatctgcctggcatgaacagacccctggccagcaccgtgaacgacaagctggagctgcaggagtgcctggagcacggccggatcgccaagttcagcaaggtgagaaccatcaccacccgaagcaacagcatcaaacaaggcaaggaccagcactttcctgtgttcatgaacgagaaggaggacatcctgtggtgtaccgagatggagagagtgttcgggttcccagtccactacacagatgtcagcaacatgtctagactggccagacagagactgctgggaagaagctggtccgtccctgtgatcagacacctgttcgcccctctgaaggagtacttcgcctgcgtgagcagcggcaacagcaacgccaacagccggggccccagcttctctagcggcctggtgccactgtccctgagagggagccacatgggccccatggagatctacaaaaccgtgagcgcctggaagcggcagcctgtgcgcgtgctgagcctgtttcggaatatcgataaagtcctgaaaagcctgggattcctggagagcggctctggctccggcggtggcaccctgaagtacgtggaggatgtgacaaacgtggtcagacgggatgtggagaagtggggccccttcgatctggtgtacggcagcacccaacccctgggcagctcttgtgaccggtgccctggctggtacatgtttcagttccaccggatcctgcagtacgccctgccgagacaggagtcccagcggccattcttttggattttcatggacaacttgctgctgaccgaggatgaccaggaaactaccactcggttcctgcagaccgaagccgtgaccctgcaggacgtgagaggccgggactaccagaacgccatgcgggtgtggtccaacatccctggactgaaaagcaagcacgcacctctgacccctaaagaagaggagtacctgcaggcccaggtgcggagcagaagcaagctggacgcccctaaggtggatctgctggtgaagaattgcctcctgcccctgagagagtacttcaagtatttcagccagaatagtctgcccctgggaggcagcggcggcggcatgagccagggcagcgtgaccttcagggacgtggccatcgacttcagccaggaggagtggaagtggctgcagcccgcccagagggacctgtacaggtgcgtgatgctggagaactacggccacctggtgagcctgggcctgagcatcagcaagcccgacgtggtgagcctgctggagcagggcaaggagccctggctgggcaagagggacgtgaagagggacctgttccccgtgctgaaggagggcggcccaagcagcggcgcccctcctcccagcggcggcagcccagccggctccccaacctctaccgaggagggcacctctgagtccgccacccccgagagcggccctggcacctccaccgagcccagcgagggcagcgcacccggcagccctgccggcagccccacctccacagaggagggaaccagcaccgagcccagcgaaggcagcgccccaggcaccagcaccgagcctagtgagcaggagattaaacggatcaacaagatcagaagaagacttgtgaaagacagcaacaccaagaaggccggcaagacaggccccatgaaaaccctgctggttagagtgatgacacccgatctgagagagcggctggaaaacctgagaaagaagcctgaaaatatcccccagcccatcagcaatacatctagagccaacctgaataagctgctgaccgattacaccgaaatgaagaaggcgatcctgcatgtgtactgggaagagttccagaaggaccctgtgggcctgatgagccgggtggcccagcctgccagcaagaagatcgatcagaacaagctgaaacctgagatggacgagaagggcaacctgaccaccgccggctttgcctgctctcagtgtggccagcccctgttcgtgtacaagctggagcaggtgtctgagaagggcaaggcttacaccaactacttcggacggtgcaatgtggccgagcacgaaaagctgatcctgctggcccagctgaagcccgagaaggatagcgacgaagccgtgacatatagcctgggaaagtttgggcagagggccctggatttctacagcattcatgtgaccaaggagtccacccaccccgtgaagcccctggcccagatcgccggaaacagatacgcctccggacctgtgggaaaggccctgagcgacgcatgtatgggcacaatcgcctccttcctgtctaagtaccaggacatcatcatcgaacaccagaaggtggtgaagggcaaccagaagagactggagagcctgcgggagctggccggcaaggaaaacctggaataccctagcgtgaccctgccacctcagcctcacaccaaggagggcgttgatgcctacaacgaagtgatcgcccgggtgcgaatgtgggtgaacctgaacctgtggcagaagctgaagctaagcagagatgatgccaagcctctgctgagactgaagggattcccttcctttcctctggtcgagagacaggccaacgaagtggactggtgggacatggtgtgtaacgtgaagaagctgatcaacgagaaaaaggaggatggcaaggtgttttggcagaatctggctggctacaagagacaggaagccctgagaccatacctgagcagcgaggaagatcggaagaagggaaagaaattcgctcggtaccagctgggcgacctgctgctgcacctggaaaagaagcacggcgaggactggggaaaggtgtacgacgaggcctgggagcggattgacaagaaagtggaaggcctgagcaagcacatcaagctggaagaggaacggagaagcgaggacgcccagagcaaggccgccctgaccgactggctgcgggctaaggccagcttcgtgatcgagggcctgaaggaggccgacaaggacgagttctgcagatgcgagctgaagctgcagaagtggtacggggacctgcggggaaagcccttcgccatcgaagccgagaacagcatcctggacatcagcggcttcagcaagcagtacaactgtgccttcatctggcagaaggacggcgtgaagaagctgaacctgtacctgatcatcaactacttcaagggcggcaagctgcggttcaagaagatcaaacctgaagccttcgaagccaacagattctacaccgtgatcaacaaaaagagcggcgagatcgtgcccatggaggtgaacttcaacttcgacgaccccaacctgatcatcctgcctctggcctttggcaagagacagggcagagaattcatctggaacgacctgctgtccctggaaaccggcagcctgaagctggccaacggaagagtgatcgagaagacactgtacaacagaagaacccggcaggatgagcctgccctgttcgtggccctgaccttcgagcggcgggaggtcctggactcctccaatatcaaaccaatgaacctgatcggcgtggcaagaggcgaaaacatccccgccgtgatcgccctgaccgaccccgagggctgcccactgagccggtttaaggatagcctgggaaacccaacccacatcctgagaatcggcgagagctataaggagaagcagcggaccatccaggccaagaaggaggtggagcagcggagagccggcggctacagccggaagtacgccagcaaagccaagaatctggcagacgatatggtgagaaacaccgctagagatctgctgtactacgccgtgacccaggatgccatgctgatcttcgccaacctgagccggggcttcggccggcagggcaagcggaccttcatggccgagagacagtacacacggatggaggactggctgaccgccaagctggcctacgagggcctgagcaagacctacctgtccaagacactggcccagtacacctccaagacatgcagcaactgtgggtttaccatcaccagcgccgactacgacagggtgctggagaagctgaagaagacagcaacaggctggatgaccacaattaacggcaaggagctgaaggtggagggccagattacctactacaacagatacaagagacagaacgtagtcaaggacctgtccgtcgagctggatagactgagcgaagaatctgtgaacaacgacatctcctcctggacaaagggcagaagcggagaagctctgagcctcctgaagaaaagattctcccatagacccgtgcaggagaagttcgtgtgcctgaactgcggcttcgagacacacgcagccgagcaagccgccctgaacatcgccagatcctggctgttcctgcggagccaggagtacaagaaataccagacaaacaagacaaccggcaacaccgataagagagccttcgtcgagacctggcagtccttttaccggaagaagcttaaggaggtgtggaaacctgccgtgcggtctggcggatctggcggaggctccaccagccccaagaaaaagagaaaagtctaagctgccttctgcggggcttgccttctggccatgcccttcttctctcccttgcacctgtacctcttggtctttgaataaagcctgagtaggaaggctagcaaaaaaaaaaaaaaaaaaaaaaaaaaaaaaaaaaaaaaaaaaaaaaaaaaaaaaaaaaaaaaaaaaaaaaaaaaaaaaaa

SEQ ID NO: 13059 - RNA, 5785 nt, synthetic construct
  source 1..5785: mol_type = other RNA
aggaaataagagagaaaagaagagtaagaagaaatataagagccaccatggcccctaagaagaagcgtaaagtgagccggatggaacgcctcgtctacgaggtgcggcagaagtgcagaaacatcgaggacatctgcatctcctgcggatctctgaacgtgaccctggagcacccactgttcatcggcggcatgtgccagaactgtaaaaactgttttctggagtgtgcctatcaatacgacgatgacggctaccagagctactgcaccatctgttgcggcggaagagaggtgctgatgtgtggaaataacaactgctgccggtgcttctgcgtggaatgcgtggacctgctggtgggccccggcgccgcccaggccgctattaaggaagatccttggaactgctacatgtgcggccacaagggcacatacggcctgctgagacggagagaggactggcctagcagactgcagatgttcttcgccaataaccacgaccaggagttcgacccccctaaggtgtaccctcccgtccccgccgagaagagaaagcccatccgggtcctgagcctgttcgatggcatcgccaccggtctgctggtgctgaaggacctgggcatccaggtggataggtacattgcctccgaggtgtgcgaggactccatcaccgtgggaatggtgcgtcatcagggcaagatcatgtacgtgggcgacgtgcggagcgtgacacagaagcatatccaggagtggggccctttcgacctggtgatcggcggcagcccttgcaatgacctgagcatcgtgaacccagcccggaagggcctgtacgagggaaccggcagactgttcttcgagttttacagactgctgcacgacgcccggcctaaggaaggcgacgaccggcccttcttttggctgttcgagaatgtggtggccatgggagtcagcgacaagcgggatattagccggttcctggagagcaaccccgtgatgatcgatgccaaggaagtgagcgccgcccaccgggccagatacttctggggcaatctgcctggcatgaacagacccctggccagcaccgtgaacgacaagctggagctgcaggagtgcctggagcacggccggatcgccaagttcagcaaggtgagaaccatcaccacccgaagcaacagcatcaaacaaggcaaggaccagcactttcctgtgttcatgaacgagaaggaggacatcctgtggtgtaccgagatggagagagtgttcgggttcccagtccactacacagatgtcagcaacatgtctagactggccagacagagactgctgggaagaagctggtccgtccctgtgatcagacacctgttcgcccctctgaaggagtacttcgcctgcgtgagcagcggcaacagcaacgccaacagccggggccccagcttctctagcggcctggtgccactgtccctgagagggagccacatgggccccatggagatctacaaaaccgtgagcgcctggaagcggcagcctgtgcgcgtgctgagcctgtttcggaatatcgataaagtcctgaaaagcctgggattcctggagagcggctctggctccggcggtggcaccctgaagtacgtggaggatgtgacaaacgtggtcagacgggatgtggagaagtggggccccttcgatctggtgtacggcagcacccaacccctgggcagctcttgtgaccggtgccctggctggtacatgtttcagttccaccggatcctgcagtacgccctgccgagacaggagtcccagcggccattcttttggattttcatggacaacttgctgctgaccgaggatgaccaggaaactaccactcggttcctgcagaccgaagccgtgaccctgcaggacgtgagaggccgggactaccagaacgccatgcgggtgtggtccaacatccctggactgaaaagcaagcacgcacctctgacccctaaagaagaggagtacctgcaggcccaggtgcggagcagaagcaagctggacgcccctaaggtggatctgctggtgaagaattgcctcctgcccctgagagagtacttcaagtatttcagccagaatagtctgcccctgggaggcagcggcggcggccagaaccccgtgaccttcagggacgtggccgtggacttcagcctggaggagtggaagtgcctgagccccgcccagagggccctgtacagggacgtgatgctggagaactacgagaacctggccagcgtgggccccaggctgcccttcagcaagccctacgtgatcagccagctggagaggggcgaggccccctggatgcccgaggaggaggtgcccagggaccactggcccgacctgttcaacggcggcccaagcagcggcgcccctcctcccagcggcggcagcccagccggctccccaacctctaccgaggagggcacctctgagtccgccacccccgagagcggccctggcacctccaccgagcccagcgagggcagcgcacccggcagccctgccggcagccccacctccacagaggagggaaccagcaccgagcccagcgaaggcagcgccccaggcaccagcaccgagcctagtgagcaggagattaaacggatcaacaagatcagaagaagacttgtgaaagacagcaacaccaagaaggccggcaagacaggccccatgaaaaccctgctggttagagtgatgacacccgatctgagagagcggctggaaaacctgagaaagaagcctgaaaatatcccccagcccatcagcaatacatctagagccaacctgaataagctgctgaccgattacaccgaaatgaagaaggcgatcctgcatgtgtactgggaagagttccagaaggaccctgtgggcctgatgagccgggtggcccagcctgccagcaagaagatcgatcagaacaagctgaaacctgagatggacgagaagggcaacctgaccaccgccggctttgcctgctctcagtgtggccagcccctgttcgtgtacaagctggagcaggtgtctgagaagggcaaggcttacaccaactacttcggacggtgcaatgtggccgagcacgaaaagctgatcctgctggcccagctgaagcccgagaaggatagcgacgaagccgtgacatatagcctgggaaagtttgggcagagggccctggatttctacagcattcatgtgaccaaggagtccacccaccccgtgaagcccctggcccagatcgccggaaacagatacgcctccggacctgtgggaaaggccctgagcgacgcatgtatgggcacaatcgcctccttcctgtctaagtaccaggacatcatcatcgaacaccagaaggtggtgaagggcaaccagaagagactggagagcctgcgggagctggccggcaaggaaaacctggaataccctagcgtgaccctgccacctcagcctcacaccaaggagggcgttgatgcctacaacgaagtgatcgcccgggtgcgaatgtgggtgaacctgaacctgtggcagaagctgaagctaagcagagatgatgccaagcctctgctgagactgaagggattcccttcctttcctctggtcgagagacaggccaacgaagtggactggtgggacatggtgtgtaacgtgaagaagctgatcaacgagaaaaaggaggatggcaaggtgttttggcagaatctggctggctacaagagacaggaagccctgagaccatacctgagcagcgaggaagatcggaagaagggaaagaaattcgctcggtaccagctgggcgacctgctgctgcacctggaaaagaagcacggcgaggactggggaaaggtgtacgacgaggcctgggagcggattgacaagaaagtggaaggcctgagcaagcacatcaagctggaagaggaacggagaagcgaggacgcccagagcaaggccgccctgaccgactggctgcgggctaaggccagcttcgtgatcgagggcctgaaggaggccgacaaggacgagttctgcagatgcgagctgaagctgcagaagtggtacggggacctgcggggaaagcccttcgccatcgaagccgagaacagcatcctggacatcagcggcttcagcaagcagtacaactgtgccttcatctggcagaaggacggcgtgaagaagctgaacctgtacctgatcatcaactacttcaagggcggcaagctgcggttcaagaagatcaaacctgaagccttcgaagccaacagattctacaccgtgatcaacaaaaagagcggcgagatcgtgcccatggaggtgaacttcaacttcgacgaccccaacctgatcatcctgcctctggcctttggcaagagacagggcagagaattcatctggaacgacctgctgtccctggaaaccggcagcctgaagctggccaacggaagagtgatcgagaagacactgtacaacagaagaacccggcaggatgagcctgccctgttcgtggccctgaccttcgagcggcgggaggtcctggactcctccaatatcaaaccaatgaacctgatcggcgtggcaagaggcgaaaacatccccgccgtgatcgccctgaccgaccccgagggctgcccactgagccggtttaaggatagcctgggaaacccaacccacatcctgagaatcggcgagagctataaggagaagcagcggaccatccaggccaagaaggaggtggagcagcggagagccggcggctacagccggaagtacgccagcaaagccaagaatctggcagacgatatggtgagaaacaccgctagagatctgctgtactacgccgtgacccaggatgccatgctgatcttcgccaacctgagccggggcttcggccggcagggcaagcggaccttcatggccgagagacagtacacacggatggaggactggctgaccgccaagctggcctacgagggcctgagcaagacctacctgtccaagacactggcccagtacacctccaagacatgcagcaactgtgggtttaccatcaccagcgccgactacgacagggtgctggagaagctgaagaagacagcaacaggctggatgaccacaattaacggcaaggagctgaaggtggagggccagattacctactacaacagatacaagagacagaacgtagtcaaggacctgtccgtcgagctggatagactgagcgaagaatctgtgaacaacgacatctcctcctggacaaagggcagaagcggagaagctctgagcctcctgaagaaaagattctcccatagacccgtgcaggagaagttcgtgtgcctgaactgcggcttcgagacacacgcagccgagcaagccgccctgaacatcgccagatcctggctgttcctgcggagccaggagtacaagaaataccagacaaacaagacaaccggcaacaccgataagagagccttcgtcgagacctggcagtccttttaccggaagaagcttaaggaggtgtggaaacctgccgtgcggtctggcggatctggcggaggctccaccagccccaagaaaaagagaaaagtctaagctgccttctgcggggcttgccttctggccatgcccttcttctctcccttgcacctgtacctcttggtctttgaataaagcctgagtaggaaggctagcaaaaaaaaaaaaaaaaaaaaaaaaaaaaaaaaaaaaaaaaaaaaaaaaaaaaaaaaaaaaaaaaaaaaaaaaaaaaaaaa

SEQ ID NO: 13060 - RNA, 5785 nt, synthetic construct
  source 1..5785: mol_type = other RNA
aggaaataagagagaaaagaagagtaagaagaaatataagagccaccatggcccctaagaagaagcgtaaagtgagccggatggaacgcctcgtctacgaggtgcggcagaagtgcagaaacatcgaggacatctgcatctcctgcggatctctgaacgtgaccctggagcacccactgttcatcggcggcatgtgccagaactgtaaaaactgttttctggagtgtgcctatcaatacgacgatgacggctaccagagctactgcaccatctgttgcggcggaagagaggtgctgatgtgtggaaataacaactgctgccggtgcttctgcgtggaatgcgtggacctgctggtgggccccggcgccgcccaggccgctattaaggaagatccttggaactgctacatgtgcggccacaagggcacatacggcctgctgagacggagagaggactggcctagcagactgcagatgttcttcgccaataaccacgaccaggagttcgacccccctaaggtgtaccctcccgtccccgccgagaagagaaagcccatccgggtcctgagcctgttcgatggcatcgccaccggtctgctggtgctgaaggacctgggcatccaggtggataggtacattgcctccgaggtgtgcgaggactccatcaccgtgggaatggtgcgtcatcagggcaagatcatgtacgtgggcgacgtgcggagcgtgacacagaagcatatccaggagtggggccctttcgacctggtgatcggcggcagcccttgcaatgacctgagcatcgtgaacccagcccggaagggcctgtacgagggaaccggcagactgttcttcgagttttacagactgctgcacgacgcccggcctaaggaaggcgacgaccggcccttcttttggctgttcgagaatgtggtggccatgggagtcagcgacaagcgggatattagccggttcctggagagcaaccccgtgatgatcgatgccaaggaagtgagcgccgcccaccgggccagatacttctggggcaatctgcctggcatgaacagacccctggccagcaccgtgaacgacaagctggagctgcaggagtgcctggagcacggccggatcgccaagttcagcaaggtgagaaccatcaccacccgaagcaacagcatcaaacaaggcaaggaccagcactttcctgtgttcatgaacgagaaggaggacatcctgtggtgtaccgagatggagagagtgttcgggttcccagtccactacacagatgtcagcaacatgtctagactggccagacagagactgctgggaagaagctggtccgtccctgtgatcagacacctgttcgcccctctgaaggagtacttcgcctgcgtgagcagcggcaacagcaacgccaacagccggggccccagcttctctagcggcctggtgccactgtccctgagagggagccacatgggccccatggagatctacaaaaccgtgagcgcctggaagcggcagcctgtgcgcgtgctgagcctgtttcggaatatcgataaagtcctgaaaagcctgggattcctggagagcggctctggctccggcggtggcaccctgaagtacgtggaggatgtgacaaacgtggtcagacgggatgtggagaagtggggccccttcgatctggtgtacggcagcacccaacccctgggcagctcttgtgaccggtgccctggctggtacatgtttcagttccaccggatcctgcagtacgccctgccgagacaggagtcccagcggccattcttttggattttcatggacaacttgctgctgaccgaggatgaccaggaaactaccactcggttcctgcagaccgaagccgtgaccctgcaggacgtgagaggccgggactaccagaacgccatgcgggtgtggtccaacatccctggactgaaaagcaagcacgcacctctgacccctaaagaagaggagtacctgcaggcccaggtgcggagcagaagcaagctggacgcccctaaggtggatctgctggtgaagaattgcctcctgcccctgagagagtacttcaagtatttcagccagaatagtctgcccctgggaggcagcggcggcggcaaggaggccttcatggccttcggcgacgtggccgtggacttcacccaggaggagtggaggctgctgagccccgcccagaggaccctgcacagggaggtgatgctggagacctacaaccacctggtgagcctggagatccccttcagcaagcccaagctgatcagccagctggagaggggcgaggagccctggatcaaggagaggcagaggcccctgagcctgtgccccgccggcagcaagctgggcggcccaagcagcggcgcccctcctcccagcggcggcagcccagccggctccccaacctctaccgaggagggcacctctgagtccgccacccccgagagcggccctggcacctccaccgagcccagcgagggcagcgcacccggcagccctgccggcagccccacctccacagaggagggaaccagcaccgagcccagcgaaggcagcgccccaggcaccagcaccgagcctagtgagcaggagattaaacggatcaacaagatcagaagaagacttgtgaaagacagcaacaccaagaaggccggcaagacaggccccatgaaaaccctgctggttagagtgatgacacccgatctgagagagcggctggaaaacctgagaaagaagcctgaaaatatcccccagcccatcagcaatacatctagagccaacctgaataagctgctgaccgattacaccgaaatgaagaaggcgatcctgcatgtgtactgggaagagttccagaaggaccctgtgggcctgatgagccgggtggcccagcctgccagcaagaagatcgatcagaacaagctgaaacctgagatggacgagaagggcaacctgaccaccgccggctttgcctgctctcagtgtggccagcccctgttcgtgtacaagctggagcaggtgtctgagaagggcaaggcttacaccaactacttcggacggtgcaatgtggccgagcacgaaaagctgatcctgctggcccagctgaagcccgagaaggatagcgacgaagccgtgacatatagcctgggaaagtttgggcagagggccctggatttctacagcattcatgtgaccaaggagtccacccaccccgtgaagcccctggcccagatcgccggaaacagatacgcctccggacctgtgggaaaggccctgagcgacgcatgtatgggcacaatcgcctccttcctgtctaagtaccaggacatcatcatcgaacaccagaaggtggtgaagggcaaccagaagagactggagagcctgcgggagctggccggcaaggaaaacctggaataccctagcgtgaccctgccacctcagcctcacaccaaggagggcgttgatgcctacaacgaagtgatcgcccgggtgcgaatgtgggtgaacctgaacctgtggcagaagctgaagctaagcagagatgatgccaagcctctgctgagactgaagggattcccttcctttcctctggtcgagagacaggccaacgaagtggactggtgggacatggtgtgtaacgtgaagaagctgatcaacgagaaaaaggaggatggcaaggtgttttggcagaatctggctggctacaagagacaggaagccctgagaccatacctgagcagcgaggaagatcggaagaagggaaagaaattcgctcggtaccagctgggcgacctgctgctgcacctggaaaagaagcacggcgaggactggggaaaggtgtacgacgaggcctgggagcggattgacaagaaagtggaaggcctgagcaagcacatcaagctggaagaggaacggagaagcgaggacgcccagagcaaggccgccctgaccgactggctgcgggctaaggccagcttcgtgatcgagggcctgaaggaggccgacaaggacgagttctgcagatgcgagctgaagctgcagaagtggtacggggacctgcggggaaagcccttcgccatcgaagccgagaacagcatcctggacatcagcggcttcagcaagcagtacaactgtgccttcatctggcagaaggacggcgtgaagaagctgaacctgtacctgatcatcaactacttcaagggcggcaagctgcggttcaagaagatcaaacctgaagccttcgaagccaacagattctacaccgtgatcaacaaaaagagcggcgagatcgtgcccatggaggtgaacttcaacttcgacgaccccaacctgatcatcctgcctctggcctttggcaagagacagggcagagaattcatctggaacgacctgctgtccctggaaaccggcagcctgaagctggccaacggaagagtgatcgagaagacactgtacaacagaagaacccggcaggatgagcctgccctgttcgtggccctgaccttcgagcggcgggaggtcctggactcctccaatatcaaaccaatgaacctgatcggcgtggcaagaggcgaaaacatccccgccgtgatcgccctgaccgaccccgagggctgcccactgagccggtttaaggatagcctgggaaacccaacccacatcctgagaatcggcgagagctataaggagaagcagcggaccatccaggccaagaaggaggtggagcagcggagagccggcggctacagccggaagtacgccagcaaagccaagaatctggcagacgatatggtgagaaacaccgctagagatctgctgtactacgccgtgacccaggatgccatgctgatcttcgccaacctgagccggggcttcggccggcagggcaagcggaccttcatggccgagagacagtacacacggatggaggactggctgaccgccaagctggcctacgagggcctgagcaagacctacctgtccaagacactggcccagtacacctccaagacatgcagcaactgtgggtttaccatcaccagcgccgactacgacagggtgctggagaagctgaagaagacagcaacaggctggatgaccacaattaacggcaaggagctgaaggtggagggccagattacctactacaacagatacaagagacagaacgtagtcaaggacctgtccgtcgagctggatagactgagcgaagaatctgtgaacaacgacatctcctcctggacaaagggcagaagcggagaagctctgagcctcctgaagaaaagattctcccatagacccgtgcaggagaagttcgtgtgcctgaactgcggcttcgagacacacgcagccgagcaagccgccctgaacatcgccagatcctggctgttcctgcggagccaggagtacaagaaataccagacaaacaagacaaccggcaacaccgataagagagccttcgtcgagacctggcagtccttttaccggaagaagcttaaggaggtgtggaaacctgccgtgcggtctggcggatctggcggaggctccaccagccccaagaaaaagagaaaagtctaagctgccttctgcggggcttgccttctggccatgcccttcttctctcccttgcacctgtacctcttggtctttgaataaagcctgagtaggaaggctagcaaaaaaaaaaaaaaaaaaaaaaaaaaaaaaaaaaaaaaaaaaaaaaaaaaaaaaaaaaaaaaaaaaaaaaaaaaaaaaaa

SEQ ID NO: 13061 - RNA, 5785 nt, synthetic construct
  source 1..5785: mol_type = other RNA
aggaaataagagagaaaagaagagtaagaagaaatataagagccaccatggcccctaagaagaagcgtaaagtgagccggatggaacgcctcgtctacgaggtgcggcagaagtgcagaaacatcgaggacatctgcatctcctgcggatctctgaacgtgaccctggagcacccactgttcatcggcggcatgtgccagaactgtaaaaactgttttctggagtgtgcctatcaatacgacgatgacggctaccagagctactgcaccatctgttgcggcggaagagaggtgctgatgtgtggaaataacaactgctgccggtgcttctgcgtggaatgcgtggacctgctggtgggccccggcgccgcccaggccgctattaaggaagatccttggaactgctacatgtgcggccacaagggcacatacggcctgctgagacggagagaggactggcctagcagactgcagatgttcttcgccaataaccacgaccaggagttcgacccccctaaggtgtaccctcccgtccccgccgagaagagaaagcccatccgggtcctgagcctgttcgatggcatcgccaccggtctgctggtgctgaaggacctgggcatccaggtggataggtacattgcctccgaggtgtgcgaggactccatcaccgtgggaatggtgcgtcatcagggcaagatcatgtacgtgggcgacgtgcggagcgtgacacagaagcatatccaggagtggggccctttcgacctggtgatcggcggcagcccttgcaatgacctgagcatcgtgaacccagcccggaagggcctgtacgagggaaccggcagactgttcttcgagttttacagactgctgcacgacgcccggcctaaggaaggcgacgaccggcccttcttttggctgttcgagaatgtggtggccatgggagtcagcgacaagcgggatattagccggttcctggagagcaaccccgtgatgatcgatgccaaggaagtgagcgccgcccaccgggccagatacttctggggcaatctgcctggcatgaacagacccctggccagcaccgtgaacgacaagctggagctgcaggagtgcctggagcacggccggatcgccaagttcagcaaggtgagaaccatcaccacccgaagcaacagcatcaaacaaggcaaggaccagcactttcctgtgttcatgaacgagaaggaggacatcctgtggtgtaccgagatggagagagtgttcgggttcccagtccactacacagatgtcagcaacatgtctagactggccagacagagactgctgggaagaagctggtccgtccctgtgatcagacacctgttcgcccctctgaaggagtacttcgcctgcgtgagcagcggcaacagcaacgccaacagccggggccccagcttctctagcggcctggtgccactgtccctgagagggagccacatgggccccatggagatctacaaaaccgtgagcgcctggaagcggcagcctgtgcgcgtgctgagcctgtttcggaatatcgataaagtcctgaaaagcctgggattcctggagagcggctctggctccggcggtggcaccctgaagtacgtggaggatgtgacaaacgtggtcagacgggatgtggagaagtggggccccttcgatctggtgtacggcagcacccaacccctgggcagctcttgtgaccggtgccctggctggtacatgtttcagttccaccggatcctgcagtacgccctgccgagacaggagtcccagcggccattcttttggattttcatggacaacttgctgctgaccgaggatgaccaggaaactaccactcggttcctgcagaccgaagccgtgaccctgcaggacgtgagaggccgggactaccagaacgccatgcgggtgtggtccaacatccctggactgaaaagcaagcacgcacctctgacccctaaagaagaggagtacctgcaggcccaggtgcggagcagaagcaagctggacgcccctaaggtggatctgctggtgaagaattgcctcctgcccctgagagagtacttcaagtatttcagccagaatagtctgcccctgggaggcagcggcggcggcaagagcatggtgaccttcgaggacgtggccgtgtacttcagccaggaggagtgggagctgctggacgccgcccagaggcacctgtaccacagcgtgatgctggagaacctggagctggtgaccagcctgggctgctggcacggcgtggagggcgaggaggcccaccccgagcagaacgtgagcgtggaggtgctgcaggtgaggatccccaacgccgaccccagcaccaagaaggccaacagcggcggcccaagcagcggcgcccctcctcccagcggcggcagcccagccggctccccaacctctaccgaggagggcacctctgagtccgccacccccgagagcggccctggcacctccaccgagcccagcgagggcagcgcacccggcagccctgccggcagccccacctccacagaggagggaaccagcaccgagcccagcgaaggcagcgccccaggcaccagcaccgagcctagtgagcaggagattaaacggatcaacaagatcagaagaagacttgtgaaagacagcaacaccaagaaggccggcaagacaggccccatgaaaaccctgctggttagagtgatgacacccgatctgagagagcggctggaaaacctgagaaagaagcctgaaaatatcccccagcccatcagcaatacatctagagccaacctgaataagctgctgaccgattacaccgaaatgaagaaggcgatcctgcatgtgtactgggaagagttccagaaggaccctgtgggcctgatgagccgggtggcccagcctgccagcaagaagatcgatcagaacaagctgaaacctgagatggacgagaagggcaacctgaccaccgccggctttgcctgctctcagtgtggccagcccctgttcgtgtacaagctggagcaggtgtctgagaagggcaaggcttacaccaactacttcggacggtgcaatgtggccgagcacgaaaagctgatcctgctggcccagctgaagcccgagaaggatagcgacgaagccgtgacatatagcctgggaaagtttgggcagagggccctggatttctacagcattcatgtgaccaaggagtccacccaccccgtgaagcccctggcccagatcgccggaaacagatacgcctccggacctgtgggaaaggccctgagcgacgcatgtatgggcacaatcgcctccttcctgtctaagtaccaggacatcatcatcgaacaccagaaggtggtgaagggcaaccagaagagactggagagcctgcgggagctggccggcaaggaaaacctggaataccctagcgtgaccctgccacctcagcctcacaccaaggagggcgttgatgcctacaacgaagtgatcgcccgggtgcgaatgtgggtgaacctgaacctgtggcagaagctgaagctaagcagagatgatgccaagcctctgctgagactgaagggattcccttcctttcctctggtcgagagacaggccaacgaagtggactggtgggacatggtgtgtaacgtgaagaagctgatcaacgagaaaaaggaggatggcaaggtgttttggcagaatctggctggctacaagagacaggaagccctgagaccatacctgagcagcgaggaagatcggaagaagggaaagaaattcgctcggtaccagctgggcgacctgctgctgcacctggaaaagaagcacggcgaggactggggaaaggtgtacgacgaggcctgggagcggattgacaagaaagtggaaggcctgagcaagcacatcaagctggaagaggaacggagaagcgaggacgcccagagcaaggccgccctgaccgactggctgcgggctaaggccagcttcgtgatcgagggcctgaaggaggccgacaaggacgagttctgcagatgcgagctgaagctgcagaagtggtacggggacctgcggggaaagcccttcgccatcgaagccgagaacagcatcctggacatcagcggcttcagcaagcagtacaactgtgccttcatctggcagaaggacggcgtgaagaagctgaacctgtacctgatcatcaactacttcaagggcggcaagctgcggttcaagaagatcaaacctgaagccttcgaagccaacagattctacaccgtgatcaacaaaaagagcggcgagatcgtgcccatggaggtgaacttcaacttcgacgaccccaacctgatcatcctgcctctggcctttggcaagagacagggcagagaattcatctggaacgacctgctgtccctggaaaccggcagcctgaagctggccaacggaagagtgatcgagaagacactgtacaacagaagaacccggcaggatgagcctgccctgttcgtggccctgaccttcgagcggcgggaggtcctggactcctccaatatcaaaccaatgaacctgatcggcgtggcaagaggcgaaaacatccccgccgtgatcgccctgaccgaccccgagggctgcccactgagccggtttaaggatagcctgggaaacccaacccacatcctgagaatcggcgagagctataaggagaagcagcggaccatccaggccaagaaggaggtggagcagcggagagccggcggctacagccggaagtacgccagcaaagccaagaatctggcagacgatatggtgagaaacaccgctagagatctgctgtactacgccgtgacccaggatgccatgctgatcttcgccaacctgagccggggcttcggccggcagggcaagcggaccttcatggccgagagacagtacacacggatggaggactggctgaccgccaagctggcctacgagggcctgagcaagacctacctgtccaagacactggcccagtacacctccaagacatgcagcaactgtgggtttaccatcaccagcgccgactacgacagggtgctggagaagctgaagaagacagcaacaggctggatgaccacaattaacggcaaggagctgaaggtggagggccagattacctactacaacagatacaagagacagaacgtagtcaaggacctgtccgtcgagctggatagactgagcgaagaatctgtgaacaacgacatctcctcctggacaaagggcagaagcggagaagctctgagcctcctgaagaaaagattctcccatagacccgtgcaggagaagttcgtgtgcctgaactgcggcttcgagacacacgcagccgagcaagccgccctgaacatcgccagatcctggctgttcctgcggagccaggagtacaagaaataccagacaaacaagacaaccggcaacaccgataagagagccttcgtcgagacctggcagtccttttaccggaagaagcttaaggaggtgtggaaacctgccgtgcggtctggcggatctggcggaggctccaccagccccaagaaaaagagaaaagtctaagctgccttctgcggggcttgccttctggccatgcccttcttctctcccttgcacctgtacctcttggtctttgaataaagcctgagtaggaaggctagcaaaaaaaaaaaaaaaaaaaaaaaaaaaaaaaaaaaaaaaaaaaaaaaaaaaaaaaaaaaaaaaaaaaaaaaaaaaaaaaa

SEQ ID NO: 13062 - RNA, 5785 nt, synthetic construct
  source 1..5785: mol_type = other RNA
aggaaataagagagaaaagaagagtaagaagaaatataagagccaccatggcccctaagaagaagcgtaaagtgagccggatggaacgcctcgtctacgaggtgcggcagaagtgcagaaacatcgaggacatctgcatctcctgcggatctctgaacgtgaccctggagcacccactgttcatcggcggcatgtgccagaactgtaaaaactgttttctggagtgtgcctatcaatacgacgatgacggctaccagagctactgcaccatctgttgcggcggaagagaggtgctgatgtgtggaaataacaactgctgccggtgcttctgcgtggaatgcgtggacctgctggtgggccccggcgccgcccaggccgctattaaggaagatccttggaactgctacatgtgcggccacaagggcacatacggcctgctgagacggagagaggactggcctagcagactgcagatgttcttcgccaataaccacgaccaggagttcgacccccctaaggtgtaccctcccgtccccgccgagaagagaaagcccatccgggtcctgagcctgttcgatggcatcgccaccggtctgctggtgctgaaggacctgggcatccaggtggataggtacattgcctccgaggtgtgcgaggactccatcaccgtgggaatggtgcgtcatcagggcaagatcatgtacgtgggcgacgtgcggagcgtgacacagaagcatatccaggagtggggccctttcgacctggtgatcggcggcagcccttgcaatgacctgagcatcgtgaacccagcccggaagggcctgtacgagggaaccggcagactgttcttcgagttttacagactgctgcacgacgcccggcctaaggaaggcgacgaccggcccttcttttggctgttcgagaatgtggtggccatgggagtcagcgacaagcgggatattagccggttcctggagagcaaccccgtgatgatcgatgccaaggaagtgagcgccgcccaccgggccagatacttctggggcaatctgcctggcatgaacagacccctggccagcaccgtgaacgacaagctggagctgcaggagtgcctggagcacggccggatcgccaagttcagcaaggtgagaaccatcaccacccgaagcaacagcatcaaacaaggcaaggaccagcactttcctgtgttcatgaacgagaaggaggacatcctgtggtgtaccgagatggagagagtgttcgggttcccagtccactacacagatgtcagcaacatgtctagactggccagacagagactgctgggaagaagctggtccgtccctgtgatcagacacctgttcgcccctctgaaggagtacttcgcctgcgtgagcagcggcaacagcaacgccaacagccggggccccagcttctctagcggcctggtgccactgtccctgagagggagccacatgggccccatggagatctacaaaaccgtgagcgcctggaagcggcagcctgtgcgcgtgctgagcctgtttcggaatatcgataaagtcctgaaaagcctgggattcctggagagcggctctggctccggcggtggcaccctgaagtacgtggaggatgtgacaaacgtggtcagacgggatgtggagaagtggggccccttcgatctggtgtacggcagcacccaacccctgggcagctcttgtgaccggtgccctggctggtacatgtttcagttccaccggatcctgcagtacgccctgccgagacaggagtcccagcggccattcttttggattttcatggacaacttgctgctgaccgaggatgaccaggaaactaccactcggttcctgcagaccgaagccgtgaccctgcaggacgtgagaggccgggactaccagaacgccatgcgggtgtggtccaacatccctggactgaaaagcaagcacgcacctctgacccctaaagaagaggagtacctgcaggcccaggtgcggagcagaagcaagctggacgcccctaaggtggatctgctggtgaagaattgcctcctgcccctgagagagtacttcaagtatttcagccagaatagtctgcccctgggaggcagcggcggcggccccctgaagctggtgaccttcgaggacgtggccgtggacttcacccaggaggagtggagcctgctggacaagagccagaagaacctgttcaggaacgtgatgatggagaccatccaccacctggtgagcgtgggctaccagatcagcaagagcgacgtgatcagccagctggagcagggcaaggagctgtggagcaaggccgccggcggcttccagggccagaggcccggcgagcaccagggcggcggcccaagcagcggcgcccctcctcccagcggcggcagcccagccggctccccaacctctaccgaggagggcacctctgagtccgccacccccgagagcggccctggcacctccaccgagcccagcgagggcagcgcacccggcagccctgccggcagccccacctccacagaggagggaaccagcaccgagcccagcgaaggcagcgccccaggcaccagcaccgagcctagtgagcaggagattaaacggatcaacaagatcagaagaagacttgtgaaagacagcaacaccaagaaggccggcaagacaggccccatgaaaaccctgctggttagagtgatgacacccgatctgagagagcggctggaaaacctgagaaagaagcctgaaaatatcccccagcccatcagcaatacatctagagccaacctgaataagctgctgaccgattacaccgaaatgaagaaggcgatcctgcatgtgtactgggaagagttccagaaggaccctgtgggcctgatgagccgggtggcccagcctgccagcaagaagatcgatcagaacaagctgaaacctgagatggacgagaagggcaacctgaccaccgccggctttgcctgctctcagtgtggccagcccctgttcgtgtacaagctggagcaggtgtctgagaagggcaaggcttacaccaactacttcggacggtgcaatgtggccgagcacgaaaagctgatcctgctggcccagctgaagcccgagaaggatagcgacgaagccgtgacatatagcctgggaaagtttgggcagagggccctggatttctacagcattcatgtgaccaaggagtccacccaccccgtgaagcccctggcccagatcgccggaaacagatacgcctccggacctgtgggaaaggccctgagcgacgcatgtatgggcacaatcgcctccttcctgtctaagtaccaggacatcatcatcgaacaccagaaggtggtgaagggcaaccagaagagactggagagcctgcgggagctggccggcaaggaaaacctggaataccctagcgtgaccctgccacctcagcctcacaccaaggagggcgttgatgcctacaacgaagtgatcgcccgggtgcgaatgtgggtgaacctgaacctgtggcagaagctgaagctaagcagagatgatgccaagcctctgctgagactgaagggattcccttcctttcctctggtcgagagacaggccaacgaagtggactggtgggacatggtgtgtaacgtgaagaagctgatcaacgagaaaaaggaggatggcaaggtgttttggcagaatctggctggctacaagagacaggaagccctgagaccatacctgagcagcgaggaagatcggaagaagggaaagaaattcgctcggtaccagctgggcgacctgctgctgcacctggaaaagaagcacggcgaggactggggaaaggtgtacgacgaggcctgggagcggattgacaagaaagtggaaggcctgagcaagcacatcaagctggaagaggaacggagaagcgaggacgcccagagcaaggccgccctgaccgactggctgcgggctaaggccagcttcgtgatcgagggcctgaaggaggccgacaaggacgagttctgcagatgcgagctgaagctgcagaagtggtacggggacctgcggggaaagcccttcgccatcgaagccgagaacagcatcctggacatcagcggcttcagcaagcagtacaactgtgccttcatctggcagaaggacggcgtgaagaagctgaacctgtacctgatcatcaactacttcaagggcggcaagctgcggttcaagaagatcaaacctgaagccttcgaagccaacagattctacaccgtgatcaacaaaaagagcggcgagatcgtgcccatggaggtgaacttcaacttcgacgaccccaacctgatcatcctgcctctggcctttggcaagagacagggcagagaattcatctggaacgacctgctgtccctggaaaccggcagcctgaagctggccaacggaagagtgatcgagaagacactgtacaacagaagaacccggcaggatgagcctgccctgttcgtggccctgaccttcgagcggcgggaggtcctggactcctccaatatcaaaccaatgaacctgatcggcgtggcaagaggcgaaaacatccccgccgtgatcgccctgaccgaccccgagggctgcccactgagccggtttaaggatagcctgggaaacccaacccacatcctgagaatcggcgagagctataaggagaagcagcggaccatccaggccaagaaggaggtggagcagcggagagccggcggctacagccggaagtacgccagcaaagccaagaatctggcagacgatatggtgagaaacaccgctagagatctgctgtactacgccgtgacccaggatgccatgctgatcttcgccaacctgagccggggcttcggccggcagggcaagcggaccttcatggccgagagacagtacacacggatggaggactggctgaccgccaagctggcctacgagggcctgagcaagacctacctgtccaagacactggcccagtacacctccaagacatgcagcaactgtgggtttaccatcaccagcgccgactacgacagggtgctggagaagctgaagaagacagcaacaggctggatgaccacaattaacggcaaggagctgaaggtggagggccagattacctactacaacagatacaagagacagaacgtagtcaaggacctgtccgtcgagctggatagactgagcgaagaatctgtgaacaacgacatctcctcctggacaaagggcagaagcggagaagctctgagcctcctgaagaaaagattctcccatagacccgtgcaggagaagttcgtgtgcctgaactgcggcttcgagacacacgcagccgagcaagccgccctgaacatcgccagatcctggctgttcctgcggagccaggagtacaagaaataccagacaaacaagacaaccggcaacaccgataagagagccttcgtcgagacctggcagtccttttaccggaagaagcttaaggaggtgtggaaacctgccgtgcggtctggcggatctggcggaggctccaccagccccaagaaaaagagaaaagtctaagctgccttctgcggggcttgccttctggccatgcccttcttctctcccttgcacctgtacctcttggtctttgaataaagcctgagtaggaaggctagcaaaaaaaaaaaaaaaaaaaaaaaaaaaaaaaaaaaaaaaaaaaaaaaaaaaaaaaaaaaaaaaaaaaaaaaaaaaaaaaa

SEQ ID NO: 13063 - RNA, 5785 nt, synthetic construct
  source 1..5785: mol_type = other RNA
aggaaataagagagaaaagaagagtaagaagaaatataagagccaccatggcccctaagaagaagcgtaaagtgagccggatggaacgcctcgtctacgaggtgcggcagaagtgcagaaacatcgaggacatctgcatctcctgcggatctctgaacgtgaccctggagcacccactgttcatcggcggcatgtgccagaactgtaaaaactgttttctggagtgtgcctatcaatacgacgatgacggctaccagagctactgcaccatctgttgcggcggaagagaggtgctgatgtgtggaaataacaactgctgccggtgcttctgcgtggaatgcgtggacctgctggtgggccccggcgccgcccaggccgctattaaggaagatccttggaactgctacatgtgcggccacaagggcacatacggcctgctgagacggagagaggactggcctagcagactgcagatgttcttcgccaataaccacgaccaggagttcgacccccctaaggtgtaccctcccgtccccgccgagaagagaaagcccatccgggtcctgagcctgttcgatggcatcgccaccggtctgctggtgctgaaggacctgggcatccaggtggataggtacattgcctccgaggtgtgcgaggactccatcaccgtgggaatggtgcgtcatcagggcaagatcatgtacgtgggcgacgtgcggagcgtgacacagaagcatatccaggagtggggccctttcgacctggtgatcggcggcagcccttgcaatgacctgagcatcgtgaacccagcccggaagggcctgtacgagggaaccggcagactgttcttcgagttttacagactgctgcacgacgcccggcctaaggaaggcgacgaccggcccttcttttggctgttcgagaatgtggtggccatgggagtcagcgacaagcgggatattagccggttcctggagagcaaccccgtgatgatcgatgccaaggaagtgagcgccgcccaccgggccagatacttctggggcaatctgcctggcatgaacagacccctggccagcaccgtgaacgacaagctggagctgcaggagtgcctggagcacggccggatcgccaagttcagcaaggtgagaaccatcaccacccgaagcaacagcatcaaacaaggcaaggaccagcactttcctgtgttcatgaacgagaaggaggacatcctgtggtgtaccgagatggagagagtgttcgggttcccagtccactacacagatgtcagcaacatgtctagactggccagacagagactgctgggaagaagctggtccgtccctgtgatcagacacctgttcgcccctctgaaggagtacttcgcctgcgtgagcagcggcaacagcaacgccaacagccggggccccagcttctctagcggcctggtgccactgtccctgagagggagccacatgggccccatggagatctacaaaaccgtgagcgcctggaagcggcagcctgtgcgcgtgctgagcctgtttcggaatatcgataaagtcctgaaaagcctgggattcctggagagcggctctggctccggcggtggcaccctgaagtacgtggaggatgtgacaaacgtggtcagacgggatgtggagaagtggggccccttcgatctggtgtacggcagcacccaacccctgggcagctcttgtgaccggtgccctggctggtacatgtttcagttccaccggatcctgcagtacgccctgccgagacaggagtcccagcggccattcttttggattttcatggacaacttgctgctgaccgaggatgaccaggaaactaccactcggttcctgcagaccgaagccgtgaccctgcaggacgtgagaggccgggactaccagaacgccatgcgggtgtggtccaacatccctggactgaaaagcaagcacgcacctctgacccctaaagaagaggagtacctgcaggcccaggtgcggagcagaagcaagctggacgcccctaaggtggatctgctggtgaagaattgcctcctgcccctgagagagtacttcaagtatttcagccagaatagtctgcccctgggaggcagcggcggcggcttcaaggaggccgtgaccttcaaggacgtggccgtgaccttcaccgaggaggagctgggcctgctggaccccgcccagagggagctgtacagggacgtgatgctggagaacttcaggaacctggtgagcgtgggccaccagtgcttcatccccgacgtgatcagccagctggagagggaggagaagctgtggatgctgaggaccgccgcccagagcaggtgcagcagcggcgacaagaacctgggcggcccaagcagcggcgcccctcctcccagcggcggcagcccagccggctccccaacctctaccgaggagggcacctctgagtccgccacccccgagagcggccctggcacctccaccgagcccagcgagggcagcgcacccggcagccctgccggcagccccacctccacagaggagggaaccagcaccgagcccagcgaaggcagcgccccaggcaccagcaccgagcctagtgagcaggagattaaacggatcaacaagatcagaagaagacttgtgaaagacagcaacaccaagaaggccggcaagacaggccccatgaaaaccctgctggttagagtgatgacacccgatctgagagagcggctggaaaacctgagaaagaagcctgaaaatatcccccagcccatcagcaatacatctagagccaacctgaataagctgctgaccgattacaccgaaatgaagaaggcgatcctgcatgtgtactgggaagagttccagaaggaccctgtgggcctgatgagccgggtggcccagcctgccagcaagaagatcgatcagaacaagctgaaacctgagatggacgagaagggcaacctgaccaccgccggctttgcctgctctcagtgtggccagcccctgttcgtgtacaagctggagcaggtgtctgagaagggcaaggcttacaccaactacttcggacggtgcaatgtggccgagcacgaaaagctgatcctgctggcccagctgaagcccgagaaggatagcgacgaagccgtgacatatagcctgggaaagtttgggcagagggccctggatttctacagcattcatgtgaccaaggagtccacccaccccgtgaagcccctggcccagatcgccggaaacagatacgcctccggacctgtgggaaaggccctgagcgacgcatgtatgggcacaatcgcctccttcctgtctaagtaccaggacatcatcatcgaacaccagaaggtggtgaagggcaaccagaagagactggagagcctgcgggagctggccggcaaggaaaacctggaataccctagcgtgaccctgccacctcagcctcacaccaaggagggcgttgatgcctacaacgaagtgatcgcccgggtgcgaatgtgggtgaacctgaacctgtggcagaagctgaagctaagcagagatgatgccaagcctctgctgagactgaagggattcccttcctttcctctggtcgagagacaggccaacgaagtggactggtgggacatggtgtgtaacgtgaagaagctgatcaacgagaaaaaggaggatggcaaggtgttttggcagaatctggctggctacaagagacaggaagccctgagaccatacctgagcagcgaggaagatcggaagaagggaaagaaattcgctcggtaccagctgggcgacctgctgctgcacctggaaaagaagcacggcgaggactggggaaaggtgtacgacgaggcctgggagcggattgacaagaaagtggaaggcctgagcaagcacatcaagctggaagaggaacggagaagcgaggacgcccagagcaaggccgccctgaccgactggctgcgggctaaggccagcttcgtgatcgagggcctgaaggaggccgacaaggacgagttctgcagatgcgagctgaagctgcagaagtggtacggggacctgcggggaaagcccttcgccatcgaagccgagaacagcatcctggacatcagcggcttcagcaagcagtacaactgtgccttcatctggcagaaggacggcgtgaagaagctgaacctgtacctgatcatcaactacttcaagggcggcaagctgcggttcaagaagatcaaacctgaagccttcgaagccaacagattctacaccgtgatcaacaaaaagagcggcgagatcgtgcccatggaggtgaacttcaacttcgacgaccccaacctgatcatcctgcctctggcctttggcaagagacagggcagagaattcatctggaacgacctgctgtccctggaaaccggcagcctgaagctggccaacggaagagtgatcgagaagacactgtacaacagaagaacccggcaggatgagcctgccctgttcgtggccctgaccttcgagcggcgggaggtcctggactcctccaatatcaaaccaatgaacctgatcggcgtggcaagaggcgaaaacatccccgccgtgatcgccctgaccgaccccgagggctgcccactgagccggtttaaggatagcctgggaaacccaacccacatcctgagaatcggcgagagctataaggagaagcagcggaccatccaggccaagaaggaggtggagcagcggagagccggcggctacagccggaagtacgccagcaaagccaagaatctggcagacgatatggtgagaaacaccgctagagatctgctgtactacgccgtgacccaggatgccatgctgatcttcgccaacctgagccggggcttcggccggcagggcaagcggaccttcatggccgagagacagtacacacggatggaggactggctgaccgccaagctggcctacgagggcctgagcaagacctacctgtccaagacactggcccagtacacctccaagacatgcagcaactgtgggtttaccatcaccagcgccgactacgacagggtgctggagaagctgaagaagacagcaacaggctggatgaccacaattaacggcaaggagctgaaggtggagggccagattacctactacaacagatacaagagacagaacgtagtcaaggacctgtccgtcgagctggatagactgagcgaagaatctgtgaacaacgacatctcctcctggacaaagggcagaagcggagaagctctgagcctcctgaagaaaagattctcccatagacccgtgcaggagaagttcgtgtgcctgaactgcggcttcgagacacacgcagccgagcaagccgccctgaacatcgccagatcctggctgttcctgcggagccaggagtacaagaaataccagacaaacaagacaaccggcaacaccgataagagagccttcgtcgagacctggcagtccttttaccggaagaagcttaaggaggtgtggaaacctgccgtgcggtctggcggatctggcggaggctccaccagccccaagaaaaagagaaaagtctaagctgccttctgcggggcttgccttctggccatgcccttcttctctcccttgcacctgtacctcttggtctttgaataaagcctgagtaggaaggctagcaaaaaaaaaaaaaaaaaaaaaaaaaaaaaaaaaaaaaaaaaaaaaaaaaaaaaaaaaaaaaaaaaaaaaaaaaaaaaaaa

SEQ ID NO: 13064 - RNA, 5785 nt, synthetic construct
  source 1..5785: mol_type = other RNA
aggaaataagagagaaaagaagagtaagaagaaatataagagccaccatggcccctaagaagaagcgtaaagtgagccggatggaacgcctcgtctacgaggtgcggcagaagtgcagaaacatcgaggacatctgcatctcctgcggatctctgaacgtgaccctggagcacccactgttcatcggcggcatgtgccagaactgtaaaaactgttttctggagtgtgcctatcaatacgacgatgacggctaccagagctactgcaccatctgttgcggcggaagagaggtgctgatgtgtggaaataacaactgctgccggtgcttctgcgtggaatgcgtggacctgctggtgggccccggcgccgcccaggccgctattaaggaagatccttggaactgctacatgtgcggccacaagggcacatacggcctgctgagacggagagaggactggcctagcagactgcagatgttcttcgccaataaccacgaccaggagttcgacccccctaaggtgtaccctcccgtccccgccgagaagagaaagcccatccgggtcctgagcctgttcgatggcatcgccaccggtctgctggtgctgaaggacctgggcatccaggtggataggtacattgcctccgaggtgtgcgaggactccatcaccgtgggaatggtgcgtcatcagggcaagatcatgtacgtgggcgacgtgcggagcgtgacacagaagcatatccaggagtggggccctttcgacctggtgatcggcggcagcccttgcaatgacctgagcatcgtgaacccagcccggaagggcctgtacgagggaaccggcagactgttcttcgagttttacagactgctgcacgacgcccggcctaaggaaggcgacgaccggcccttcttttggctgttcgagaatgtggtggccatgggagtcagcgacaagcgggatattagccggttcctggagagcaaccccgtgatgatcgatgccaaggaagtgagcgccgcccaccgggccagatacttctggggcaatctgcctggcatgaacagacccctggccagcaccgtgaacgacaagctggagctgcaggagtgcctggagcacggccggatcgccaagttcagcaaggtgagaaccatcaccacccgaagcaacagcatcaaacaaggcaaggaccagcactttcctgtgttcatgaacgagaaggaggacatcctgtggtgtaccgagatggagagagtgttcgggttcccagtccactacacagatgtcagcaacatgtctagactggccagacagagactgctgggaagaagctggtccgtccctgtgatcagacacctgttcgcccctctgaaggagtacttcgcctgcgtgagcagcggcaacagcaacgccaacagccggggccccagcttctctagcggcctggtgccactgtccctgagagggagccacatgggccccatggagatctacaaaaccgtgagcgcctggaagcggcagcctgtgcgcgtgctgagcctgtttcggaatatcgataaagtcctgaaaagcctgggattcctggagagcggctctggctccggcggtggcaccctgaagtacgtggaggatgtgacaaacgtggtcagacgggatgtggagaagtggggccccttcgatctggtgtacggcagcacccaacccctgggcagctcttgtgaccggtgccctggctggtacatgtttcagttccaccggatcctgcagtacgccctgccgagacaggagtcccagcggccattcttttggattttcatggacaacttgctgctgaccgaggatgaccaggaaactaccactcggttcctgcagaccgaagccgtgaccctgcaggacgtgagaggccgggactaccagaacgccatgcgggtgtggtccaacatccctggactgaaaagcaagcacgcacctctgacccctaaagaagaggagtacctgcaggcccaggtgcggagcagaagcaagctggacgcccctaaggtggatctgctggtgaagaattgcctcctgcccctgagagagtacttcaagtatttcagccagaatagtctgcccctgggaggcagcggcggcggcgccagggccagcctgagcttcgaggacgtggccgtgggcttcagctgggaggagtggcagctgctggcccccagccagaaggacctgtacagggacgtgatgctggagaactacaggaacctggtgagcgtgggctacgaggccagcaagcccgacagcgtgttccagctggagcagggcgagcccccctggatggtggagggcgccgcccagagccagacctgccaggaggagatctgggagggcggcccaagcagcggcgcccctcctcccagcggcggcagcccagccggctccccaacctctaccgaggagggcacctctgagtccgccacccccgagagcggccctggcacctccaccgagcccagcgagggcagcgcacccggcagccctgccggcagccccacctccacagaggagggaaccagcaccgagcccagcgaaggcagcgccccaggcaccagcaccgagcctagtgagcaggagattaaacggatcaacaagatcagaagaagacttgtgaaagacagcaacaccaagaaggccggcaagacaggccccatgaaaaccctgctggttagagtgatgacacccgatctgagagagcggctggaaaacctgagaaagaagcctgaaaatatcccccagcccatcagcaatacatctagagccaacctgaataagctgctgaccgattacaccgaaatgaagaaggcgatcctgcatgtgtactgggaagagttccagaaggaccctgtgggcctgatgagccgggtggcccagcctgccagcaagaagatcgatcagaacaagctgaaacctgagatggacgagaagggcaacctgaccaccgccggctttgcctgctctcagtgtggccagcccctgttcgtgtacaagctggagcaggtgtctgagaagggcaaggcttacaccaactacttcggacggtgcaatgtggccgagcacgaaaagctgatcctgctggcccagctgaagcccgagaaggatagcgacgaagccgtgacatatagcctgggaaagtttgggcagagggccctggatttctacagcattcatgtgaccaaggagtccacccaccccgtgaagcccctggcccagatcgccggaaacagatacgcctccggacctgtgggaaaggccctgagcgacgcatgtatgggcacaatcgcctccttcctgtctaagtaccaggacatcatcatcgaacaccagaaggtggtgaagggcaaccagaagagactggagagcctgcgggagctggccggcaaggaaaacctggaataccctagcgtgaccctgccacctcagcctcacaccaaggagggcgttgatgcctacaacgaagtgatcgcccgggtgcgaatgtgggtgaacctgaacctgtggcagaagctgaagctaagcagagatgatgccaagcctctgctgagactgaagggattcccttcctttcctctggtcgagagacaggccaacgaagtggactggtgggacatggtgtgtaacgtgaagaagctgatcaacgagaaaaaggaggatggcaaggtgttttggcagaatctggctggctacaagagacaggaagccctgagaccatacctgagcagcgaggaagatcggaagaagggaaagaaattcgctcggtaccagctgggcgacctgctgctgcacctggaaaagaagcacggcgaggactggggaaaggtgtacgacgaggcctgggagcggattgacaagaaagtggaaggcctgagcaagcacatcaagctggaagaggaacggagaagcgaggacgcccagagcaaggccgccctgaccgactggctgcgggctaaggccagcttcgtgatcgagggcctgaaggaggccgacaaggacgagttctgcagatgcgagctgaagctgcagaagtggtacggggacctgcggggaaagcccttcgccatcgaagccgagaacagcatcctggacatcagcggcttcagcaagcagtacaactgtgccttcatctggcagaaggacggcgtgaagaagctgaacctgtacctgatcatcaactacttcaagggcggcaagctgcggttcaagaagatcaaacctgaagccttcgaagccaacagattctacaccgtgatcaacaaaaagagcggcgagatcgtgcccatggaggtgaacttcaacttcgacgaccccaacctgatcatcctgcctctggcctttggcaagagacagggcagagaattcatctggaacgacctgctgtccctggaaaccggcagcctgaagctggccaacggaagagtgatcgagaagacactgtacaacagaagaacccggcaggatgagcctgccctgttcgtggccctgaccttcgagcggcgggaggtcctggactcctccaatatcaaaccaatgaacctgatcggcgtggcaagaggcgaaaacatccccgccgtgatcgccctgaccgaccccgagggctgcccactgagccggtttaaggatagcctgggaaacccaacccacatcctgagaatcggcgagagctataaggagaagcagcggaccatccaggccaagaaggaggtggagcagcggagagccggcggctacagccggaagtacgccagcaaagccaagaatctggcagacgatatggtgagaaacaccgctagagatctgctgtactacgccgtgacccaggatgccatgctgatcttcgccaacctgagccggggcttcggccggcagggcaagcggaccttcatggccgagagacagtacacacggatggaggactggctgaccgccaagctggcctacgagggcctgagcaagacctacctgtccaagacactggcccagtacacctccaagacatgcagcaactgtgggtttaccatcaccagcgccgactacgacagggtgctggagaagctgaagaagacagcaacaggctggatgaccacaattaacggcaaggagctgaaggtggagggccagattacctactacaacagatacaagagacagaacgtagtcaaggacctgtccgtcgagctggatagactgagcgaagaatctgtgaacaacgacatctcctcctggacaaagggcagaagcggagaagctctgagcctcctgaagaaaagattctcccatagacccgtgcaggagaagttcgtgtgcctgaactgcggcttcgagacacacgcagccgagcaagccgccctgaacatcgccagatcctggctgttcctgcggagccaggagtacaagaaataccagacaaacaagacaaccggcaacaccgataagagagccttcgtcgagacctggcagtccttttaccggaagaagcttaaggaggtgtggaaacctgccgtgcggtctggcggatctggcggaggctccaccagccccaagaaaaagagaaaagtctaagctgccttctgcggggcttgccttctggccatgcccttcttctctcccttgcacctgtacctcttggtctttgaataaagcctgagtaggaaggctagcaaaaaaaaaaaaaaaaaaaaaaaaaaaaaaaaaaaaaaaaaaaaaaaaaaaaaaaaaaaaaaaaaaaaaaaaaaaaaaaa

SEQ ID NO: 13065 - RNA, 5785 nt, synthetic construct
  source 1..5785: mol_type = other RNA
aggaaataagagagaaaagaagagtaagaagaaatataagagccaccatggcccctaagaagaagcgtaaagtgagccggatggaacgcctcgtctacgaggtgcggcagaagtgcagaaacatcgaggacatctgcatctcctgcggatctctgaacgtgaccctggagcacccactgttcatcggcggcatgtgccagaactgtaaaaactgttttctggagtgtgcctatcaatacgacgatgacggctaccagagctactgcaccatctgttgcggcggaagagaggtgctgatgtgtggaaataacaactgctgccggtgcttctgcgtggaatgcgtggacctgctggtgggccccggcgccgcccaggccgctattaaggaagatccttggaactgctacatgtgcggccacaagggcacatacggcctgctgagacggagagaggactggcctagcagactgcagatgttcttcgccaataaccacgaccaggagttcgacccccctaaggtgtaccctcccgtccccgccgagaagagaaagcccatccgggtcctgagcctgttcgatggcatcgccaccggtctgctggtgctgaaggacctgggcatccaggtggataggtacattgcctccgaggtgtgcgaggactccatcaccgtgggaatggtgcgtcatcagggcaagatcatgtacgtgggcgacgtgcggagcgtgacacagaagcatatccaggagtggggccctttcgacctggtgatcggcggcagcccttgcaatgacctgagcatcgtgaacccagcccggaagggcctgtacgagggaaccggcagactgttcttcgagttttacagactgctgcacgacgcccggcctaaggaaggcgacgaccggcccttcttttggctgttcgagaatgtggtggccatgggagtcagcgacaagcgggatattagccggttcctggagagcaaccccgtgatgatcgatgccaaggaagtgagcgccgcccaccgggccagatacttctggggcaatctgcctggcatgaacagacccctggccagcaccgtgaacgacaagctggagctgcaggagtgcctggagcacggccggatcgccaagttcagcaaggtgagaaccatcaccacccgaagcaacagcatcaaacaaggcaaggaccagcactttcctgtgttcatgaacgagaaggaggacatcctgtggtgtaccgagatggagagagtgttcgggttcccagtccactacacagatgtcagcaacatgtctagactggccagacagagactgctgggaagaagctggtccgtccctgtgatcagacacctgttcgcccctctgaaggagtacttcgcctgcgtgagcagcggcaacagcaacgccaacagccggggccccagcttctctagcggcctggtgccactgtccctgagagggagccacatgggccccatggagatctacaaaaccgtgagcgcctggaagcggcagcctgtgcgcgtgctgagcctgtttcggaatatcgataaagtcctgaaaagcctgggattcctggagagcggctctggctccggcggtggcaccctgaagtacgtggaggatgtgacaaacgtggtcagacgggatgtggagaagtggggccccttcgatctggtgtacggcagcacccaacccctgggcagctcttgtgaccggtgccctggctggtacatgtttcagttccaccggatcctgcagtacgccctgccgagacaggagtcccagcggccattcttttggattttcatggacaacttgctgctgaccgaggatgaccaggaaactaccactcggttcctgcagaccgaagccgtgaccctgcaggacgtgagaggccgggactaccagaacgccatgcgggtgtggtccaacatccctggactgaaaagcaagcacgcacctctgacccctaaagaagaggagtacctgcaggcccaggtgcggagcagaagcaagctggacgcccctaaggtggatctgctggtgaagaattgcctcctgcccctgagagagtacttcaagtatttcagccagaatagtctgcccctgggaggcagcggcggcggcatggcccacatggccttcagggacgtggccgtggacttcacccaggacgagtggaggctgctgagccccgcccagaggaccctgtacagggaggtgatgctggagaactacagcaacctggtgagcctgggcatcagcttcagcaagcccgagctgatcacccagctggagcagggcaaggagacctggagggaggagaagaactgcagccccgccacctgccccgccgaccccgagcccgagggcggcccaagcagcggcgcccctcctcccagcggcggcagcccagccggctccccaacctctaccgaggagggcacctctgagtccgccacccccgagagcggccctggcacctccaccgagcccagcgagggcagcgcacccggcagccctgccggcagccccacctccacagaggagggaaccagcaccgagcccagcgaaggcagcgccccaggcaccagcaccgagcctagtgagcaggagattaaacggatcaacaagatcagaagaagacttgtgaaagacagcaacaccaagaaggccggcaagacaggccccatgaaaaccctgctggttagagtgatgacacccgatctgagagagcggctggaaaacctgagaaagaagcctgaaaatatcccccagcccatcagcaatacatctagagccaacctgaataagctgctgaccgattacaccgaaatgaagaaggcgatcctgcatgtgtactgggaagagttccagaaggaccctgtgggcctgatgagccgggtggcccagcctgccagcaagaagatcgatcagaacaagctgaaacctgagatggacgagaagggcaacctgaccaccgccggctttgcctgctctcagtgtggccagcccctgttcgtgtacaagctggagcaggtgtctgagaagggcaaggcttacaccaactacttcggacggtgcaatgtggccgagcacgaaaagctgatcctgctggcccagctgaagcccgagaaggatagcgacgaagccgtgacatatagcctgggaaagtttgggcagagggccctggatttctacagcattcatgtgaccaaggagtccacccaccccgtgaagcccctggcccagatcgccggaaacagatacgcctccggacctgtgggaaaggccctgagcgacgcatgtatgggcacaatcgcctccttcctgtctaagtaccaggacatcatcatcgaacaccagaaggtggtgaagggcaaccagaagagactggagagcctgcgggagctggccggcaaggaaaacctggaataccctagcgtgaccctgccacctcagcctcacaccaaggagggcgttgatgcctacaacgaagtgatcgcccgggtgcgaatgtgggtgaacctgaacctgtggcagaagctgaagctaagcagagatgatgccaagcctctgctgagactgaagggattcccttcctttcctctggtcgagagacaggccaacgaagtggactggtgggacatggtgtgtaacgtgaagaagctgatcaacgagaaaaaggaggatggcaaggtgttttggcagaatctggctggctacaagagacaggaagccctgagaccatacctgagcagcgaggaagatcggaagaagggaaagaaattcgctcggtaccagctgggcgacctgctgctgcacctggaaaagaagcacggcgaggactggggaaaggtgtacgacgaggcctgggagcggattgacaagaaagtggaaggcctgagcaagcacatcaagctggaagaggaacggagaagcgaggacgcccagagcaaggccgccctgaccgactggctgcgggctaaggccagcttcgtgatcgagggcctgaaggaggccgacaaggacgagttctgcagatgcgagctgaagctgcagaagtggtacggggacctgcggggaaagcccttcgccatcgaagccgagaacagcatcctggacatcagcggcttcagcaagcagtacaactgtgccttcatctggcagaaggacggcgtgaagaagctgaacctgtacctgatcatcaactacttcaagggcggcaagctgcggttcaagaagatcaaacctgaagccttcgaagccaacagattctacaccgtgatcaacaaaaagagcggcgagatcgtgcccatggaggtgaacttcaacttcgacgaccccaacctgatcatcctgcctctggcctttggcaagagacagggcagagaattcatctggaacgacctgctgtccctggaaaccggcagcctgaagctggccaacggaagagtgatcgagaagacactgtacaacagaagaacccggcaggatgagcctgccctgttcgtggccctgaccttcgagcggcgggaggtcctggactcctccaatatcaaaccaatgaacctgatcggcgtggcaagaggcgaaaacatccccgccgtgatcgccctgaccgaccccgagggctgcccactgagccggtttaaggatagcctgggaaacccaacccacatcctgagaatcggcgagagctataaggagaagcagcggaccatccaggccaagaaggaggtggagcagcggagagccggcggctacagccggaagtacgccagcaaagccaagaatctggcagacgatatggtgagaaacaccgctagagatctgctgtactacgccgtgacccaggatgccatgctgatcttcgccaacctgagccggggcttcggccggcagggcaagcggaccttcatggccgagagacagtacacacggatggaggactggctgaccgccaagctggcctacgagggcctgagcaagacctacctgtccaagacactggcccagtacacctccaagacatgcagcaactgtgggtttaccatcaccagcgccgactacgacagggtgctggagaagctgaagaagacagcaacaggctggatgaccacaattaacggcaaggagctgaaggtggagggccagattacctactacaacagatacaagagacagaacgtagtcaaggacctgtccgtcgagctggatagactgagcgaagaatctgtgaacaacgacatctcctcctggacaaagggcagaagcggagaagctctgagcctcctgaagaaaagattctcccatagacccgtgcaggagaagttcgtgtgcctgaactgcggcttcgagacacacgcagccgagcaagccgccctgaacatcgccagatcctggctgttcctgcggagccaggagtacaagaaataccagacaaacaagacaaccggcaacaccgataagagagccttcgtcgagacctggcagtccttttaccggaagaagcttaaggaggtgtggaaacctgccgtgcggtctggcggatctggcggaggctccaccagccccaagaaaaagagaaaagtctaagctgccttctgcggggcttgccttctggccatgcccttcttctctcccttgcacctgtacctcttggtctttgaataaagcctgagtaggaaggctagcaaaaaaaaaaaaaaaaaaaaaaaaaaaaaaaaaaaaaaaaaaaaaaaaaaaaaaaaaaaaaaaaaaaaaaaaaaaaaaaa

SEQ ID NO: 13066 - RNA, 5785 nt, synthetic construct
  source 1..5785: mol_type = other RNA
aggaaataagagagaaaagaagagtaagaagaaatataagagccaccatggcccctaagaagaagcgtaaagtgagccggatggaacgcctcgtctacgaggtgcggcagaagtgcagaaacatcgaggacatctgcatctcctgcggatctctgaacgtgaccctggagcacccactgttcatcggcggcatgtgccagaactgtaaaaactgttttctggagtgtgcctatcaatacgacgatgacggctaccagagctactgcaccatctgttgcggcggaagagaggtgctgatgtgtggaaataacaactgctgccggtgcttctgcgtggaatgcgtggacctgctggtgggccccggcgccgcccaggccgctattaaggaagatccttggaactgctacatgtgcggccacaagggcacatacggcctgctgagacggagagaggactggcctagcagactgcagatgttcttcgccaataaccacgaccaggagttcgacccccctaaggtgtaccctcccgtccccgccgagaagagaaagcccatccgggtcctgagcctgttcgatggcatcgccaccggtctgctggtgctgaaggacctgggcatccaggtggataggtacattgcctccgaggtgtgcgaggactccatcaccgtgggaatggtgcgtcatcagggcaagatcatgtacgtgggcgacgtgcggagcgtgacacagaagcatatccaggagtggggccctttcgacctggtgatcggcggcagcccttgcaatgacctgagcatcgtgaacccagcccggaagggcctgtacgagggaaccggcagactgttcttcgagttttacagactgctgcacgacgcccggcctaaggaaggcgacgaccggcccttcttttggctgttcgagaatgtggtggccatgggagtcagcgacaagcgggatattagccggttcctggagagcaaccccgtgatgatcgatgccaaggaagtgagcgccgcccaccgggccagatacttctggggcaatctgcctggcatgaacagacccctggccagcaccgtgaacgacaagctggagctgcaggagtgcctggagcacggccggatcgccaagttcagcaaggtgagaaccatcaccacccgaagcaacagcatcaaacaaggcaaggaccagcactttcctgtgttcatgaacgagaaggaggacatcctgtggtgtaccgagatggagagagtgttcgggttcccagtccactacacagatgtcagcaacatgtctagactggccagacagagactgctgggaagaagctggtccgtccctgtgatcagacacctgttcgcccctctgaaggagtacttcgcctgcgtgagcagcggcaacagcaacgccaacagccggggccccagcttctctagcggcctggtgccactgtccctgagagggagccacatgggccccatggagatctacaaaaccgtgagcgcctggaagcggcagcctgtgcgcgtgctgagcctgtttcggaatatcgataaagtcctgaaaagcctgggattcctggagagcggctctggctccggcggtggcaccctgaagtacgtggaggatgtgacaaacgtggtcagacgggatgtggagaagtggggccccttcgatctggtgtacggcagcacccaacccctgggcagctcttgtgaccggtgccctggctggtacatgtttcagttccaccggatcctgcagtacgccctgccgagacaggagtcccagcggccattcttttggattttcatggacaacttgctgctgaccgaggatgaccaggaaactaccactcggttcctgcagaccgaagccgtgaccctgcaggacgtgagaggccgggactaccagaacgccatgcgggtgtggtccaacatccctggactgaaaagcaagcacgcacctctgacccctaaagaagaggagtacctgcaggcccaggtgcggagcagaagcaagctggacgcccctaaggtggatctgctggtgaagaattgcctcctgcccctgagagagtacttcaagtatttcagccagaatagtctgcccctgggaggcagcggcggcggcatggcccacttccagggcagcgtgaccttcgaggacgtggccatcgccttcagccagcaggagtgggagagcctggacagcagccagaggggcctgtacagggacgtgatgctggagaactacaggaacctggtgagcatgggccacagcctgagcaagccccacgtgatcgccctgctggagaggtggaaggagcccaaggtgaccgagaggaaggacggcaggaggtggtgcaccgacctgggcggcccaagcagcggcgcccctcctcccagcggcggcagcccagccggctccccaacctctaccgaggagggcacctctgagtccgccacccccgagagcggccctggcacctccaccgagcccagcgagggcagcgcacccggcagccctgccggcagccccacctccacagaggagggaaccagcaccgagcccagcgaaggcagcgccccaggcaccagcaccgagcctagtgagcaggagattaaacggatcaacaagatcagaagaagacttgtgaaagacagcaacaccaagaaggccggcaagacaggccccatgaaaaccctgctggttagagtgatgacacccgatctgagagagcggctggaaaacctgagaaagaagcctgaaaatatcccccagcccatcagcaatacatctagagccaacctgaataagctgctgaccgattacaccgaaatgaagaaggcgatcctgcatgtgtactgggaagagttccagaaggaccctgtgggcctgatgagccgggtggcccagcctgccagcaagaagatcgatcagaacaagctgaaacctgagatggacgagaagggcaacctgaccaccgccggctttgcctgctctcagtgtggccagcccctgttcgtgtacaagctggagcaggtgtctgagaagggcaaggcttacaccaactacttcggacggtgcaatgtggccgagcacgaaaagctgatcctgctggcccagctgaagcccgagaaggatagcgacgaagccgtgacatatagcctgggaaagtttgggcagagggccctggatttctacagcattcatgtgaccaaggagtccacccaccccgtgaagcccctggcccagatcgccggaaacagatacgcctccggacctgtgggaaaggccctgagcgacgcatgtatgggcacaatcgcctccttcctgtctaagtaccaggacatcatcatcgaacaccagaaggtggtgaagggcaaccagaagagactggagagcctgcgggagctggccggcaaggaaaacctggaataccctagcgtgaccctgccacctcagcctcacaccaaggagggcgttgatgcctacaacgaagtgatcgcccgggtgcgaatgtgggtgaacctgaacctgtggcagaagctgaagctaagcagagatgatgccaagcctctgctgagactgaagggattcccttcctttcctctggtcgagagacaggccaacgaagtggactggtgggacatggtgtgtaacgtgaagaagctgatcaacgagaaaaaggaggatggcaaggtgttttggcagaatctggctggctacaagagacaggaagccctgagaccatacctgagcagcgaggaagatcggaagaagggaaagaaattcgctcggtaccagctgggcgacctgctgctgcacctggaaaagaagcacggcgaggactggggaaaggtgtacgacgaggcctgggagcggattgacaagaaagtggaaggcctgagcaagcacatcaagctggaagaggaacggagaagcgaggacgcccagagcaaggccgccctgaccgactggctgcgggctaaggccagcttcgtgatcgagggcctgaaggaggccgacaaggacgagttctgcagatgcgagctgaagctgcagaagtggtacggggacctgcggggaaagcccttcgccatcgaagccgagaacagcatcctggacatcagcggcttcagcaagcagtacaactgtgccttcatctggcagaaggacggcgtgaagaagctgaacctgtacctgatcatcaactacttcaagggcggcaagctgcggttcaagaagatcaaacctgaagccttcgaagccaacagattctacaccgtgatcaacaaaaagagcggcgagatcgtgcccatggaggtgaacttcaacttcgacgaccccaacctgatcatcctgcctctggcctttggcaagagacagggcagagaattcatctggaacgacctgctgtccctggaaaccggcagcctgaagctggccaacggaagagtgatcgagaagacactgtacaacagaagaacccggcaggatgagcctgccctgttcgtggccctgaccttcgagcggcgggaggtcctggactcctccaatatcaaaccaatgaacctgatcggcgtggcaagaggcgaaaacatccccgccgtgatcgccctgaccgaccccgagggctgcccactgagccggtttaaggatagcctgggaaacccaacccacatcctgagaatcggcgagagctataaggagaagcagcggaccatccaggccaagaaggaggtggagcagcggagagccggcggctacagccggaagtacgccagcaaagccaagaatctggcagacgatatggtgagaaacaccgctagagatctgctgtactacgccgtgacccaggatgccatgctgatcttcgccaacctgagccggggcttcggccggcagggcaagcggaccttcatggccgagagacagtacacacggatggaggactggctgaccgccaagctggcctacgagggcctgagcaagacctacctgtccaagacactggcccagtacacctccaagacatgcagcaactgtgggtttaccatcaccagcgccgactacgacagggtgctggagaagctgaagaagacagcaacaggctggatgaccacaattaacggcaaggagctgaaggtggagggccagattacctactacaacagatacaagagacagaacgtagtcaaggacctgtccgtcgagctggatagactgagcgaagaatctgtgaacaacgacatctcctcctggacaaagggcagaagcggagaagctctgagcctcctgaagaaaagattctcccatagacccgtgcaggagaagttcgtgtgcctgaactgcggcttcgagacacacgcagccgagcaagccgccctgaacatcgccagatcctggctgttcctgcggagccaggagtacaagaaataccagacaaacaagacaaccggcaacaccgataagagagccttcgtcgagacctggcagtccttttaccggaagaagcttaaggaggtgtggaaacctgccgtgcggtctggcggatctggcggaggctccaccagccccaagaaaaagagaaaagtctaagctgccttctgcggggcttgccttctggccatgcccttcttctctcccttgcacctgtacctcttggtctttgaataaagcctgagtaggaaggctagcaaaaaaaaaaaaaaaaaaaaaaaaaaaaaaaaaaaaaaaaaaaaaaaaaaaaaaaaaaaaaaaaaaaaaaaaaaaaaaaa

SEQ ID NO: 13067 - RNA, 5785 nt, synthetic construct
  source 1..5785: mol_type = other RNA
aggaaataagagagaaaagaagagtaagaagaaatataagagccaccatggcccctaagaagaagcgtaaagtgagccggatggaacgcctcgtctacgaggtgcggcagaagtgcagaaacatcgaggacatctgcatctcctgcggatctctgaacgtgaccctggagcacccactgttcatcggcggcatgtgccagaactgtaaaaactgttttctggagtgtgcctatcaatacgacgatgacggctaccagagctactgcaccatctgttgcggcggaagagaggtgctgatgtgtggaaataacaactgctgccggtgcttctgcgtggaatgcgtggacctgctggtgggccccggcgccgcccaggccgctattaaggaagatccttggaactgctacatgtgcggccacaagggcacatacggcctgctgagacggagagaggactggcctagcagactgcagatgttcttcgccaataaccacgaccaggagttcgacccccctaaggtgtaccctcccgtccccgccgagaagagaaagcccatccgggtcctgagcctgttcgatggcatcgccaccggtctgctggtgctgaaggacctgggcatccaggtggataggtacattgcctccgaggtgtgcgaggactccatcaccgtgggaatggtgcgtcatcagggcaagatcatgtacgtgggcgacgtgcggagcgtgacacagaagcatatccaggagtggggccctttcgacctggtgatcggcggcagcccttgcaatgacctgagcatcgtgaacccagcccggaagggcctgtacgagggaaccggcagactgttcttcgagttttacagactgctgcacgacgcccggcctaaggaaggcgacgaccggcccttcttttggctgttcgagaatgtggtggccatgggagtcagcgacaagcgggatattagccggttcctggagagcaaccccgtgatgatcgatgccaaggaagtgagcgccgcccaccgggccagatacttctggggcaatctgcctggcatgaacagacccctggccagcaccgtgaacgacaagctggagctgcaggagtgcctggagcacggccggatcgccaagttcagcaaggtgagaaccatcaccacccgaagcaacagcatcaaacaaggcaaggaccagcactttcctgtgttcatgaacgagaaggaggacatcctgtggtgtaccgagatggagagagtgttcgggttcccagtccactacacagatgtcagcaacatgtctagactggccagacagagactgctgggaagaagctggtccgtccctgtgatcagacacctgttcgcccctctgaaggagtacttcgcctgcgtgagcagcggcaacagcaacgccaacagccggggccccagcttctctagcggcctggtgccactgtccctgagagggagccacatgggccccatggagatctacaaaaccgtgagcgcctggaagcggcagcctgtgcgcgtgctgagcctgtttcggaatatcgataaagtcctgaaaagcctgggattcctggagagcggctctggctccggcggtggcaccctgaagtacgtggaggatgtgacaaacgtggtcagacgggatgtggagaagtggggccccttcgatctggtgtacggcagcacccaacccctgggcagctcttgtgaccggtgccctggctggtacatgtttcagttccaccggatcctgcagtacgccctgccgagacaggagtcccagcggccattcttttggattttcatggacaacttgctgctgaccgaggatgaccaggaaactaccactcggttcctgcagaccgaagccgtgaccctgcaggacgtgagaggccgggactaccagaacgccatgcgggtgtggtccaacatccctggactgaaaagcaagcacgcacctctgacccctaaagaagaggagtacctgcaggcccaggtgcggagcagaagcaagctggacgcccctaaggtggatctgctggtgaagaattgcctcctgcccctgagagagtacttcaagtatttcagccagaatagtctgcccctgggaggcagcggcggcggcttccaggagcccgtgaccttcgaggacgtggccgtgtacttcacccagaaccagtgggccagcctggacagcgcccagagggccctgtacagggaggtgatgctggagaactacgccaacgtggccagcctggtgagccccttccccaggcccgacctgatcagccagctggagaggggcgaggccccctgggaccccaacccctgggaggccgaggacctgaggggcatctgccccggcgagggcggcccaagcagcggcgcccctcctcccagcggcggcagcccagccggctccccaacctctaccgaggagggcacctctgagtccgccacccccgagagcggccctggcacctccaccgagcccagcgagggcagcgcacccggcagccctgccggcagccccacctccacagaggagggaaccagcaccgagcccagcgaaggcagcgccccaggcaccagcaccgagcctagtgagcaggagattaaacggatcaacaagatcagaagaagacttgtgaaagacagcaacaccaagaaggccggcaagacaggccccatgaaaaccctgctggttagagtgatgacacccgatctgagagagcggctggaaaacctgagaaagaagcctgaaaatatcccccagcccatcagcaatacatctagagccaacctgaataagctgctgaccgattacaccgaaatgaagaaggcgatcctgcatgtgtactgggaagagttccagaaggaccctgtgggcctgatgagccgggtggcccagcctgccagcaagaagatcgatcagaacaagctgaaacctgagatggacgagaagggcaacctgaccaccgccggctttgcctgctctcagtgtggccagcccctgttcgtgtacaagctggagcaggtgtctgagaagggcaaggcttacaccaactacttcggacggtgcaatgtggccgagcacgaaaagctgatcctgctggcccagctgaagcccgagaaggatagcgacgaagccgtgacatatagcctgggaaagtttgggcagagggccctggatttctacagcattcatgtgaccaaggagtccacccaccccgtgaagcccctggcccagatcgccggaaacagatacgcctccggacctgtgggaaaggccctgagcgacgcatgtatgggcacaatcgcctccttcctgtctaagtaccaggacatcatcatcgaacaccagaaggtggtgaagggcaaccagaagagactggagagcctgcgggagctggccggcaaggaaaacctggaataccctagcgtgaccctgccacctcagcctcacaccaaggagggcgttgatgcctacaacgaagtgatcgcccgggtgcgaatgtgggtgaacctgaacctgtggcagaagctgaagctaagcagagatgatgccaagcctctgctgagactgaagggattcccttcctttcctctggtcgagagacaggccaacgaagtggactggtgggacatggtgtgtaacgtgaagaagctgatcaacgagaaaaaggaggatggcaaggtgttttggcagaatctggctggctacaagagacaggaagccctgagaccatacctgagcagcgaggaagatcggaagaagggaaagaaattcgctcggtaccagctgggcgacctgctgctgcacctggaaaagaagcacggcgaggactggggaaaggtgtacgacgaggcctgggagcggattgacaagaaagtggaaggcctgagcaagcacatcaagctggaagaggaacggagaagcgaggacgcccagagcaaggccgccctgaccgactggctgcgggctaaggccagcttcgtgatcgagggcctgaaggaggccgacaaggacgagttctgcagatgcgagctgaagctgcagaagtggtacggggacctgcggggaaagcccttcgccatcgaagccgagaacagcatcctggacatcagcggcttcagcaagcagtacaactgtgccttcatctggcagaaggacggcgtgaagaagctgaacctgtacctgatcatcaactacttcaagggcggcaagctgcggttcaagaagatcaaacctgaagccttcgaagccaacagattctacaccgtgatcaacaaaaagagcggcgagatcgtgcccatggaggtgaacttcaacttcgacgaccccaacctgatcatcctgcctctggcctttggcaagagacagggcagagaattcatctggaacgacctgctgtccctggaaaccggcagcctgaagctggccaacggaagagtgatcgagaagacactgtacaacagaagaacccggcaggatgagcctgccctgttcgtggccctgaccttcgagcggcgggaggtcctggactcctccaatatcaaaccaatgaacctgatcggcgtggcaagaggcgaaaacatccccgccgtgatcgccctgaccgaccccgagggctgcccactgagccggtttaaggatagcctgggaaacccaacccacatcctgagaatcggcgagagctataaggagaagcagcggaccatccaggccaagaaggaggtggagcagcggagagccggcggctacagccggaagtacgccagcaaagccaagaatctggcagacgatatggtgagaaacaccgctagagatctgctgtactacgccgtgacccaggatgccatgctgatcttcgccaacctgagccggggcttcggccggcagggcaagcggaccttcatggccgagagacagtacacacggatggaggactggctgaccgccaagctggcctacgagggcctgagcaagacctacctgtccaagacactggcccagtacacctccaagacatgcagcaactgtgggtttaccatcaccagcgccgactacgacagggtgctggagaagctgaagaagacagcaacaggctggatgaccacaattaacggcaaggagctgaaggtggagggccagattacctactacaacagatacaagagacagaacgtagtcaaggacctgtccgtcgagctggatagactgagcgaagaatctgtgaacaacgacatctcctcctggacaaagggcagaagcggagaagctctgagcctcctgaagaaaagattctcccatagacccgtgcaggagaagttcgtgtgcctgaactgcggcttcgagacacacgcagccgagcaagccgccctgaacatcgccagatcctggctgttcctgcggagccaggagtacaagaaataccagacaaacaagacaaccggcaacaccgataagagagccttcgtcgagacctggcagtccttttaccggaagaagcttaaggaggtgtggaaacctgccgtgcggtctggcggatctggcggaggctccaccagccccaagaaaaagagaaaagtctaagctgccttctgcggggcttgccttctggccatgcccttcttctctcccttgcacctgtacctcttggtctttgaataaagcctgagtaggaaggctagcaaaaaaaaaaaaaaaaaaaaaaaaaaaaaaaaaaaaaaaaaaaaaaaaaaaaaaaaaaaaaaaaaaaaaaaaaaaaaaaa

SEQ ID NO: 13068 - RNA, 5785 nt, synthetic construct
  source 1..5785: mol_type = other RNA
aggaaataagagagaaaagaagagtaagaagaaatataagagccaccatggcccctaagaagaagcgtaaagtgagccggatggaacgcctcgtctacgaggtgcggcagaagtgcagaaacatcgaggacatctgcatctcctgcggatctctgaacgtgaccctggagcacccactgttcatcggcggcatgtgccagaactgtaaaaactgttttctggagtgtgcctatcaatacgacgatgacggctaccagagctactgcaccatctgttgcggcggaagagaggtgctgatgtgtggaaataacaactgctgccggtgcttctgcgtggaatgcgtggacctgctggtgggccccggcgccgcccaggccgctattaaggaagatccttggaactgctacatgtgcggccacaagggcacatacggcctgctgagacggagagaggactggcctagcagactgcagatgttcttcgccaataaccacgaccaggagttcgacccccctaaggtgtaccctcccgtccccgccgagaagagaaagcccatccgggtcctgagcctgttcgatggcatcgccaccggtctgctggtgctgaaggacctgggcatccaggtggataggtacattgcctccgaggtgtgcgaggactccatcaccgtgggaatggtgcgtcatcagggcaagatcatgtacgtgggcgacgtgcggagcgtgacacagaagcatatccaggagtggggccctttcgacctggtgatcggcggcagcccttgcaatgacctgagcatcgtgaacccagcccggaagggcctgtacgagggaaccggcagactgttcttcgagttttacagactgctgcacgacgcccggcctaaggaaggcgacgaccggcccttcttttggctgttcgagaatgtggtggccatgggagtcagcgacaagcgggatattagccggttcctggagagcaaccccgtgatgatcgatgccaaggaagtgagcgccgcccaccgggccagatacttctggggcaatctgcctggcatgaacagacccctggccagcaccgtgaacgacaagctggagctgcaggagtgcctggagcacggccggatcgccaagttcagcaaggtgagaaccatcaccacccgaagcaacagcatcaaacaaggcaaggaccagcactttcctgtgttcatgaacgagaaggaggacatcctgtggtgtaccgagatggagagagtgttcgggttcccagtccactacacagatgtcagcaacatgtctagactggccagacagagactgctgggaagaagctggtccgtccctgtgatcagacacctgttcgcccctctgaaggagtacttcgcctgcgtgagcagcggcaacagcaacgccaacagccggggccccagcttctctagcggcctggtgccactgtccctgagagggagccacatgggccccatggagatctacaaaaccgtgagcgcctggaagcggcagcctgtgcgcgtgctgagcctgtttcggaatatcgataaagtcctgaaaagcctgggattcctggagagcggctctggctccggcggtggcaccctgaagtacgtggaggatgtgacaaacgtggtcagacgggatgtggagaagtggggccccttcgatctggtgtacggcagcacccaacccctgggcagctcttgtgaccggtgccctggctggtacatgtttcagttccaccggatcctgcagtacgccctgccgagacaggagtcccagcggccattcttttggattttcatggacaacttgctgctgaccgaggatgaccaggaaactaccactcggttcctgcagaccgaagccgtgaccctgcaggacgtgagaggccgggactaccagaacgccatgcgggtgtggtccaacatccctggactgaaaagcaagcacgcacctctgacccctaaagaagaggagtacctgcaggcccaggtgcggagcagaagcaagctggacgcccctaaggtggatctgctggtgaagaattgcctcctgcccctgagagagtacttcaagtatttcagccagaatagtctgcccctgggaggcagcggcggcggcccccagaagagcgtgaccttcgaggacgtggccgtgtacttcacccaggccgagtgggacggcctgagccccgcccagaggaccctgtacagggacgtgatgctggagaactacggcaacgtggccagcctgggcttccccctgctgaagcccgccgtgatcagccagctggagggcggcggcgacctgggcggccccagccccctggccgccggcaccggcctgcagggcctgaggaccgtgggcggcccaagcagcggcgcccctcctcccagcggcggcagcccagccggctccccaacctctaccgaggagggcacctctgagtccgccacccccgagagcggccctggcacctccaccgagcccagcgagggcagcgcacccggcagccctgccggcagccccacctccacagaggagggaaccagcaccgagcccagcgaaggcagcgccccaggcaccagcaccgagcctagtgagcaggagattaaacggatcaacaagatcagaagaagacttgtgaaagacagcaacaccaagaaggccggcaagacaggccccatgaaaaccctgctggttagagtgatgacacccgatctgagagagcggctggaaaacctgagaaagaagcctgaaaatatcccccagcccatcagcaatacatctagagccaacctgaataagctgctgaccgattacaccgaaatgaagaaggcgatcctgcatgtgtactgggaagagttccagaaggaccctgtgggcctgatgagccgggtggcccagcctgccagcaagaagatcgatcagaacaagctgaaacctgagatggacgagaagggcaacctgaccaccgccggctttgcctgctctcagtgtggccagcccctgttcgtgtacaagctggagcaggtgtctgagaagggcaaggcttacaccaactacttcggacggtgcaatgtggccgagcacgaaaagctgatcctgctggcccagctgaagcccgagaaggatagcgacgaagccgtgacatatagcctgggaaagtttgggcagagggccctggatttctacagcattcatgtgaccaaggagtccacccaccccgtgaagcccctggcccagatcgccggaaacagatacgcctccggacctgtgggaaaggccctgagcgacgcatgtatgggcacaatcgcctccttcctgtctaagtaccaggacatcatcatcgaacaccagaaggtggtgaagggcaaccagaagagactggagagcctgcgggagctggccggcaaggaaaacctggaataccctagcgtgaccctgccacctcagcctcacaccaaggagggcgttgatgcctacaacgaagtgatcgcccgggtgcgaatgtgggtgaacctgaacctgtggcagaagctgaagctaagcagagatgatgccaagcctctgctgagactgaagggattcccttcctttcctctggtcgagagacaggccaacgaagtggactggtgggacatggtgtgtaacgtgaagaagctgatcaacgagaaaaaggaggatggcaaggtgttttggcagaatctggctggctacaagagacaggaagccctgagaccatacctgagcagcgaggaagatcggaagaagggaaagaaattcgctcggtaccagctgggcgacctgctgctgcacctggaaaagaagcacggcgaggactggggaaaggtgtacgacgaggcctgggagcggattgacaagaaagtggaaggcctgagcaagcacatcaagctggaagaggaacggagaagcgaggacgcccagagcaaggccgccctgaccgactggctgcgggctaaggccagcttcgtgatcgagggcctgaaggaggccgacaaggacgagttctgcagatgcgagctgaagctgcagaagtggtacggggacctgcggggaaagcccttcgccatcgaagccgagaacagcatcctggacatcagcggcttcagcaagcagtacaactgtgccttcatctggcagaaggacggcgtgaagaagctgaacctgtacctgatcatcaactacttcaagggcggcaagctgcggttcaagaagatcaaacctgaagccttcgaagccaacagattctacaccgtgatcaacaaaaagagcggcgagatcgtgcccatggaggtgaacttcaacttcgacgaccccaacctgatcatcctgcctctggcctttggcaagagacagggcagagaattcatctggaacgacctgctgtccctggaaaccggcagcctgaagctggccaacggaagagtgatcgagaagacactgtacaacagaagaacccggcaggatgagcctgccctgttcgtggccctgaccttcgagcggcgggaggtcctggactcctccaatatcaaaccaatgaacctgatcggcgtggcaagaggcgaaaacatccccgccgtgatcgccctgaccgaccccgagggctgcccactgagccggtttaaggatagcctgggaaacccaacccacatcctgagaatcggcgagagctataaggagaagcagcggaccatccaggccaagaaggaggtggagcagcggagagccggcggctacagccggaagtacgccagcaaagccaagaatctggcagacgatatggtgagaaacaccgctagagatctgctgtactacgccgtgacccaggatgccatgctgatcttcgccaacctgagccggggcttcggccggcagggcaagcggaccttcatggccgagagacagtacacacggatggaggactggctgaccgccaagctggcctacgagggcctgagcaagacctacctgtccaagacactggcccagtacacctccaagacatgcagcaactgtgggtttaccatcaccagcgccgactacgacagggtgctggagaagctgaagaagacagcaacaggctggatgaccacaattaacggcaaggagctgaaggtggagggccagattacctactacaacagatacaagagacagaacgtagtcaaggacctgtccgtcgagctggatagactgagcgaagaatctgtgaacaacgacatctcctcctggacaaagggcagaagcggagaagctctgagcctcctgaagaaaagattctcccatagacccgtgcaggagaagttcgtgtgcctgaactgcggcttcgagacacacgcagccgagcaagccgccctgaacatcgccagatcctggctgttcctgcggagccaggagtacaagaaataccagacaaacaagacaaccggcaacaccgataagagagccttcgtcgagacctggcagtccttttaccggaagaagcttaaggaggtgtggaaacctgccgtgcggtctggcggatctggcggaggctccaccagccccaagaaaaagagaaaagtctaagctgccttctgcggggcttgccttctggccatgcccttcttctctcccttgcacctgtacctcttggtctttgaataaagcctgagtaggaaggctagcaaaaaaaaaaaaaaaaaaaaaaaaaaaaaaaaaaaaaaaaaaaaaaaaaaaaaaaaaaaaaaaaaaaaaaaaaaaaaaaa

SEQ ID NO: 13069 - RNA, 5785 nt, synthetic construct
  source 1..5785: mol_type = other RNA
aggaaataagagagaaaagaagagtaagaagaaatataagagccaccatggcccctaagaagaagcgtaaagtgagccggatggaacgcctcgtctacgaggtgcggcagaagtgcagaaacatcgaggacatctgcatctcctgcggatctctgaacgtgaccctggagcacccactgttcatcggcggcatgtgccagaactgtaaaaactgttttctggagtgtgcctatcaatacgacgatgacggctaccagagctactgcaccatctgttgcggcggaagagaggtgctgatgtgtggaaataacaactgctgccggtgcttctgcgtggaatgcgtggacctgctggtgggccccggcgccgcccaggccgctattaaggaagatccttggaactgctacatgtgcggccacaagggcacatacggcctgctgagacggagagaggactggcctagcagactgcagatgttcttcgccaataaccacgaccaggagttcgacccccctaaggtgtaccctcccgtccccgccgagaagagaaagcccatccgggtcctgagcctgttcgatggcatcgccaccggtctgctggtgctgaaggacctgggcatccaggtggataggtacattgcctccgaggtgtgcgaggactccatcaccgtgggaatggtgcgtcatcagggcaagatcatgtacgtgggcgacgtgcggagcgtgacacagaagcatatccaggagtggggccctttcgacctggtgatcggcggcagcccttgcaatgacctgagcatcgtgaacccagcccggaagggcctgtacgagggaaccggcagactgttcttcgagttttacagactgctgcacgacgcccggcctaaggaaggcgacgaccggcccttcttttggctgttcgagaatgtggtggccatgggagtcagcgacaagcgggatattagccggttcctggagagcaaccccgtgatgatcgatgccaaggaagtgagcgccgcccaccgggccagatacttctggggcaatctgcctggcatgaacagacccctggccagcaccgtgaacgacaagctggagctgcaggagtgcctggagcacggccggatcgccaagttcagcaaggtgagaaccatcaccacccgaagcaacagcatcaaacaaggcaaggaccagcactttcctgtgttcatgaacgagaaggaggacatcctgtggtgtaccgagatggagagagtgttcgggttcccagtccactacacagatgtcagcaacatgtctagactggccagacagagactgctgggaagaagctggtccgtccctgtgatcagacacctgttcgcccctctgaaggagtacttcgcctgcgtgagcagcggcaacagcaacgccaacagccggggccccagcttctctagcggcctggtgccactgtccctgagagggagccacatgggccccatggagatctacaaaaccgtgagcgcctggaagcggcagcctgtgcgcgtgctgagcctgtttcggaatatcgataaagtcctgaaaagcctgggattcctggagagcggctctggctccggcggtggcaccctgaagtacgtggaggatgtgacaaacgtggtcagacgggatgtggagaagtggggccccttcgatctggtgtacggcagcacccaacccctgggcagctcttgtgaccggtgccctggctggtacatgtttcagttccaccggatcctgcagtacgccctgccgagacaggagtcccagcggccattcttttggattttcatggacaacttgctgctgaccgaggatgaccaggaaactaccactcggttcctgcagaccgaagccgtgaccctgcaggacgtgagaggccgggactaccagaacgccatgcgggtgtggtccaacatccctggactgaaaagcaagcacgcacctctgacccctaaagaagaggagtacctgcaggcccaggtgcggagcagaagcaagctggacgcccctaaggtggatctgctggtgaagaattgcctcctgcccctgagagagtacttcaagtatttcagccagaatagtctgcccctgggaggcagcggcggcggcgagaagcagttcagcttccagagcctgctgaccttcgaggacgtggccatcaacttcagcaagaaggagtgggagtgcctggacaccagccagagggacctgtacaggttcgtgatgctggagaactacagcaacctggtgagcgtgggcctgagcgtgagcaagcccgagctggtgacctgcctggagcagaacaaggagccctggatggtgaacatcgaggagagcgaggtgctggagcccggcggcccaagcagcggcgcccctcctcccagcggcggcagcccagccggctccccaacctctaccgaggagggcacctctgagtccgccacccccgagagcggccctggcacctccaccgagcccagcgagggcagcgcacccggcagccctgccggcagccccacctccacagaggagggaaccagcaccgagcccagcgaaggcagcgccccaggcaccagcaccgagcctagtgagcaggagattaaacggatcaacaagatcagaagaagacttgtgaaagacagcaacaccaagaaggccggcaagacaggccccatgaaaaccctgctggttagagtgatgacacccgatctgagagagcggctggaaaacctgagaaagaagcctgaaaatatcccccagcccatcagcaatacatctagagccaacctgaataagctgctgaccgattacaccgaaatgaagaaggcgatcctgcatgtgtactgggaagagttccagaaggaccctgtgggcctgatgagccgggtggcccagcctgccagcaagaagatcgatcagaacaagctgaaacctgagatggacgagaagggcaacctgaccaccgccggctttgcctgctctcagtgtggccagcccctgttcgtgtacaagctggagcaggtgtctgagaagggcaaggcttacaccaactacttcggacggtgcaatgtggccgagcacgaaaagctgatcctgctggcccagctgaagcccgagaaggatagcgacgaagccgtgacatatagcctgggaaagtttgggcagagggccctggatttctacagcattcatgtgaccaaggagtccacccaccccgtgaagcccctggcccagatcgccggaaacagatacgcctccggacctgtgggaaaggccctgagcgacgcatgtatgggcacaatcgcctccttcctgtctaagtaccaggacatcatcatcgaacaccagaaggtggtgaagggcaaccagaagagactggagagcctgcgggagctggccggcaaggaaaacctggaataccctagcgtgaccctgccacctcagcctcacaccaaggagggcgttgatgcctacaacgaagtgatcgcccgggtgcgaatgtgggtgaacctgaacctgtggcagaagctgaagctaagcagagatgatgccaagcctctgctgagactgaagggattcccttcctttcctctggtcgagagacaggccaacgaagtggactggtgggacatggtgtgtaacgtgaagaagctgatcaacgagaaaaaggaggatggcaaggtgttttggcagaatctggctggctacaagagacaggaagccctgagaccatacctgagcagcgaggaagatcggaagaagggaaagaaattcgctcggtaccagctgggcgacctgctgctgcacctggaaaagaagcacggcgaggactggggaaaggtgtacgacgaggcctgggagcggattgacaagaaagtggaaggcctgagcaagcacatcaagctggaagaggaacggagaagcgaggacgcccagagcaaggccgccctgaccgactggctgcgggctaaggccagcttcgtgatcgagggcctgaaggaggccgacaaggacgagttctgcagatgcgagctgaagctgcagaagtggtacggggacctgcggggaaagcccttcgccatcgaagccgagaacagcatcctggacatcagcggcttcagcaagcagtacaactgtgccttcatctggcagaaggacggcgtgaagaagctgaacctgtacctgatcatcaactacttcaagggcggcaagctgcggttcaagaagatcaaacctgaagccttcgaagccaacagattctacaccgtgatcaacaaaaagagcggcgagatcgtgcccatggaggtgaacttcaacttcgacgaccccaacctgatcatcctgcctctggcctttggcaagagacagggcagagaattcatctggaacgacctgctgtccctggaaaccggcagcctgaagctggccaacggaagagtgatcgagaagacactgtacaacagaagaacccggcaggatgagcctgccctgttcgtggccctgaccttcgagcggcgggaggtcctggactcctccaatatcaaaccaatgaacctgatcggcgtggcaagaggcgaaaacatccccgccgtgatcgccctgaccgaccccgagggctgcccactgagccggtttaaggatagcctgggaaacccaacccacatcctgagaatcggcgagagctataaggagaagcagcggaccatccaggccaagaaggaggtggagcagcggagagccggcggctacagccggaagtacgccagcaaagccaagaatctggcagacgatatggtgagaaacaccgctagagatctgctgtactacgccgtgacccaggatgccatgctgatcttcgccaacctgagccggggcttcggccggcagggcaagcggaccttcatggccgagagacagtacacacggatggaggactggctgaccgccaagctggcctacgagggcctgagcaagacctacctgtccaagacactggcccagtacacctccaagacatgcagcaactgtgggtttaccatcaccagcgccgactacgacagggtgctggagaagctgaagaagacagcaacaggctggatgaccacaattaacggcaaggagctgaaggtggagggccagattacctactacaacagatacaagagacagaacgtagtcaaggacctgtccgtcgagctggatagactgagcgaagaatctgtgaacaacgacatctcctcctggacaaagggcagaagcggagaagctctgagcctcctgaagaaaagattctcccatagacccgtgcaggagaagttcgtgtgcctgaactgcggcttcgagacacacgcagccgagcaagccgccctgaacatcgccagatcctggctgttcctgcggagccaggagtacaagaaataccagacaaacaagacaaccggcaacaccgataagagagccttcgtcgagacctggcagtccttttaccggaagaagcttaaggaggtgtggaaacctgccgtgcggtctggcggatctggcggaggctccaccagccccaagaaaaagagaaaagtctaagctgccttctgcggggcttgccttctggccatgcccttcttctctcccttgcacctgtacctcttggtctttgaataaagcctgagtaggaaggctagcaaaaaaaaaaaaaaaaaaaaaaaaaaaaaaaaaaaaaaaaaaaaaaaaaaaaaaaaaaaaaaaaaaaaaaaaaaaaaaaa

SEQ ID NO: 13070 - RNA, 5785 nt, synthetic construct
  source 1..5785: mol_type = other RNA
aggaaataagagagaaaagaagagtaagaagaaatataagagccaccatggcccctaagaagaagcgtaaagtgagccggatggaacgcctcgtctacgaggtgcggcagaagtgcagaaacatcgaggacatctgcatctcctgcggatctctgaacgtgaccctggagcacccactgttcatcggcggcatgtgccagaactgtaaaaactgttttctggagtgtgcctatcaatacgacgatgacggctaccagagctactgcaccatctgttgcggcggaagagaggtgctgatgtgtggaaataacaactgctgccggtgcttctgcgtggaatgcgtggacctgctggtgggccccggcgccgcccaggccgctattaaggaagatccttggaactgctacatgtgcggccacaagggcacatacggcctgctgagacggagagaggactggcctagcagactgcagatgttcttcgccaataaccacgaccaggagttcgacccccctaaggtgtaccctcccgtccccgccgagaagagaaagcccatccgggtcctgagcctgttcgatggcatcgccaccggtctgctggtgctgaaggacctgggcatccaggtggataggtacattgcctccgaggtgtgcgaggactccatcaccgtgggaatggtgcgtcatcagggcaagatcatgtacgtgggcgacgtgcggagcgtgacacagaagcatatccaggagtggggccctttcgacctggtgatcggcggcagcccttgcaatgacctgagcatcgtgaacccagcccggaagggcctgtacgagggaaccggcagactgttcttcgagttttacagactgctgcacgacgcccggcctaaggaaggcgacgaccggcccttcttttggctgttcgagaatgtggtggccatgggagtcagcgacaagcgggatattagccggttcctggagagcaaccccgtgatgatcgatgccaaggaagtgagcgccgcccaccgggccagatacttctggggcaatctgcctggcatgaacagacccctggccagcaccgtgaacgacaagctggagctgcaggagtgcctggagcacggccggatcgccaagttcagcaaggtgagaaccatcaccacccgaagcaacagcatcaaacaaggcaaggaccagcactttcctgtgttcatgaacgagaaggaggacatcctgtggtgtaccgagatggagagagtgttcgggttcccagtccactacacagatgtcagcaacatgtctagactggccagacagagactgctgggaagaagctggtccgtccctgtgatcagacacctgttcgcccctctgaaggagtacttcgcctgcgtgagcagcggcaacagcaacgccaacagccggggccccagcttctctagcggcctggtgccactgtccctgagagggagccacatgggccccatggagatctacaaaaccgtgagcgcctggaagcggcagcctgtgcgcgtgctgagcctgtttcggaatatcgataaagtcctgaaaagcctgggattcctggagagcggctctggctccggcggtggcaccctgaagtacgtggaggatgtgacaaacgtggtcagacgggatgtggagaagtggggccccttcgatctggtgtacggcagcacccaacccctgggcagctcttgtgaccggtgccctggctggtacatgtttcagttccaccggatcctgcagtacgccctgccgagacaggagtcccagcggccattcttttggattttcatggacaacttgctgctgaccgaggatgaccaggaaactaccactcggttcctgcagaccgaagccgtgaccctgcaggacgtgagaggccgggactaccagaacgccatgcgggtgtggtccaacatccctggactgaaaagcaagcacgcacctctgacccctaaagaagaggagtacctgcaggcccaggtgcggagcagaagcaagctggacgcccctaaggtggatctgctggtgaagaattgcctcctgcccctgagagagtacttcaagtatttcagccagaatagtctgcccctgggaggcagcggcggcggccagcccagggaggccgtgaccttcaaggacgtggaggtgaccttcagccaggacgagtggggctggctggaccccgcccagaggaacctgtacagggacgtgatgctggagaactacggcaacgtggtgagcctggtgggccccttcaccaagcccgtgctgatcagctggctggaggccagggagccctggggcctgaacgtgcagggcgcccagcccaagggcaagcccggcgtggcccccggcggcccaagcagcggcgcccctcctcccagcggcggcagcccagccggctccccaacctctaccgaggagggcacctctgagtccgccacccccgagagcggccctggcacctccaccgagcccagcgagggcagcgcacccggcagccctgccggcagccccacctccacagaggagggaaccagcaccgagcccagcgaaggcagcgccccaggcaccagcaccgagcctagtgagcaggagattaaacggatcaacaagatcagaagaagacttgtgaaagacagcaacaccaagaaggccggcaagacaggccccatgaaaaccctgctggttagagtgatgacacccgatctgagagagcggctggaaaacctgagaaagaagcctgaaaatatcccccagcccatcagcaatacatctagagccaacctgaataagctgctgaccgattacaccgaaatgaagaaggcgatcctgcatgtgtactgggaagagttccagaaggaccctgtgggcctgatgagccgggtggcccagcctgccagcaagaagatcgatcagaacaagctgaaacctgagatggacgagaagggcaacctgaccaccgccggctttgcctgctctcagtgtggccagcccctgttcgtgtacaagctggagcaggtgtctgagaagggcaaggcttacaccaactacttcggacggtgcaatgtggccgagcacgaaaagctgatcctgctggcccagctgaagcccgagaaggatagcgacgaagccgtgacatatagcctgggaaagtttgggcagagggccctggatttctacagcattcatgtgaccaaggagtccacccaccccgtgaagcccctggcccagatcgccggaaacagatacgcctccggacctgtgggaaaggccctgagcgacgcatgtatgggcacaatcgcctccttcctgtctaagtaccaggacatcatcatcgaacaccagaaggtggtgaagggcaaccagaagagactggagagcctgcgggagctggccggcaaggaaaacctggaataccctagcgtgaccctgccacctcagcctcacaccaaggagggcgttgatgcctacaacgaagtgatcgcccgggtgcgaatgtgggtgaacctgaacctgtggcagaagctgaagctaagcagagatgatgccaagcctctgctgagactgaagggattcccttcctttcctctggtcgagagacaggccaacgaagtggactggtgggacatggtgtgtaacgtgaagaagctgatcaacgagaaaaaggaggatggcaaggtgttttggcagaatctggctggctacaagagacaggaagccctgagaccatacctgagcagcgaggaagatcggaagaagggaaagaaattcgctcggtaccagctgggcgacctgctgctgcacctggaaaagaagcacggcgaggactggggaaaggtgtacgacgaggcctgggagcggattgacaagaaagtggaaggcctgagcaagcacatcaagctggaagaggaacggagaagcgaggacgcccagagcaaggccgccctgaccgactggctgcgggctaaggccagcttcgtgatcgagggcctgaaggaggccgacaaggacgagttctgcagatgcgagctgaagctgcagaagtggtacggggacctgcggggaaagcccttcgccatcgaagccgagaacagcatcctggacatcagcggcttcagcaagcagtacaactgtgccttcatctggcagaaggacggcgtgaagaagctgaacctgtacctgatcatcaactacttcaagggcggcaagctgcggttcaagaagatcaaacctgaagccttcgaagccaacagattctacaccgtgatcaacaaaaagagcggcgagatcgtgcccatggaggtgaacttcaacttcgacgaccccaacctgatcatcctgcctctggcctttggcaagagacagggcagagaattcatctggaacgacctgctgtccctggaaaccggcagcctgaagctggccaacggaagagtgatcgagaagacactgtacaacagaagaacccggcaggatgagcctgccctgttcgtggccctgaccttcgagcggcgggaggtcctggactcctccaatatcaaaccaatgaacctgatcggcgtggcaagaggcgaaaacatccccgccgtgatcgccctgaccgaccccgagggctgcccactgagccggtttaaggatagcctgggaaacccaacccacatcctgagaatcggcgagagctataaggagaagcagcggaccatccaggccaagaaggaggtggagcagcggagagccggcggctacagccggaagtacgccagcaaagccaagaatctggcagacgatatggtgagaaacaccgctagagatctgctgtactacgccgtgacccaggatgccatgctgatcttcgccaacctgagccggggcttcggccggcagggcaagcggaccttcatggccgagagacagtacacacggatggaggactggctgaccgccaagctggcctacgagggcctgagcaagacctacctgtccaagacactggcccagtacacctccaagacatgcagcaactgtgggtttaccatcaccagcgccgactacgacagggtgctggagaagctgaagaagacagcaacaggctggatgaccacaattaacggcaaggagctgaaggtggagggccagattacctactacaacagatacaagagacagaacgtagtcaaggacctgtccgtcgagctggatagactgagcgaagaatctgtgaacaacgacatctcctcctggacaaagggcagaagcggagaagctctgagcctcctgaagaaaagattctcccatagacccgtgcaggagaagttcgtgtgcctgaactgcggcttcgagacacacgcagccgagcaagccgccctgaacatcgccagatcctggctgttcctgcggagccaggagtacaagaaataccagacaaacaagacaaccggcaacaccgataagagagccttcgtcgagacctggcagtccttttaccggaagaagcttaaggaggtgtggaaacctgccgtgcggtctggcggatctggcggaggctccaccagccccaagaaaaagagaaaagtctaagctgccttctgcggggcttgccttctggccatgcccttcttctctcccttgcacctgtacctcttggtctttgaataaagcctgagtaggaaggctagcaaaaaaaaaaaaaaaaaaaaaaaaaaaaaaaaaaaaaaaaaaaaaaaaaaaaaaaaaaaaaaaaaaaaaaaaaaaaaaaa

SEQ ID NO: 13071 - RNA, 5785 nt, synthetic construct
  source 1..5785: mol_type = other RNA
aggaaataagagagaaaagaagagtaagaagaaatataagagccaccatggcccctaagaagaagcgtaaagtgagccggatggaacgcctcgtctacgaggtgcggcagaagtgcagaaacatcgaggacatctgcatctcctgcggatctctgaacgtgaccctggagcacccactgttcatcggcggcatgtgccagaactgtaaaaactgttttctggagtgtgcctatcaatacgacgatgacggctaccagagctactgcaccatctgttgcggcggaagagaggtgctgatgtgtggaaataacaactgctgccggtgcttctgcgtggaatgcgtggacctgctggtgggccccggcgccgcccaggccgctattaaggaagatccttggaactgctacatgtgcggccacaagggcacatacggcctgctgagacggagagaggactggcctagcagactgcagatgttcttcgccaataaccacgaccaggagttcgacccccctaaggtgtaccctcccgtccccgccgagaagagaaagcccatccgggtcctgagcctgttcgatggcatcgccaccggtctgctggtgctgaaggacctgggcatccaggtggataggtacattgcctccgaggtgtgcgaggactccatcaccgtgggaatggtgcgtcatcagggcaagatcatgtacgtgggcgacgtgcggagcgtgacacagaagcatatccaggagtggggccctttcgacctggtgatcggcggcagcccttgcaatgacctgagcatcgtgaacccagcccggaagggcctgtacgagggaaccggcagactgttcttcgagttttacagactgctgcacgacgcccggcctaaggaaggcgacgaccggcccttcttttggctgttcgagaatgtggtggccatgggagtcagcgacaagcgggatattagccggttcctggagagcaaccccgtgatgatcgatgccaaggaagtgagcgccgcccaccgggccagatacttctggggcaatctgcctggcatgaacagacccctggccagcaccgtgaacgacaagctggagctgcaggagtgcctggagcacggccggatcgccaagttcagcaaggtgagaaccatcaccacccgaagcaacagcatcaaacaaggcaaggaccagcactttcctgtgttcatgaacgagaaggaggacatcctgtggtgtaccgagatggagagagtgttcgggttcccagtccactacacagatgtcagcaacatgtctagactggccagacagagactgctgggaagaagctggtccgtccctgtgatcagacacctgttcgcccctctgaaggagtacttcgcctgcgtgagcagcggcaacagcaacgccaacagccggggccccagcttctctagcggcctggtgccactgtccctgagagggagccacatgggccccatggagatctacaaaaccgtgagcgcctggaagcggcagcctgtgcgcgtgctgagcctgtttcggaatatcgataaagtcctgaaaagcctgggattcctggagagcggctctggctccggcggtggcaccctgaagtacgtggaggatgtgacaaacgtggtcagacgggatgtggagaagtggggccccttcgatctggtgtacggcagcacccaacccctgggcagctcttgtgaccggtgccctggctggtacatgtttcagttccaccggatcctgcagtacgccctgccgagacaggagtcccagcggccattcttttggattttcatggacaacttgctgctgaccgaggatgaccaggaaactaccactcggttcctgcagaccgaagccgtgaccctgcaggacgtgagaggccgggactaccagaacgccatgcgggtgtggtccaacatccctggactgaaaagcaagcacgcacctctgacccctaaagaagaggagtacctgcaggcccaggtgcggagcagaagcaagctggacgcccctaaggtggatctgctggtgaagaattgcctcctgcccctgagagagtacttcaagtatttcagccagaatagtctgcccctgggaggcagcggcggcggcgccgagctgcccgtggtgttcgaggacgtggccgtgtacttcaccagggaggagtggggcatgctggacaagaggcagaaggagctgtacagggacgtgatgaggatgaactacgagctgatggccagcctgggccccgccgccgccaagcccgacctgatcagcaagctggagaggagggccgccccctggatcaaggaccccaacggccccaagtggggcaagggcaggccccccggcaacggcggcccaagcagcggcgcccctcctcccagcggcggcagcccagccggctccccaacctctaccgaggagggcacctctgagtccgccacccccgagagcggccctggcacctccaccgagcccagcgagggcagcgcacccggcagccctgccggcagccccacctccacagaggagggaaccagcaccgagcccagcgaaggcagcgccccaggcaccagcaccgagcctagtgagcaggagattaaacggatcaacaagatcagaagaagacttgtgaaagacagcaacaccaagaaggccggcaagacaggccccatgaaaaccctgctggttagagtgatgacacccgatctgagagagcggctggaaaacctgagaaagaagcctgaaaatatcccccagcccatcagcaatacatctagagccaacctgaataagctgctgaccgattacaccgaaatgaagaaggcgatcctgcatgtgtactgggaagagttccagaaggaccctgtgggcctgatgagccgggtggcccagcctgccagcaagaagatcgatcagaacaagctgaaacctgagatggacgagaagggcaacctgaccaccgccggctttgcctgctctcagtgtggccagcccctgttcgtgtacaagctggagcaggtgtctgagaagggcaaggcttacaccaactacttcggacggtgcaatgtggccgagcacgaaaagctgatcctgctggcccagctgaagcccgagaaggatagcgacgaagccgtgacatatagcctgggaaagtttgggcagagggccctggatttctacagcattcatgtgaccaaggagtccacccaccccgtgaagcccctggcccagatcgccggaaacagatacgcctccggacctgtgggaaaggccctgagcgacgcatgtatgggcacaatcgcctccttcctgtctaagtaccaggacatcatcatcgaacaccagaaggtggtgaagggcaaccagaagagactggagagcctgcgggagctggccggcaaggaaaacctggaataccctagcgtgaccctgccacctcagcctcacaccaaggagggcgttgatgcctacaacgaagtgatcgcccgggtgcgaatgtgggtgaacctgaacctgtggcagaagctgaagctaagcagagatgatgccaagcctctgctgagactgaagggattcccttcctttcctctggtcgagagacaggccaacgaagtggactggtgggacatggtgtgtaacgtgaagaagctgatcaacgagaaaaaggaggatggcaaggtgttttggcagaatctggctggctacaagagacaggaagccctgagaccatacctgagcagcgaggaagatcggaagaagggaaagaaattcgctcggtaccagctgggcgacctgctgctgcacctggaaaagaagcacggcgaggactggggaaaggtgtacgacgaggcctgggagcggattgacaagaaagtggaaggcctgagcaagcacatcaagctggaagaggaacggagaagcgaggacgcccagagcaaggccgccctgaccgactggctgcgggctaaggccagcttcgtgatcgagggcctgaaggaggccgacaaggacgagttctgcagatgcgagctgaagctgcagaagtggtacggggacctgcggggaaagcccttcgccatcgaagccgagaacagcatcctggacatcagcggcttcagcaagcagtacaactgtgccttcatctggcagaaggacggcgtgaagaagctgaacctgtacctgatcatcaactacttcaagggcggcaagctgcggttcaagaagatcaaacctgaagccttcgaagccaacagattctacaccgtgatcaacaaaaagagcggcgagatcgtgcccatggaggtgaacttcaacttcgacgaccccaacctgatcatcctgcctctggcctttggcaagagacagggcagagaattcatctggaacgacctgctgtccctggaaaccggcagcctgaagctggccaacggaagagtgatcgagaagacactgtacaacagaagaacccggcaggatgagcctgccctgttcgtggccctgaccttcgagcggcgggaggtcctggactcctccaatatcaaaccaatgaacctgatcggcgtggcaagaggcgaaaacatccccgccgtgatcgccctgaccgaccccgagggctgcccactgagccggtttaaggatagcctgggaaacccaacccacatcctgagaatcggcgagagctataaggagaagcagcggaccatccaggccaagaaggaggtggagcagcggagagccggcggctacagccggaagtacgccagcaaagccaagaatctggcagacgatatggtgagaaacaccgctagagatctgctgtactacgccgtgacccaggatgccatgctgatcttcgccaacctgagccggggcttcggccggcagggcaagcggaccttcatggccgagagacagtacacacggatggaggactggctgaccgccaagctggcctacgagggcctgagcaagacctacctgtccaagacactggcccagtacacctccaagacatgcagcaactgtgggtttaccatcaccagcgccgactacgacagggtgctggagaagctgaagaagacagcaacaggctggatgaccacaattaacggcaaggagctgaaggtggagggccagattacctactacaacagatacaagagacagaacgtagtcaaggacctgtccgtcgagctggatagactgagcgaagaatctgtgaacaacgacatctcctcctggacaaagggcagaagcggagaagctctgagcctcctgaagaaaagattctcccatagacccgtgcaggagaagttcgtgtgcctgaactgcggcttcgagacacacgcagccgagcaagccgccctgaacatcgccagatcctggctgttcctgcggagccaggagtacaagaaataccagacaaacaagacaaccggcaacaccgataagagagccttcgtcgagacctggcagtccttttaccggaagaagcttaaggaggtgtggaaacctgccgtgcggtctggcggatctggcggaggctccaccagccccaagaaaaagagaaaagtctaagctgccttctgcggggcttgccttctggccatgcccttcttctctcccttgcacctgtacctcttggtctttgaataaagcctgagtaggaaggctagcaaaaaaaaaaaaaaaaaaaaaaaaaaaaaaaaaaaaaaaaaaaaaaaaaaaaaaaaaaaaaaaaaaaaaaaaaaaaaaaa

SEQ ID NO: 13072 - RNA, 5785 nt, synthetic construct
  source 1..5785: mol_type = other RNA
aggaaataagagagaaaagaagagtaagaagaaatataagagccaccatggcccctaagaagaagcgtaaagtgagccggatggaacgcctcgtctacgaggtgcggcagaagtgcagaaacatcgaggacatctgcatctcctgcggatctctgaacgtgaccctggagcacccactgttcatcggcggcatgtgccagaactgtaaaaactgttttctggagtgtgcctatcaatacgacgatgacggctaccagagctactgcaccatctgttgcggcggaagagaggtgctgatgtgtggaaataacaactgctgccggtgcttctgcgtggaatgcgtggacctgctggtgggccccggcgccgcccaggccgctattaaggaagatccttggaactgctacatgtgcggccacaagggcacatacggcctgctgagacggagagaggactggcctagcagactgcagatgttcttcgccaataaccacgaccaggagttcgacccccctaaggtgtaccctcccgtccccgccgagaagagaaagcccatccgggtcctgagcctgttcgatggcatcgccaccggtctgctggtgctgaaggacctgggcatccaggtggataggtacattgcctccgaggtgtgcgaggactccatcaccgtgggaatggtgcgtcatcagggcaagatcatgtacgtgggcgacgtgcggagcgtgacacagaagcatatccaggagtggggccctttcgacctggtgatcggcggcagcccttgcaatgacctgagcatcgtgaacccagcccggaagggcctgtacgagggaaccggcagactgttcttcgagttttacagactgctgcacgacgcccggcctaaggaaggcgacgaccggcccttcttttggctgttcgagaatgtggtggccatgggagtcagcgacaagcgggatattagccggttcctggagagcaaccccgtgatgatcgatgccaaggaagtgagcgccgcccaccgggccagatacttctggggcaatctgcctggcatgaacagacccctggccagcaccgtgaacgacaagctggagctgcaggagtgcctggagcacggccggatcgccaagttcagcaaggtgagaaccatcaccacccgaagcaacagcatcaaacaaggcaaggaccagcactttcctgtgttcatgaacgagaaggaggacatcctgtggtgtaccgagatggagagagtgttcgggttcccagtccactacacagatgtcagcaacatgtctagactggccagacagagactgctgggaagaagctggtccgtccctgtgatcagacacctgttcgcccctctgaaggagtacttcgcctgcgtgagcagcggcaacagcaacgccaacagccggggccccagcttctctagcggcctggtgccactgtccctgagagggagccacatgggccccatggagatctacaaaaccgtgagcgcctggaagcggcagcctgtgcgcgtgctgagcctgtttcggaatatcgataaagtcctgaaaagcctgggattcctggagagcggctctggctccggcggtggcaccctgaagtacgtggaggatgtgacaaacgtggtcagacgggatgtggagaagtggggccccttcgatctggtgtacggcagcacccaacccctgggcagctcttgtgaccggtgccctggctggtacatgtttcagttccaccggatcctgcagtacgccctgccgagacaggagtcccagcggccattcttttggattttcatggacaacttgctgctgaccgaggatgaccaggaaactaccactcggttcctgcagaccgaagccgtgaccctgcaggacgtgagaggccgggactaccagaacgccatgcgggtgtggtccaacatccctggactgaaaagcaagcacgcacctctgacccctaaagaagaggagtacctgcaggcccaggtgcggagcagaagcaagctggacgcccctaaggtggatctgctggtgaagaattgcctcctgcccctgagagagtacttcaagtatttcagccagaatagtctgcccctgggaggcagcggcggcggctgccaggagcccgtgagcttcgccgaggtggccgtgtacttcagcagggaggagtgggccctgctggaccccgcccagagggccctgtacagggacgtgatgctggagacctaccagtgcgtggcctggctggccagcctgcccgcccccaagcccggcctgatcagcctgctggagggcggcgaggacccctggatccccggcgtgaggagccccgaggccatgcccggcgacctgagccccggcggcccaagcagcggcgcccctcctcccagcggcggcagcccagccggctccccaacctctaccgaggagggcacctctgagtccgccacccccgagagcggccctggcacctccaccgagcccagcgagggcagcgcacccggcagccctgccggcagccccacctccacagaggagggaaccagcaccgagcccagcgaaggcagcgccccaggcaccagcaccgagcctagtgagcaggagattaaacggatcaacaagatcagaagaagacttgtgaaagacagcaacaccaagaaggccggcaagacaggccccatgaaaaccctgctggttagagtgatgacacccgatctgagagagcggctggaaaacctgagaaagaagcctgaaaatatcccccagcccatcagcaatacatctagagccaacctgaataagctgctgaccgattacaccgaaatgaagaaggcgatcctgcatgtgtactgggaagagttccagaaggaccctgtgggcctgatgagccgggtggcccagcctgccagcaagaagatcgatcagaacaagctgaaacctgagatggacgagaagggcaacctgaccaccgccggctttgcctgctctcagtgtggccagcccctgttcgtgtacaagctggagcaggtgtctgagaagggcaaggcttacaccaactacttcggacggtgcaatgtggccgagcacgaaaagctgatcctgctggcccagctgaagcccgagaaggatagcgacgaagccgtgacatatagcctgggaaagtttgggcagagggccctggatttctacagcattcatgtgaccaaggagtccacccaccccgtgaagcccctggcccagatcgccggaaacagatacgcctccggacctgtgggaaaggccctgagcgacgcatgtatgggcacaatcgcctccttcctgtctaagtaccaggacatcatcatcgaacaccagaaggtggtgaagggcaaccagaagagactggagagcctgcgggagctggccggcaaggaaaacctggaataccctagcgtgaccctgccacctcagcctcacaccaaggagggcgttgatgcctacaacgaagtgatcgcccgggtgcgaatgtgggtgaacctgaacctgtggcagaagctgaagctaagcagagatgatgccaagcctctgctgagactgaagggattcccttcctttcctctggtcgagagacaggccaacgaagtggactggtgggacatggtgtgtaacgtgaagaagctgatcaacgagaaaaaggaggatggcaaggtgttttggcagaatctggctggctacaagagacaggaagccctgagaccatacctgagcagcgaggaagatcggaagaagggaaagaaattcgctcggtaccagctgggcgacctgctgctgcacctggaaaagaagcacggcgaggactggggaaaggtgtacgacgaggcctgggagcggattgacaagaaagtggaaggcctgagcaagcacatcaagctggaagaggaacggagaagcgaggacgcccagagcaaggccgccctgaccgactggctgcgggctaaggccagcttcgtgatcgagggcctgaaggaggccgacaaggacgagttctgcagatgcgagctgaagctgcagaagtggtacggggacctgcggggaaagcccttcgccatcgaagccgagaacagcatcctggacatcagcggcttcagcaagcagtacaactgtgccttcatctggcagaaggacggcgtgaagaagctgaacctgtacctgatcatcaactacttcaagggcggcaagctgcggttcaagaagatcaaacctgaagccttcgaagccaacagattctacaccgtgatcaacaaaaagagcggcgagatcgtgcccatggaggtgaacttcaacttcgacgaccccaacctgatcatcctgcctctggcctttggcaagagacagggcagagaattcatctggaacgacctgctgtccctggaaaccggcagcctgaagctggccaacggaagagtgatcgagaagacactgtacaacagaagaacccggcaggatgagcctgccctgttcgtggccctgaccttcgagcggcgggaggtcctggactcctccaatatcaaaccaatgaacctgatcggcgtggcaagaggcgaaaacatccccgccgtgatcgccctgaccgaccccgagggctgcccactgagccggtttaaggatagcctgggaaacccaacccacatcctgagaatcggcgagagctataaggagaagcagcggaccatccaggccaagaaggaggtggagcagcggagagccggcggctacagccggaagtacgccagcaaagccaagaatctggcagacgatatggtgagaaacaccgctagagatctgctgtactacgccgtgacccaggatgccatgctgatcttcgccaacctgagccggggcttcggccggcagggcaagcggaccttcatggccgagagacagtacacacggatggaggactggctgaccgccaagctggcctacgagggcctgagcaagacctacctgtccaagacactggcccagtacacctccaagacatgcagcaactgtgggtttaccatcaccagcgccgactacgacagggtgctggagaagctgaagaagacagcaacaggctggatgaccacaattaacggcaaggagctgaaggtggagggccagattacctactacaacagatacaagagacagaacgtagtcaaggacctgtccgtcgagctggatagactgagcgaagaatctgtgaacaacgacatctcctcctggacaaagggcagaagcggagaagctctgagcctcctgaagaaaagattctcccatagacccgtgcaggagaagttcgtgtgcctgaactgcggcttcgagacacacgcagccgagcaagccgccctgaacatcgccagatcctggctgttcctgcggagccaggagtacaagaaataccagacaaacaagacaaccggcaacaccgataagagagccttcgtcgagacctggcagtccttttaccggaagaagcttaaggaggtgtggaaacctgccgtgcggtctggcggatctggcggaggctccaccagccccaagaaaaagagaaaagtctaagctgccttctgcggggcttgccttctggccatgcccttcttctctcccttgcacctgtacctcttggtctttgaataaagcctgagtaggaaggctagcaaaaaaaaaaaaaaaaaaaaaaaaaaaaaaaaaaaaaaaaaaaaaaaaaaaaaaaaaaaaaaaaaaaaaaaaaaaaaaaa

SEQ ID NO: 13073 - RNA, 5785 nt, synthetic construct
  source 1..5785: mol_type = other RNA
aggaaataagagagaaaagaagagtaagaagaaatataagagccaccatggcccctaagaagaagcgtaaagtgagccggatggaacgcctcgtctacgaggtgcggcagaagtgcagaaacatcgaggacatctgcatctcctgcggatctctgaacgtgaccctggagcacccactgttcatcggcggcatgtgccagaactgtaaaaactgttttctggagtgtgcctatcaatacgacgatgacggctaccagagctactgcaccatctgttgcggcggaagagaggtgctgatgtgtggaaataacaactgctgccggtgcttctgcgtggaatgcgtggacctgctggtgggccccggcgccgcccaggccgctattaaggaagatccttggaactgctacatgtgcggccacaagggcacatacggcctgctgagacggagagaggactggcctagcagactgcagatgttcttcgccaataaccacgaccaggagttcgacccccctaaggtgtaccctcccgtccccgccgagaagagaaagcccatccgggtcctgagcctgttcgatggcatcgccaccggtctgctggtgctgaaggacctgggcatccaggtggataggtacattgcctccgaggtgtgcgaggactccatcaccgtgggaatggtgcgtcatcagggcaagatcatgtacgtgggcgacgtgcggagcgtgacacagaagcatatccaggagtggggccctttcgacctggtgatcggcggcagcccttgcaatgacctgagcatcgtgaacccagcccggaagggcctgtacgagggaaccggcagactgttcttcgagttttacagactgctgcacgacgcccggcctaaggaaggcgacgaccggcccttcttttggctgttcgagaatgtggtggccatgggagtcagcgacaagcgggatattagccggttcctggagagcaaccccgtgatgatcgatgccaaggaagtgagcgccgcccaccgggccagatacttctggggcaatctgcctggcatgaacagacccctggccagcaccgtgaacgacaagctggagctgcaggagtgcctggagcacggccggatcgccaagttcagcaaggtgagaaccatcaccacccgaagcaacagcatcaaacaaggcaaggaccagcactttcctgtgttcatgaacgagaaggaggacatcctgtggtgtaccgagatggagagagtgttcgggttcccagtccactacacagatgtcagcaacatgtctagactggccagacagagactgctgggaagaagctggtccgtccctgtgatcagacacctgttcgcccctctgaaggagtacttcgcctgcgtgagcagcggcaacagcaacgccaacagccggggccccagcttctctagcggcctggtgccactgtccctgagagggagccacatgggccccatggagatctacaaaaccgtgagcgcctggaagcggcagcctgtgcgcgtgctgagcctgtttcggaatatcgataaagtcctgaaaagcctgggattcctggagagcggctctggctccggcggtggcaccctgaagtacgtggaggatgtgacaaacgtggtcagacgggatgtggagaagtggggccccttcgatctggtgtacggcagcacccaacccctgggcagctcttgtgaccggtgccctggctggtacatgtttcagttccaccggatcctgcagtacgccctgccgagacaggagtcccagcggccattcttttggattttcatggacaacttgctgctgaccgaggatgaccaggaaactaccactcggttcctgcagaccgaagccgtgaccctgcaggacgtgagaggccgggactaccagaacgccatgcgggtgtggtccaacatccctggactgaaaagcaagcacgcacctctgacccctaaagaagaggagtacctgcaggcccaggtgcggagcagaagcaagctggacgcccctaaggtggatctgctggtgaagaattgcctcctgcccctgagagagtacttcaagtatttcagccagaatagtctgcccctgggaggcagcggcggcggcatgaacgccgtgacctacgaggacgtgcacgtgaacttcacccaggaggagtgggccctgctggaccccagccagaagaagctgtacaaggacgtgatggtggagacctacaggaacctgaacgccatcggcttcaactgggaggcccacaacatcgaggagtactgccagagcagcaggaggcacaggaggtgcgagaggagccagagcgccgagaagcccagcgagtacacccagtgcggcggcggcccaagcagcggcgcccctcctcccagcggcggcagcccagccggctccccaacctctaccgaggagggcacctctgagtccgccacccccgagagcggccctggcacctccaccgagcccagcgagggcagcgcacccggcagccctgccggcagccccacctccacagaggagggaaccagcaccgagcccagcgaaggcagcgccccaggcaccagcaccgagcctagtgagcaggagattaaacggatcaacaagatcagaagaagacttgtgaaagacagcaacaccaagaaggccggcaagacaggccccatgaaaaccctgctggttagagtgatgacacccgatctgagagagcggctggaaaacctgagaaagaagcctgaaaatatcccccagcccatcagcaatacatctagagccaacctgaataagctgctgaccgattacaccgaaatgaagaaggcgatcctgcatgtgtactgggaagagttccagaaggaccctgtgggcctgatgagccgggtggcccagcctgccagcaagaagatcgatcagaacaagctgaaacctgagatggacgagaagggcaacctgaccaccgccggctttgcctgctctcagtgtggccagcccctgttcgtgtacaagctggagcaggtgtctgagaagggcaaggcttacaccaactacttcggacggtgcaatgtggccgagcacgaaaagctgatcctgctggcccagctgaagcccgagaaggatagcgacgaagccgtgacatatagcctgggaaagtttgggcagagggccctggatttctacagcattcatgtgaccaaggagtccacccaccccgtgaagcccctggcccagatcgccggaaacagatacgcctccggacctgtgggaaaggccctgagcgacgcatgtatgggcacaatcgcctccttcctgtctaagtaccaggacatcatcatcgaacaccagaaggtggtgaagggcaaccagaagagactggagagcctgcgggagctggccggcaaggaaaacctggaataccctagcgtgaccctgccacctcagcctcacaccaaggagggcgttgatgcctacaacgaagtgatcgcccgggtgcgaatgtgggtgaacctgaacctgtggcagaagctgaagctaagcagagatgatgccaagcctctgctgagactgaagggattcccttcctttcctctggtcgagagacaggccaacgaagtggactggtgggacatggtgtgtaacgtgaagaagctgatcaacgagaaaaaggaggatggcaaggtgttttggcagaatctggctggctacaagagacaggaagccctgagaccatacctgagcagcgaggaagatcggaagaagggaaagaaattcgctcggtaccagctgggcgacctgctgctgcacctggaaaagaagcacggcgaggactggggaaaggtgtacgacgaggcctgggagcggattgacaagaaagtggaaggcctgagcaagcacatcaagctggaagaggaacggagaagcgaggacgcccagagcaaggccgccctgaccgactggctgcgggctaaggccagcttcgtgatcgagggcctgaaggaggccgacaaggacgagttctgcagatgcgagctgaagctgcagaagtggtacggggacctgcggggaaagcccttcgccatcgaagccgagaacagcatcctggacatcagcggcttcagcaagcagtacaactgtgccttcatctggcagaaggacggcgtgaagaagctgaacctgtacctgatcatcaactacttcaagggcggcaagctgcggttcaagaagatcaaacctgaagccttcgaagccaacagattctacaccgtgatcaacaaaaagagcggcgagatcgtgcccatggaggtgaacttcaacttcgacgaccccaacctgatcatcctgcctctggcctttggcaagagacagggcagagaattcatctggaacgacctgctgtccctggaaaccggcagcctgaagctggccaacggaagagtgatcgagaagacactgtacaacagaagaacccggcaggatgagcctgccctgttcgtggccctgaccttcgagcggcgggaggtcctggactcctccaatatcaaaccaatgaacctgatcggcgtggcaagaggcgaaaacatccccgccgtgatcgccctgaccgaccccgagggctgcccactgagccggtttaaggatagcctgggaaacccaacccacatcctgagaatcggcgagagctataaggagaagcagcggaccatccaggccaagaaggaggtggagcagcggagagccggcggctacagccggaagtacgccagcaaagccaagaatctggcagacgatatggtgagaaacaccgctagagatctgctgtactacgccgtgacccaggatgccatgctgatcttcgccaacctgagccggggcttcggccggcagggcaagcggaccttcatggccgagagacagtacacacggatggaggactggctgaccgccaagctggcctacgagggcctgagcaagacctacctgtccaagacactggcccagtacacctccaagacatgcagcaactgtgggtttaccatcaccagcgccgactacgacagggtgctggagaagctgaagaagacagcaacaggctggatgaccacaattaacggcaaggagctgaaggtggagggccagattacctactacaacagatacaagagacagaacgtagtcaaggacctgtccgtcgagctggatagactgagcgaagaatctgtgaacaacgacatctcctcctggacaaagggcagaagcggagaagctctgagcctcctgaagaaaagattctcccatagacccgtgcaggagaagttcgtgtgcctgaactgcggcttcgagacacacgcagccgagcaagccgccctgaacatcgccagatcctggctgttcctgcggagccaggagtacaagaaataccagacaaacaagacaaccggcaacaccgataagagagccttcgtcgagacctggcagtccttttaccggaagaagcttaaggaggtgtggaaacctgccgtgcggtctggcggatctggcggaggctccaccagccccaagaaaaagagaaaagtctaagctgccttctgcggggcttgccttctggccatgcccttcttctctcccttgcacctgtacctcttggtctttgaataaagcctgagtaggaaggctagcaaaaaaaaaaaaaaaaaaaaaaaaaaaaaaaaaaaaaaaaaaaaaaaaaaaaaaaaaaaaaaaaaaaaaaaaaaaaaaaa

SEQ ID NO: 13074 - RNA, 5785 nt, synthetic construct
  source 1..5785: mol_type = other RNA
aggaaataagagagaaaagaagagtaagaagaaatataagagccaccatggcccctaagaagaagcgtaaagtgagccggatggaacgcctcgtctacgaggtgcggcagaagtgcagaaacatcgaggacatctgcatctcctgcggatctctgaacgtgaccctggagcacccactgttcatcggcggcatgtgccagaactgtaaaaactgttttctggagtgtgcctatcaatacgacgatgacggctaccagagctactgcaccatctgttgcggcggaagagaggtgctgatgtgtggaaataacaactgctgccggtgcttctgcgtggaatgcgtggacctgctggtgggccccggcgccgcccaggccgctattaaggaagatccttggaactgctacatgtgcggccacaagggcacatacggcctgctgagacggagagaggactggcctagcagactgcagatgttcttcgccaataaccacgaccaggagttcgacccccctaaggtgtaccctcccgtccccgccgagaagagaaagcccatccgggtcctgagcctgttcgatggcatcgccaccggtctgctggtgctgaaggacctgggcatccaggtggataggtacattgcctccgaggtgtgcgaggactccatcaccgtgggaatggtgcgtcatcagggcaagatcatgtacgtgggcgacgtgcggagcgtgacacagaagcatatccaggagtggggccctttcgacctggtgatcggcggcagcccttgcaatgacctgagcatcgtgaacccagcccggaagggcctgtacgagggaaccggcagactgttcttcgagttttacagactgctgcacgacgcccggcctaaggaaggcgacgaccggcccttcttttggctgttcgagaatgtggtggccatgggagtcagcgacaagcgggatattagccggttcctggagagcaaccccgtgatgatcgatgccaaggaagtgagcgccgcccaccgggccagatacttctggggcaatctgcctggcatgaacagacccctggccagcaccgtgaacgacaagctggagctgcaggagtgcctggagcacggccggatcgccaagttcagcaaggtgagaaccatcaccacccgaagcaacagcatcaaacaaggcaaggaccagcactttcctgtgttcatgaacgagaaggaggacatcctgtggtgtaccgagatggagagagtgttcgggttcccagtccactacacagatgtcagcaacatgtctagactggccagacagagactgctgggaagaagctggtccgtccctgtgatcagacacctgttcgcccctctgaaggagtacttcgcctgcgtgagcagcggcaacagcaacgccaacagccggggccccagcttctctagcggcctggtgccactgtccctgagagggagccacatgggccccatggagatctacaaaaccgtgagcgcctggaagcggcagcctgtgcgcgtgctgagcctgtttcggaatatcgataaagtcctgaaaagcctgggattcctggagagcggctctggctccggcggtggcaccctgaagtacgtggaggatgtgacaaacgtggtcagacgggatgtggagaagtggggccccttcgatctggtgtacggcagcacccaacccctgggcagctcttgtgaccggtgccctggctggtacatgtttcagttccaccggatcctgcagtacgccctgccgagacaggagtcccagcggccattcttttggattttcatggacaacttgctgctgaccgaggatgaccaggaaactaccactcggttcctgcagaccgaagccgtgaccctgcaggacgtgagaggccgggactaccagaacgccatgcgggtgtggtccaacatccctggactgaaaagcaagcacgcacctctgacccctaaagaagaggagtacctgcaggcccaggtgcggagcagaagcaagctggacgcccctaaggtggatctgctggtgaagaattgcctcctgcccctgagagagtacttcaagtatttcagccagaatagtctgcccctgggaggcagcggcggcggcttccaggaggtggtgaccttcgaggacgtggccgtgcacttcacccaggccgagtgggccggcctgagcagcgcccagagggccctgcacaggagcgtgatgctggagaactacggcaacctgaccagcctgggctacaccgtgcccaacagcgccctgatcagcctgctggagggcagggacctgccctggggcctggaggcccagaacgacccccccgccgagaggagcacccacgtgtgcggcggcccaagcagcggcgcccctcctcccagcggcggcagcccagccggctccccaacctctaccgaggagggcacctctgagtccgccacccccgagagcggccctggcacctccaccgagcccagcgagggcagcgcacccggcagccctgccggcagccccacctccacagaggagggaaccagcaccgagcccagcgaaggcagcgccccaggcaccagcaccgagcctagtgagcaggagattaaacggatcaacaagatcagaagaagacttgtgaaagacagcaacaccaagaaggccggcaagacaggccccatgaaaaccctgctggttagagtgatgacacccgatctgagagagcggctggaaaacctgagaaagaagcctgaaaatatcccccagcccatcagcaatacatctagagccaacctgaataagctgctgaccgattacaccgaaatgaagaaggcgatcctgcatgtgtactgggaagagttccagaaggaccctgtgggcctgatgagccgggtggcccagcctgccagcaagaagatcgatcagaacaagctgaaacctgagatggacgagaagggcaacctgaccaccgccggctttgcctgctctcagtgtggccagcccctgttcgtgtacaagctggagcaggtgtctgagaagggcaaggcttacaccaactacttcggacggtgcaatgtggccgagcacgaaaagctgatcctgctggcccagctgaagcccgagaaggatagcgacgaagccgtgacatatagcctgggaaagtttgggcagagggccctggatttctacagcattcatgtgaccaaggagtccacccaccccgtgaagcccctggcccagatcgccggaaacagatacgcctccggacctgtgggaaaggccctgagcgacgcatgtatgggcacaatcgcctccttcctgtctaagtaccaggacatcatcatcgaacaccagaaggtggtgaagggcaaccagaagagactggagagcctgcgggagctggccggcaaggaaaacctggaataccctagcgtgaccctgccacctcagcctcacaccaaggagggcgttgatgcctacaacgaagtgatcgcccgggtgcgaatgtgggtgaacctgaacctgtggcagaagctgaagctaagcagagatgatgccaagcctctgctgagactgaagggattcccttcctttcctctggtcgagagacaggccaacgaagtggactggtgggacatggtgtgtaacgtgaagaagctgatcaacgagaaaaaggaggatggcaaggtgttttggcagaatctggctggctacaagagacaggaagccctgagaccatacctgagcagcgaggaagatcggaagaagggaaagaaattcgctcggtaccagctgggcgacctgctgctgcacctggaaaagaagcacggcgaggactggggaaaggtgtacgacgaggcctgggagcggattgacaagaaagtggaaggcctgagcaagcacatcaagctggaagaggaacggagaagcgaggacgcccagagcaaggccgccctgaccgactggctgcgggctaaggccagcttcgtgatcgagggcctgaaggaggccgacaaggacgagttctgcagatgcgagctgaagctgcagaagtggtacggggacctgcggggaaagcccttcgccatcgaagccgagaacagcatcctggacatcagcggcttcagcaagcagtacaactgtgccttcatctggcagaaggacggcgtgaagaagctgaacctgtacctgatcatcaactacttcaagggcggcaagctgcggttcaagaagatcaaacctgaagccttcgaagccaacagattctacaccgtgatcaacaaaaagagcggcgagatcgtgcccatggaggtgaacttcaacttcgacgaccccaacctgatcatcctgcctctggcctttggcaagagacagggcagagaattcatctggaacgacctgctgtccctggaaaccggcagcctgaagctggccaacggaagagtgatcgagaagacactgtacaacagaagaacccggcaggatgagcctgccctgttcgtggccctgaccttcgagcggcgggaggtcctggactcctccaatatcaaaccaatgaacctgatcggcgtggcaagaggcgaaaacatccccgccgtgatcgccctgaccgaccccgagggctgcccactgagccggtttaaggatagcctgggaaacccaacccacatcctgagaatcggcgagagctataaggagaagcagcggaccatccaggccaagaaggaggtggagcagcggagagccggcggctacagccggaagtacgccagcaaagccaagaatctggcagacgatatggtgagaaacaccgctagagatctgctgtactacgccgtgacccaggatgccatgctgatcttcgccaacctgagccggggcttcggccggcagggcaagcggaccttcatggccgagagacagtacacacggatggaggactggctgaccgccaagctggcctacgagggcctgagcaagacctacctgtccaagacactggcccagtacacctccaagacatgcagcaactgtgggtttaccatcaccagcgccgactacgacagggtgctggagaagctgaagaagacagcaacaggctggatgaccacaattaacggcaaggagctgaaggtggagggccagattacctactacaacagatacaagagacagaacgtagtcaaggacctgtccgtcgagctggatagactgagcgaagaatctgtgaacaacgacatctcctcctggacaaagggcagaagcggagaagctctgagcctcctgaagaaaagattctcccatagacccgtgcaggagaagttcgtgtgcctgaactgcggcttcgagacacacgcagccgagcaagccgccctgaacatcgccagatcctggctgttcctgcggagccaggagtacaagaaataccagacaaacaagacaaccggcaacaccgataagagagccttcgtcgagacctggcagtccttttaccggaagaagcttaaggaggtgtggaaacctgccgtgcggtctggcggatctggcggaggctccaccagccccaagaaaaagagaaaagtctaagctgccttctgcggggcttgccttctggccatgcccttcttctctcccttgcacctgtacctcttggtctttgaataaagcctgagtaggaaggctagcaaaaaaaaaaaaaaaaaaaaaaaaaaaaaaaaaaaaaaaaaaaaaaaaaaaaaaaaaaaaaaaaaaaaaaaaaaaaaaaa

SEQ ID NO: 13075 - RNA, 5785 nt, synthetic construct
  source 1..5785: mol_type = other RNA
aggaaataagagagaaaagaagagtaagaagaaatataagagccaccatggcccctaagaagaagcgtaaagtgagccggatggaacgcctcgtctacgaggtgcggcagaagtgcagaaacatcgaggacatctgcatctcctgcggatctctgaacgtgaccctggagcacccactgttcatcggcggcatgtgccagaactgtaaaaactgttttctggagtgtgcctatcaatacgacgatgacggctaccagagctactgcaccatctgttgcggcggaagagaggtgctgatgtgtggaaataacaactgctgccggtgcttctgcgtggaatgcgtggacctgctggtgggccccggcgccgcccaggccgctattaaggaagatccttggaactgctacatgtgcggccacaagggcacatacggcctgctgagacggagagaggactggcctagcagactgcagatgttcttcgccaataaccacgaccaggagttcgacccccctaaggtgtaccctcccgtccccgccgagaagagaaagcccatccgggtcctgagcctgttcgatggcatcgccaccggtctgctggtgctgaaggacctgggcatccaggtggataggtacattgcctccgaggtgtgcgaggactccatcaccgtgggaatggtgcgtcatcagggcaagatcatgtacgtgggcgacgtgcggagcgtgacacagaagcatatccaggagtggggccctttcgacctggtgatcggcggcagcccttgcaatgacctgagcatcgtgaacccagcccggaagggcctgtacgagggaaccggcagactgttcttcgagttttacagactgctgcacgacgcccggcctaaggaaggcgacgaccggcccttcttttggctgttcgagaatgtggtggccatgggagtcagcgacaagcgggatattagccggttcctggagagcaaccccgtgatgatcgatgccaaggaagtgagcgccgcccaccgggccagatacttctggggcaatctgcctggcatgaacagacccctggccagcaccgtgaacgacaagctggagctgcaggagtgcctggagcacggccggatcgccaagttcagcaaggtgagaaccatcaccacccgaagcaacagcatcaaacaaggcaaggaccagcactttcctgtgttcatgaacgagaaggaggacatcctgtggtgtaccgagatggagagagtgttcgggttcccagtccactacacagatgtcagcaacatgtctagactggccagacagagactgctgggaagaagctggtccgtccctgtgatcagacacctgttcgcccctctgaaggagtacttcgcctgcgtgagcagcggcaacagcaacgccaacagccggggccccagcttctctagcggcctggtgccactgtccctgagagggagccacatgggccccatggagatctacaaaaccgtgagcgcctggaagcggcagcctgtgcgcgtgctgagcctgtttcggaatatcgataaagtcctgaaaagcctgggattcctggagagcggctctggctccggcggtggcaccctgaagtacgtggaggatgtgacaaacgtggtcagacgggatgtggagaagtggggccccttcgatctggtgtacggcagcacccaacccctgggcagctcttgtgaccggtgccctggctggtacatgtttcagttccaccggatcctgcagtacgccctgccgagacaggagtcccagcggccattcttttggattttcatggacaacttgctgctgaccgaggatgaccaggaaactaccactcggttcctgcagaccgaagccgtgaccctgcaggacgtgagaggccgggactaccagaacgccatgcgggtgtggtccaacatccctggactgaaaagcaagcacgcacctctgacccctaaagaagaggagtacctgcaggcccaggtgcggagcagaagcaagctggacgcccctaaggtggatctgctggtgaagaattgcctcctgcccctgagagagtacttcaagtatttcagccagaatagtctgcccctgggaggcagcggcggcggcgtgcaggtgcccatcaagttcgaggacgtggccgtgtacttcagcgagcccgagtggaagaacctggaccagtggcagaaggagctgtacaagcacgtgatgaccgccaactacgagatcctgttcagcctggacagcgccatccccaagcccgacctgatcagccacatcgagaggggcgaggagcccttcctgagggaccacggcaacctgatgaagagggacaagaccatcggctacggcggcggcccaagcagcggcgcccctcctcccagcggcggcagcccagccggctccccaacctctaccgaggagggcacctctgagtccgccacccccgagagcggccctggcacctccaccgagcccagcgagggcagcgcacccggcagccctgccggcagccccacctccacagaggagggaaccagcaccgagcccagcgaaggcagcgccccaggcaccagcaccgagcctagtgagcaggagattaaacggatcaacaagatcagaagaagacttgtgaaagacagcaacaccaagaaggccggcaagacaggccccatgaaaaccctgctggttagagtgatgacacccgatctgagagagcggctggaaaacctgagaaagaagcctgaaaatatcccccagcccatcagcaatacatctagagccaacctgaataagctgctgaccgattacaccgaaatgaagaaggcgatcctgcatgtgtactgggaagagttccagaaggaccctgtgggcctgatgagccgggtggcccagcctgccagcaagaagatcgatcagaacaagctgaaacctgagatggacgagaagggcaacctgaccaccgccggctttgcctgctctcagtgtggccagcccctgttcgtgtacaagctggagcaggtgtctgagaagggcaaggcttacaccaactacttcggacggtgcaatgtggccgagcacgaaaagctgatcctgctggcccagctgaagcccgagaaggatagcgacgaagccgtgacatatagcctgggaaagtttgggcagagggccctggatttctacagcattcatgtgaccaaggagtccacccaccccgtgaagcccctggcccagatcgccggaaacagatacgcctccggacctgtgggaaaggccctgagcgacgcatgtatgggcacaatcgcctccttcctgtctaagtaccaggacatcatcatcgaacaccagaaggtggtgaagggcaaccagaagagactggagagcctgcgggagctggccggcaaggaaaacctggaataccctagcgtgaccctgccacctcagcctcacaccaaggagggcgttgatgcctacaacgaagtgatcgcccgggtgcgaatgtgggtgaacctgaacctgtggcagaagctgaagctaagcagagatgatgccaagcctctgctgagactgaagggattcccttcctttcctctggtcgagagacaggccaacgaagtggactggtgggacatggtgtgtaacgtgaagaagctgatcaacgagaaaaaggaggatggcaaggtgttttggcagaatctggctggctacaagagacaggaagccctgagaccatacctgagcagcgaggaagatcggaagaagggaaagaaattcgctcggtaccagctgggcgacctgctgctgcacctggaaaagaagcacggcgaggactggggaaaggtgtacgacgaggcctgggagcggattgacaagaaagtggaaggcctgagcaagcacatcaagctggaagaggaacggagaagcgaggacgcccagagcaaggccgccctgaccgactggctgcgggctaaggccagcttcgtgatcgagggcctgaaggaggccgacaaggacgagttctgcagatgcgagctgaagctgcagaagtggtacggggacctgcggggaaagcccttcgccatcgaagccgagaacagcatcctggacatcagcggcttcagcaagcagtacaactgtgccttcatctggcagaaggacggcgtgaagaagctgaacctgtacctgatcatcaactacttcaagggcggcaagctgcggttcaagaagatcaaacctgaagccttcgaagccaacagattctacaccgtgatcaacaaaaagagcggcgagatcgtgcccatggaggtgaacttcaacttcgacgaccccaacctgatcatcctgcctctggcctttggcaagagacagggcagagaattcatctggaacgacctgctgtccctggaaaccggcagcctgaagctggccaacggaagagtgatcgagaagacactgtacaacagaagaacccggcaggatgagcctgccctgttcgtggccctgaccttcgagcggcgggaggtcctggactcctccaatatcaaaccaatgaacctgatcggcgtggcaagaggcgaaaacatccccgccgtgatcgccctgaccgaccccgagggctgcccactgagccggtttaaggatagcctgggaaacccaacccacatcctgagaatcggcgagagctataaggagaagcagcggaccatccaggccaagaaggaggtggagcagcggagagccggcggctacagccggaagtacgccagcaaagccaagaatctggcagacgatatggtgagaaacaccgctagagatctgctgtactacgccgtgacccaggatgccatgctgatcttcgccaacctgagccggggcttcggccggcagggcaagcggaccttcatggccgagagacagtacacacggatggaggactggctgaccgccaagctggcctacgagggcctgagcaagacctacctgtccaagacactggcccagtacacctccaagacatgcagcaactgtgggtttaccatcaccagcgccgactacgacagggtgctggagaagctgaagaagacagcaacaggctggatgaccacaattaacggcaaggagctgaaggtggagggccagattacctactacaacagatacaagagacagaacgtagtcaaggacctgtccgtcgagctggatagactgagcgaagaatctgtgaacaacgacatctcctcctggacaaagggcagaagcggagaagctctgagcctcctgaagaaaagattctcccatagacccgtgcaggagaagttcgtgtgcctgaactgcggcttcgagacacacgcagccgagcaagccgccctgaacatcgccagatcctggctgttcctgcggagccaggagtacaagaaataccagacaaacaagacaaccggcaacaccgataagagagccttcgtcgagacctggcagtccttttaccggaagaagcttaaggaggtgtggaaacctgccgtgcggtctggcggatctggcggaggctccaccagccccaagaaaaagagaaaagtctaagctgccttctgcggggcttgccttctggccatgcccttcttctctcccttgcacctgtacctcttggtctttgaataaagcctgagtaggaaggctagcaaaaaaaaaaaaaaaaaaaaaaaaaaaaaaaaaaaaaaaaaaaaaaaaaaaaaaaaaaaaaaaaaaaaaaaaaaaaaaaa

SEQ ID NO: 13076 - RNA, 5785 nt, synthetic construct
  source 1..5785: mol_type = other RNA
aggaaataagagagaaaagaagagtaagaagaaatataagagccaccatggcccctaagaagaagcgtaaagtgagccggatggaacgcctcgtctacgaggtgcggcagaagtgcagaaacatcgaggacatctgcatctcctgcggatctctgaacgtgaccctggagcacccactgttcatcggcggcatgtgccagaactgtaaaaactgttttctggagtgtgcctatcaatacgacgatgacggctaccagagctactgcaccatctgttgcggcggaagagaggtgctgatgtgtggaaataacaactgctgccggtgcttctgcgtggaatgcgtggacctgctggtgggccccggcgccgcccaggccgctattaaggaagatccttggaactgctacatgtgcggccacaagggcacatacggcctgctgagacggagagaggactggcctagcagactgcagatgttcttcgccaataaccacgaccaggagttcgacccccctaaggtgtaccctcccgtccccgccgagaagagaaagcccatccgggtcctgagcctgttcgatggcatcgccaccggtctgctggtgctgaaggacctgggcatccaggtggataggtacattgcctccgaggtgtgcgaggactccatcaccgtgggaatggtgcgtcatcagggcaagatcatgtacgtgggcgacgtgcggagcgtgacacagaagcatatccaggagtggggccctttcgacctggtgatcggcggcagcccttgcaatgacctgagcatcgtgaacccagcccggaagggcctgtacgagggaaccggcagactgttcttcgagttttacagactgctgcacgacgcccggcctaaggaaggcgacgaccggcccttcttttggctgttcgagaatgtggtggccatgggagtcagcgacaagcgggatattagccggttcctggagagcaaccccgtgatgatcgatgccaaggaagtgagcgccgcccaccgggccagatacttctggggcaatctgcctggcatgaacagacccctggccagcaccgtgaacgacaagctggagctgcaggagtgcctggagcacggccggatcgccaagttcagcaaggtgagaaccatcaccacccgaagcaacagcatcaaacaaggcaaggaccagcactttcctgtgttcatgaacgagaaggaggacatcctgtggtgtaccgagatggagagagtgttcgggttcccagtccactacacagatgtcagcaacatgtctagactggccagacagagactgctgggaagaagctggtccgtccctgtgatcagacacctgttcgcccctctgaaggagtacttcgcctgcgtgagcagcggcaacagcaacgccaacagccggggccccagcttctctagcggcctggtgccactgtccctgagagggagccacatgggccccatggagatctacaaaaccgtgagcgcctggaagcggcagcctgtgcgcgtgctgagcctgtttcggaatatcgataaagtcctgaaaagcctgggattcctggagagcggctctggctccggcggtggcaccctgaagtacgtggaggatgtgacaaacgtggtcagacgggatgtggagaagtggggccccttcgatctggtgtacggcagcacccaacccctgggcagctcttgtgaccggtgccctggctggtacatgtttcagttccaccggatcctgcagtacgccctgccgagacaggagtcccagcggccattcttttggattttcatggacaacttgctgctgaccgaggatgaccaggaaactaccactcggttcctgcagaccgaagccgtgaccctgcaggacgtgagaggccgggactaccagaacgccatgcgggtgtggtccaacatccctggactgaaaagcaagcacgcacctctgacccctaaagaagaggagtacctgcaggcccaggtgcggagcagaagcaagctggacgcccctaaggtggatctgctggtgaagaattgcctcctgcccctgagagagtacttcaagtatttcagccagaatagtctgcccctgggaggcagcggcggcggcaggcccagggccgtgaagttcggcgacgtggccctgtacttcagcagggaggagtggggctgcctgaggcccgcccagagggccctgtacagggacgtgatgcaggagacctacggccacctgggcgccctgggctgcgccggccccaagcccgccctgatcagctggctggagaggaacaccgacgactgggagcccgccgccctggacccccaggagtgccccaagggcgtggccgtgcagggcggcccaagcagcggcgcccctcctcccagcggcggcagcccagccggctccccaacctctaccgaggagggcacctctgagtccgccacccccgagagcggccctggcacctccaccgagcccagcgagggcagcgcacccggcagccctgccggcagccccacctccacagaggagggaaccagcaccgagcccagcgaaggcagcgccccaggcaccagcaccgagcctagtgagcaggagattaaacggatcaacaagatcagaagaagacttgtgaaagacagcaacaccaagaaggccggcaagacaggccccatgaaaaccctgctggttagagtgatgacacccgatctgagagagcggctggaaaacctgagaaagaagcctgaaaatatcccccagcccatcagcaatacatctagagccaacctgaataagctgctgaccgattacaccgaaatgaagaaggcgatcctgcatgtgtactgggaagagttccagaaggaccctgtgggcctgatgagccgggtggcccagcctgccagcaagaagatcgatcagaacaagctgaaacctgagatggacgagaagggcaacctgaccaccgccggctttgcctgctctcagtgtggccagcccctgttcgtgtacaagctggagcaggtgtctgagaagggcaaggcttacaccaactacttcggacggtgcaatgtggccgagcacgaaaagctgatcctgctggcccagctgaagcccgagaaggatagcgacgaagccgtgacatatagcctgggaaagtttgggcagagggccctggatttctacagcattcatgtgaccaaggagtccacccaccccgtgaagcccctggcccagatcgccggaaacagatacgcctccggacctgtgggaaaggccctgagcgacgcatgtatgggcacaatcgcctccttcctgtctaagtaccaggacatcatcatcgaacaccagaaggtggtgaagggcaaccagaagagactggagagcctgcgggagctggccggcaaggaaaacctggaataccctagcgtgaccctgccacctcagcctcacaccaaggagggcgttgatgcctacaacgaagtgatcgcccgggtgcgaatgtgggtgaacctgaacctgtggcagaagctgaagctaagcagagatgatgccaagcctctgctgagactgaagggattcccttcctttcctctggtcgagagacaggccaacgaagtggactggtgggacatggtgtgtaacgtgaagaagctgatcaacgagaaaaaggaggatggcaaggtgttttggcagaatctggctggctacaagagacaggaagccctgagaccatacctgagcagcgaggaagatcggaagaagggaaagaaattcgctcggtaccagctgggcgacctgctgctgcacctggaaaagaagcacggcgaggactggggaaaggtgtacgacgaggcctgggagcggattgacaagaaagtggaaggcctgagcaagcacatcaagctggaagaggaacggagaagcgaggacgcccagagcaaggccgccctgaccgactggctgcgggctaaggccagcttcgtgatcgagggcctgaaggaggccgacaaggacgagttctgcagatgcgagctgaagctgcagaagtggtacggggacctgcggggaaagcccttcgccatcgaagccgagaacagcatcctggacatcagcggcttcagcaagcagtacaactgtgccttcatctggcagaaggacggcgtgaagaagctgaacctgtacctgatcatcaactacttcaagggcggcaagctgcggttcaagaagatcaaacctgaagccttcgaagccaacagattctacaccgtgatcaacaaaaagagcggcgagatcgtgcccatggaggtgaacttcaacttcgacgaccccaacctgatcatcctgcctctggcctttggcaagagacagggcagagaattcatctggaacgacctgctgtccctggaaaccggcagcctgaagctggccaacggaagagtgatcgagaagacactgtacaacagaagaacccggcaggatgagcctgccctgttcgtggccctgaccttcgagcggcgggaggtcctggactcctccaatatcaaaccaatgaacctgatcggcgtggcaagaggcgaaaacatccccgccgtgatcgccctgaccgaccccgagggctgcccactgagccggtttaaggatagcctgggaaacccaacccacatcctgagaatcggcgagagctataaggagaagcagcggaccatccaggccaagaaggaggtggagcagcggagagccggcggctacagccggaagtacgccagcaaagccaagaatctggcagacgatatggtgagaaacaccgctagagatctgctgtactacgccgtgacccaggatgccatgctgatcttcgccaacctgagccggggcttcggccggcagggcaagcggaccttcatggccgagagacagtacacacggatggaggactggctgaccgccaagctggcctacgagggcctgagcaagacctacctgtccaagacactggcccagtacacctccaagacatgcagcaactgtgggtttaccatcaccagcgccgactacgacagggtgctggagaagctgaagaagacagcaacaggctggatgaccacaattaacggcaaggagctgaaggtggagggccagattacctactacaacagatacaagagacagaacgtagtcaaggacctgtccgtcgagctggatagactgagcgaagaatctgtgaacaacgacatctcctcctggacaaagggcagaagcggagaagctctgagcctcctgaagaaaagattctcccatagacccgtgcaggagaagttcgtgtgcctgaactgcggcttcgagacacacgcagccgagcaagccgccctgaacatcgccagatcctggctgttcctgcggagccaggagtacaagaaataccagacaaacaagacaaccggcaacaccgataagagagccttcgtcgagacctggcagtccttttaccggaagaagcttaaggaggtgtggaaacctgccgtgcggtctggcggatctggcggaggctccaccagccccaagaaaaagagaaaagtctaagctgccttctgcggggcttgccttctggccatgcccttcttctctcccttgcacctgtacctcttggtctttgaataaagcctgagtaggaaggctagcaaaaaaaaaaaaaaaaaaaaaaaaaaaaaaaaaaaaaaaaaaaaaaaaaaaaaaaaaaaaaaaaaaaaaaaaaaaaaaaa

SEQ ID NO: 13077 - RNA, 5785 nt, synthetic construct
  source 1..5785: mol_type = other RNA
aggaaataagagagaaaagaagagtaagaagaaatataagagccaccatggcccctaagaagaagcgtaaagtgagccggatggaacgcctcgtctacgaggtgcggcagaagtgcagaaacatcgaggacatctgcatctcctgcggatctctgaacgtgaccctggagcacccactgttcatcggcggcatgtgccagaactgtaaaaactgttttctggagtgtgcctatcaatacgacgatgacggctaccagagctactgcaccatctgttgcggcggaagagaggtgctgatgtgtggaaataacaactgctgccggtgcttctgcgtggaatgcgtggacctgctggtgggccccggcgccgcccaggccgctattaaggaagatccttggaactgctacatgtgcggccacaagggcacatacggcctgctgagacggagagaggactggcctagcagactgcagatgttcttcgccaataaccacgaccaggagttcgacccccctaaggtgtaccctcccgtccccgccgagaagagaaagcccatccgggtcctgagcctgttcgatggcatcgccaccggtctgctggtgctgaaggacctgggcatccaggtggataggtacattgcctccgaggtgtgcgaggactccatcaccgtgggaatggtgcgtcatcagggcaagatcatgtacgtgggcgacgtgcggagcgtgacacagaagcatatccaggagtggggccctttcgacctggtgatcggcggcagcccttgcaatgacctgagcatcgtgaacccagcccggaagggcctgtacgagggaaccggcagactgttcttcgagttttacagactgctgcacgacgcccggcctaaggaaggcgacgaccggcccttcttttggctgttcgagaatgtggtggccatgggagtcagcgacaagcgggatattagccggttcctggagagcaaccccgtgatgatcgatgccaaggaagtgagcgccgcccaccgggccagatacttctggggcaatctgcctggcatgaacagacccctggccagcaccgtgaacgacaagctggagctgcaggagtgcctggagcacggccggatcgccaagttcagcaaggtgagaaccatcaccacccgaagcaacagcatcaaacaaggcaaggaccagcactttcctgtgttcatgaacgagaaggaggacatcctgtggtgtaccgagatggagagagtgttcgggttcccagtccactacacagatgtcagcaacatgtctagactggccagacagagactgctgggaagaagctggtccgtccctgtgatcagacacctgttcgcccctctgaaggagtacttcgcctgcgtgagcagcggcaacagcaacgccaacagccggggccccagcttctctagcggcctggtgccactgtccctgagagggagccacatgggccccatggagatctacaaaaccgtgagcgcctggaagcggcagcctgtgcgcgtgctgagcctgtttcggaatatcgataaagtcctgaaaagcctgggattcctggagagcggctctggctccggcggtggcaccctgaagtacgtggaggatgtgacaaacgtggtcagacgggatgtggagaagtggggccccttcgatctggtgtacggcagcacccaacccctgggcagctcttgtgaccggtgccctggctggtacatgtttcagttccaccggatcctgcagtacgccctgccgagacaggagtcccagcggccattcttttggattttcatggacaacttgctgctgaccgaggatgaccaggaaactaccactcggttcctgcagaccgaagccgtgaccctgcaggacgtgagaggccgggactaccagaacgccatgcgggtgtggtccaacatccctggactgaaaagcaagcacgcacctctgacccctaaagaagaggagtacctgcaggcccaggtgcggagcagaagcaagctggacgcccctaaggtggatctgctggtgaagaattgcctcctgcccctgagagagtacttcaagtatttcagccagaatagtctgcccctgggaggcagcggcggcggcccccccaggcaggagagggtgaccttcggcgacgtggccgtggacttcaccctggacgagtgggtgtgcctggacagcgcccagaaggccctgtacagggacgtgatgctggagaactacggccacctggtgtgcctgggcctggccggcgccaagcccgccgtgatccagaggctggagaggggcgaggccgcctggtgccccggcgtgcccggcagcaggctgcccggcctgttcttcttcggcggcccaagcagcggcgcccctcctcccagcggcggcagcccagccggctccccaacctctaccgaggagggcacctctgagtccgccacccccgagagcggccctggcacctccaccgagcccagcgagggcagcgcacccggcagccctgccggcagccccacctccacagaggagggaaccagcaccgagcccagcgaaggcagcgccccaggcaccagcaccgagcctagtgagcaggagattaaacggatcaacaagatcagaagaagacttgtgaaagacagcaacaccaagaaggccggcaagacaggccccatgaaaaccctgctggttagagtgatgacacccgatctgagagagcggctggaaaacctgagaaagaagcctgaaaatatcccccagcccatcagcaatacatctagagccaacctgaataagctgctgaccgattacaccgaaatgaagaaggcgatcctgcatgtgtactgggaagagttccagaaggaccctgtgggcctgatgagccgggtggcccagcctgccagcaagaagatcgatcagaacaagctgaaacctgagatggacgagaagggcaacctgaccaccgccggctttgcctgctctcagtgtggccagcccctgttcgtgtacaagctggagcaggtgtctgagaagggcaaggcttacaccaactacttcggacggtgcaatgtggccgagcacgaaaagctgatcctgctggcccagctgaagcccgagaaggatagcgacgaagccgtgacatatagcctgggaaagtttgggcagagggccctggatttctacagcattcatgtgaccaaggagtccacccaccccgtgaagcccctggcccagatcgccggaaacagatacgcctccggacctgtgggaaaggccctgagcgacgcatgtatgggcacaatcgcctccttcctgtctaagtaccaggacatcatcatcgaacaccagaaggtggtgaagggcaaccagaagagactggagagcctgcgggagctggccggcaaggaaaacctggaataccctagcgtgaccctgccacctcagcctcacaccaaggagggcgttgatgcctacaacgaagtgatcgcccgggtgcgaatgtgggtgaacctgaacctgtggcagaagctgaagctaagcagagatgatgccaagcctctgctgagactgaagggattcccttcctttcctctggtcgagagacaggccaacgaagtggactggtgggacatggtgtgtaacgtgaagaagctgatcaacgagaaaaaggaggatggcaaggtgttttggcagaatctggctggctacaagagacaggaagccctgagaccatacctgagcagcgaggaagatcggaagaagggaaagaaattcgctcggtaccagctgggcgacctgctgctgcacctggaaaagaagcacggcgaggactggggaaaggtgtacgacgaggcctgggagcggattgacaagaaagtggaaggcctgagcaagcacatcaagctggaagaggaacggagaagcgaggacgcccagagcaaggccgccctgaccgactggctgcgggctaaggccagcttcgtgatcgagggcctgaaggaggccgacaaggacgagttctgcagatgcgagctgaagctgcagaagtggtacggggacctgcggggaaagcccttcgccatcgaagccgagaacagcatcctggacatcagcggcttcagcaagcagtacaactgtgccttcatctggcagaaggacggcgtgaagaagctgaacctgtacctgatcatcaactacttcaagggcggcaagctgcggttcaagaagatcaaacctgaagccttcgaagccaacagattctacaccgtgatcaacaaaaagagcggcgagatcgtgcccatggaggtgaacttcaacttcgacgaccccaacctgatcatcctgcctctggcctttggcaagagacagggcagagaattcatctggaacgacctgctgtccctggaaaccggcagcctgaagctggccaacggaagagtgatcgagaagacactgtacaacagaagaacccggcaggatgagcctgccctgttcgtggccctgaccttcgagcggcgggaggtcctggactcctccaatatcaaaccaatgaacctgatcggcgtggcaagaggcgaaaacatccccgccgtgatcgccctgaccgaccccgagggctgcccactgagccggtttaaggatagcctgggaaacccaacccacatcctgagaatcggcgagagctataaggagaagcagcggaccatccaggccaagaaggaggtggagcagcggagagccggcggctacagccggaagtacgccagcaaagccaagaatctggcagacgatatggtgagaaacaccgctagagatctgctgtactacgccgtgacccaggatgccatgctgatcttcgccaacctgagccggggcttcggccggcagggcaagcggaccttcatggccgagagacagtacacacggatggaggactggctgaccgccaagctggcctacgagggcctgagcaagacctacctgtccaagacactggcccagtacacctccaagacatgcagcaactgtgggtttaccatcaccagcgccgactacgacagggtgctggagaagctgaagaagacagcaacaggctggatgaccacaattaacggcaaggagctgaaggtggagggccagattacctactacaacagatacaagagacagaacgtagtcaaggacctgtccgtcgagctggatagactgagcgaagaatctgtgaacaacgacatctcctcctggacaaagggcagaagcggagaagctctgagcctcctgaagaaaagattctcccatagacccgtgcaggagaagttcgtgtgcctgaactgcggcttcgagacacacgcagccgagcaagccgccctgaacatcgccagatcctggctgttcctgcggagccaggagtacaagaaataccagacaaacaagacaaccggcaacaccgataagagagccttcgtcgagacctggcagtccttttaccggaagaagcttaaggaggtgtggaaacctgccgtgcggtctggcggatctggcggaggctccaccagccccaagaaaaagagaaaagtctaagctgccttctgcggggcttgccttctggccatgcccttcttctctcccttgcacctgtacctcttggtctttgaataaagcctgagtaggaaggctagcaaaaaaaaaaaaaaaaaaaaaaaaaaaaaaaaaaaaaaaaaaaaaaaaaaaaaaaaaaaaaaaaaaaaaaaaaaaaaaaa

SEQ ID NO: 13078 - RNA, 5785 nt, synthetic construct
  source 1..5785: mol_type = other RNA
aggaaataagagagaaaagaagagtaagaagaaatataagagccaccatggcccctaagaagaagcgtaaagtgagccggatggaacgcctcgtctacgaggtgcggcagaagtgcagaaacatcgaggacatctgcatctcctgcggatctctgaacgtgaccctggagcacccactgttcatcggcggcatgtgccagaactgtaaaaactgttttctggagtgtgcctatcaatacgacgatgacggctaccagagctactgcaccatctgttgcggcggaagagaggtgctgatgtgtggaaataacaactgctgccggtgcttctgcgtggaatgcgtggacctgctggtgggccccggcgccgcccaggccgctattaaggaagatccttggaactgctacatgtgcggccacaagggcacatacggcctgctgagacggagagaggactggcctagcagactgcagatgttcttcgccaataaccacgaccaggagttcgacccccctaaggtgtaccctcccgtccccgccgagaagagaaagcccatccgggtcctgagcctgttcgatggcatcgccaccggtctgctggtgctgaaggacctgggcatccaggtggataggtacattgcctccgaggtgtgcgaggactccatcaccgtgggaatggtgcgtcatcagggcaagatcatgtacgtgggcgacgtgcggagcgtgacacagaagcatatccaggagtggggccctttcgacctggtgatcggcggcagcccttgcaatgacctgagcatcgtgaacccagcccggaagggcctgtacgagggaaccggcagactgttcttcgagttttacagactgctgcacgacgcccggcctaaggaaggcgacgaccggcccttcttttggctgttcgagaatgtggtggccatgggagtcagcgacaagcgggatattagccggttcctggagagcaaccccgtgatgatcgatgccaaggaagtgagcgccgcccaccgggccagatacttctggggcaatctgcctggcatgaacagacccctggccagcaccgtgaacgacaagctggagctgcaggagtgcctggagcacggccggatcgccaagttcagcaaggtgagaaccatcaccacccgaagcaacagcatcaaacaaggcaaggaccagcactttcctgtgttcatgaacgagaaggaggacatcctgtggtgtaccgagatggagagagtgttcgggttcccagtccactacacagatgtcagcaacatgtctagactggccagacagagactgctgggaagaagctggtccgtccctgtgatcagacacctgttcgcccctctgaaggagtacttcgcctgcgtgagcagcggcaacagcaacgccaacagccggggccccagcttctctagcggcctggtgccactgtccctgagagggagccacatgggccccatggagatctacaaaaccgtgagcgcctggaagcggcagcctgtgcgcgtgctgagcctgtttcggaatatcgataaagtcctgaaaagcctgggattcctggagagcggctctggctccggcggtggcaccctgaagtacgtggaggatgtgacaaacgtggtcagacgggatgtggagaagtggggccccttcgatctggtgtacggcagcacccaacccctgggcagctcttgtgaccggtgccctggctggtacatgtttcagttccaccggatcctgcagtacgccctgccgagacaggagtcccagcggccattcttttggattttcatggacaacttgctgctgaccgaggatgaccaggaaactaccactcggttcctgcagaccgaagccgtgaccctgcaggacgtgagaggccgggactaccagaacgccatgcgggtgtggtccaacatccctggactgaaaagcaagcacgcacctctgacccctaaagaagaggagtacctgcaggcccaggtgcggagcagaagcaagctggacgcccctaaggtggatctgctggtgaagaattgcctcctgcccctgagagagtacttcaagtatttcagccagaatagtctgcccctgggaggcagcggcggcggcatggccgccgccgccctgaggctgcccgcccagggcaccgtgaccttcgaggacgtggccgtgaagttcagccaggaggagtggagcatcctgaccgaggcccagaggtgcctgtaccacgacgtgatgctggagaacctggccctgatcagcagcctgggctgctggtacggcgccaaggacgagacccccagcaagcagaccctgagcatccagcagcagagccccctgaggagccactggggcggcccaagcagcggcgcccctcctcccagcggcggcagcccagccggctccccaacctctaccgaggagggcacctctgagtccgccacccccgagagcggccctggcacctccaccgagcccagcgagggcagcgcacccggcagccctgccggcagccccacctccacagaggagggaaccagcaccgagcccagcgaaggcagcgccccaggcaccagcaccgagcctagtgagcaggagattaaacggatcaacaagatcagaagaagacttgtgaaagacagcaacaccaagaaggccggcaagacaggccccatgaaaaccctgctggttagagtgatgacacccgatctgagagagcggctggaaaacctgagaaagaagcctgaaaatatcccccagcccatcagcaatacatctagagccaacctgaataagctgctgaccgattacaccgaaatgaagaaggcgatcctgcatgtgtactgggaagagttccagaaggaccctgtgggcctgatgagccgggtggcccagcctgccagcaagaagatcgatcagaacaagctgaaacctgagatggacgagaagggcaacctgaccaccgccggctttgcctgctctcagtgtggccagcccctgttcgtgtacaagctggagcaggtgtctgagaagggcaaggcttacaccaactacttcggacggtgcaatgtggccgagcacgaaaagctgatcctgctggcccagctgaagcccgagaaggatagcgacgaagccgtgacatatagcctgggaaagtttgggcagagggccctggatttctacagcattcatgtgaccaaggagtccacccaccccgtgaagcccctggcccagatcgccggaaacagatacgcctccggacctgtgggaaaggccctgagcgacgcatgtatgggcacaatcgcctccttcctgtctaagtaccaggacatcatcatcgaacaccagaaggtggtgaagggcaaccagaagagactggagagcctgcgggagctggccggcaaggaaaacctggaataccctagcgtgaccctgccacctcagcctcacaccaaggagggcgttgatgcctacaacgaagtgatcgcccgggtgcgaatgtgggtgaacctgaacctgtggcagaagctgaagctaagcagagatgatgccaagcctctgctgagactgaagggattcccttcctttcctctggtcgagagacaggccaacgaagtggactggtgggacatggtgtgtaacgtgaagaagctgatcaacgagaaaaaggaggatggcaaggtgttttggcagaatctggctggctacaagagacaggaagccctgagaccatacctgagcagcgaggaagatcggaagaagggaaagaaattcgctcggtaccagctgggcgacctgctgctgcacctggaaaagaagcacggcgaggactggggaaaggtgtacgacgaggcctgggagcggattgacaagaaagtggaaggcctgagcaagcacatcaagctggaagaggaacggagaagcgaggacgcccagagcaaggccgccctgaccgactggctgcgggctaaggccagcttcgtgatcgagggcctgaaggaggccgacaaggacgagttctgcagatgcgagctgaagctgcagaagtggtacggggacctgcggggaaagcccttcgccatcgaagccgagaacagcatcctggacatcagcggcttcagcaagcagtacaactgtgccttcatctggcagaaggacggcgtgaagaagctgaacctgtacctgatcatcaactacttcaagggcggcaagctgcggttcaagaagatcaaacctgaagccttcgaagccaacagattctacaccgtgatcaacaaaaagagcggcgagatcgtgcccatggaggtgaacttcaacttcgacgaccccaacctgatcatcctgcctctggcctttggcaagagacagggcagagaattcatctggaacgacctgctgtccctggaaaccggcagcctgaagctggccaacggaagagtgatcgagaagacactgtacaacagaagaacccggcaggatgagcctgccctgttcgtggccctgaccttcgagcggcgggaggtcctggactcctccaatatcaaaccaatgaacctgatcggcgtggcaagaggcgaaaacatccccgccgtgatcgccctgaccgaccccgagggctgcccactgagccggtttaaggatagcctgggaaacccaacccacatcctgagaatcggcgagagctataaggagaagcagcggaccatccaggccaagaaggaggtggagcagcggagagccggcggctacagccggaagtacgccagcaaagccaagaatctggcagacgatatggtgagaaacaccgctagagatctgctgtactacgccgtgacccaggatgccatgctgatcttcgccaacctgagccggggcttcggccggcagggcaagcggaccttcatggccgagagacagtacacacggatggaggactggctgaccgccaagctggcctacgagggcctgagcaagacctacctgtccaagacactggcccagtacacctccaagacatgcagcaactgtgggtttaccatcaccagcgccgactacgacagggtgctggagaagctgaagaagacagcaacaggctggatgaccacaattaacggcaaggagctgaaggtggagggccagattacctactacaacagatacaagagacagaacgtagtcaaggacctgtccgtcgagctggatagactgagcgaagaatctgtgaacaacgacatctcctcctggacaaagggcagaagcggagaagctctgagcctcctgaagaaaagattctcccatagacccgtgcaggagaagttcgtgtgcctgaactgcggcttcgagacacacgcagccgagcaagccgccctgaacatcgccagatcctggctgttcctgcggagccaggagtacaagaaataccagacaaacaagacaaccggcaacaccgataagagagccttcgtcgagacctggcagtccttttaccggaagaagcttaaggaggtgtggaaacctgccgtgcggtctggcggatctggcggaggctccaccagccccaagaaaaagagaaaagtctaagctgccttctgcggggcttgccttctggccatgcccttcttctctcccttgcacctgtacctcttggtctttgaataaagcctgagtaggaaggctagcaaaaaaaaaaaaaaaaaaaaaaaaaaaaaaaaaaaaaaaaaaaaaaaaaaaaaaaaaaaaaaaaaaaaaaaaaaaaaaaa

SEQ ID NO: 13079 - RNA, 5785 nt, synthetic construct
  source 1..5785: mol_type = other RNA
aggaaataagagagaaaagaagagtaagaagaaatataagagccaccatggcccctaagaagaagcgtaaagtgagccggatggaacgcctcgtctacgaggtgcggcagaagtgcagaaacatcgaggacatctgcatctcctgcggatctctgaacgtgaccctggagcacccactgttcatcggcggcatgtgccagaactgtaaaaactgttttctggagtgtgcctatcaatacgacgatgacggctaccagagctactgcaccatctgttgcggcggaagagaggtgctgatgtgtggaaataacaactgctgccggtgcttctgcgtggaatgcgtggacctgctggtgggccccggcgccgcccaggccgctattaaggaagatccttggaactgctacatgtgcggccacaagggcacatacggcctgctgagacggagagaggactggcctagcagactgcagatgttcttcgccaataaccacgaccaggagttcgacccccctaaggtgtaccctcccgtccccgccgagaagagaaagcccatccgggtcctgagcctgttcgatggcatcgccaccggtctgctggtgctgaaggacctgggcatccaggtggataggtacattgcctccgaggtgtgcgaggactccatcaccgtgggaatggtgcgtcatcagggcaagatcatgtacgtgggcgacgtgcggagcgtgacacagaagcatatccaggagtggggccctttcgacctggtgatcggcggcagcccttgcaatgacctgagcatcgtgaacccagcccggaagggcctgtacgagggaaccggcagactgttcttcgagttttacagactgctgcacgacgcccggcctaaggaaggcgacgaccggcccttcttttggctgttcgagaatgtggtggccatgggagtcagcgacaagcgggatattagccggttcctggagagcaaccccgtgatgatcgatgccaaggaagtgagcgccgcccaccgggccagatacttctggggcaatctgcctggcatgaacagacccctggccagcaccgtgaacgacaagctggagctgcaggagtgcctggagcacggccggatcgccaagttcagcaaggtgagaaccatcaccacccgaagcaacagcatcaaacaaggcaaggaccagcactttcctgtgttcatgaacgagaaggaggacatcctgtggtgtaccgagatggagagagtgttcgggttcccagtccactacacagatgtcagcaacatgtctagactggccagacagagactgctgggaagaagctggtccgtccctgtgatcagacacctgttcgcccctctgaaggagtacttcgcctgcgtgagcagcggcaacagcaacgccaacagccggggccccagcttctctagcggcctggtgccactgtccctgagagggagccacatgggccccatggagatctacaaaaccgtgagcgcctggaagcggcagcctgtgcgcgtgctgagcctgtttcggaatatcgataaagtcctgaaaagcctgggattcctggagagcggctctggctccggcggtggcaccctgaagtacgtggaggatgtgacaaacgtggtcagacgggatgtggagaagtggggccccttcgatctggtgtacggcagcacccaacccctgggcagctcttgtgaccggtgccctggctggtacatgtttcagttccaccggatcctgcagtacgccctgccgagacaggagtcccagcggccattcttttggattttcatggacaacttgctgctgaccgaggatgaccaggaaactaccactcggttcctgcagaccgaagccgtgaccctgcaggacgtgagaggccgggactaccagaacgccatgcgggtgtggtccaacatccctggactgaaaagcaagcacgcacctctgacccctaaagaagaggagtacctgcaggcccaggtgcggagcagaagcaagctggacgcccctaaggtggatctgctggtgaagaattgcctcctgcccctgagagagtacttcaagtatttcagccagaatagtctgcccctgggaggcagcggcggcggcatggcccacatggccttcagggacgtggccgtggacttcacccaggacgagtggaggctgctgagccccgcccagaggaccctgtacagggaggtgatgctggagaactacagcaacctggtgagcctgggcatcagcttcagcaagcccgagatcatcacccagctggagcagggcaaggagacctggagggaggagaagaagtgcccccccgccacctgccccgaccccgagcccgagctgggcggcccaagcagcggcgcccctcctcccagcggcggcagcccagccggctccccaacctctaccgaggagggcacctctgagtccgccacccccgagagcggccctggcacctccaccgagcccagcgagggcagcgcacccggcagccctgccggcagccccacctccacagaggagggaaccagcaccgagcccagcgaaggcagcgccccaggcaccagcaccgagcctagtgagcaggagattaaacggatcaacaagatcagaagaagacttgtgaaagacagcaacaccaagaaggccggcaagacaggccccatgaaaaccctgctggttagagtgatgacacccgatctgagagagcggctggaaaacctgagaaagaagcctgaaaatatcccccagcccatcagcaatacatctagagccaacctgaataagctgctgaccgattacaccgaaatgaagaaggcgatcctgcatgtgtactgggaagagttccagaaggaccctgtgggcctgatgagccgggtggcccagcctgccagcaagaagatcgatcagaacaagctgaaacctgagatggacgagaagggcaacctgaccaccgccggctttgcctgctctcagtgtggccagcccctgttcgtgtacaagctggagcaggtgtctgagaagggcaaggcttacaccaactacttcggacggtgcaatgtggccgagcacgaaaagctgatcctgctggcccagctgaagcccgagaaggatagcgacgaagccgtgacatatagcctgggaaagtttgggcagagggccctggatttctacagcattcatgtgaccaaggagtccacccaccccgtgaagcccctggcccagatcgccggaaacagatacgcctccggacctgtgggaaaggccctgagcgacgcatgtatgggcacaatcgcctccttcctgtctaagtaccaggacatcatcatcgaacaccagaaggtggtgaagggcaaccagaagagactggagagcctgcgggagctggccggcaaggaaaacctggaataccctagcgtgaccctgccacctcagcctcacaccaaggagggcgttgatgcctacaacgaagtgatcgcccgggtgcgaatgtgggtgaacctgaacctgtggcagaagctgaagctaagcagagatgatgccaagcctctgctgagactgaagggattcccttcctttcctctggtcgagagacaggccaacgaagtggactggtgggacatggtgtgtaacgtgaagaagctgatcaacgagaaaaaggaggatggcaaggtgttttggcagaatctggctggctacaagagacaggaagccctgagaccatacctgagcagcgaggaagatcggaagaagggaaagaaattcgctcggtaccagctgggcgacctgctgctgcacctggaaaagaagcacggcgaggactggggaaaggtgtacgacgaggcctgggagcggattgacaagaaagtggaaggcctgagcaagcacatcaagctggaagaggaacggagaagcgaggacgcccagagcaaggccgccctgaccgactggctgcgggctaaggccagcttcgtgatcgagggcctgaaggaggccgacaaggacgagttctgcagatgcgagctgaagctgcagaagtggtacggggacctgcggggaaagcccttcgccatcgaagccgagaacagcatcctggacatcagcggcttcagcaagcagtacaactgtgccttcatctggcagaaggacggcgtgaagaagctgaacctgtacctgatcatcaactacttcaagggcggcaagctgcggttcaagaagatcaaacctgaagccttcgaagccaacagattctacaccgtgatcaacaaaaagagcggcgagatcgtgcccatggaggtgaacttcaacttcgacgaccccaacctgatcatcctgcctctggcctttggcaagagacagggcagagaattcatctggaacgacctgctgtccctggaaaccggcagcctgaagctggccaacggaagagtgatcgagaagacactgtacaacagaagaacccggcaggatgagcctgccctgttcgtggccctgaccttcgagcggcgggaggtcctggactcctccaatatcaaaccaatgaacctgatcggcgtggcaagaggcgaaaacatccccgccgtgatcgccctgaccgaccccgagggctgcccactgagccggtttaaggatagcctgggaaacccaacccacatcctgagaatcggcgagagctataaggagaagcagcggaccatccaggccaagaaggaggtggagcagcggagagccggcggctacagccggaagtacgccagcaaagccaagaatctggcagacgatatggtgagaaacaccgctagagatctgctgtactacgccgtgacccaggatgccatgctgatcttcgccaacctgagccggggcttcggccggcagggcaagcggaccttcatggccgagagacagtacacacggatggaggactggctgaccgccaagctggcctacgagggcctgagcaagacctacctgtccaagacactggcccagtacacctccaagacatgcagcaactgtgggtttaccatcaccagcgccgactacgacagggtgctggagaagctgaagaagacagcaacaggctggatgaccacaattaacggcaaggagctgaaggtggagggccagattacctactacaacagatacaagagacagaacgtagtcaaggacctgtccgtcgagctggatagactgagcgaagaatctgtgaacaacgacatctcctcctggacaaagggcagaagcggagaagctctgagcctcctgaagaaaagattctcccatagacccgtgcaggagaagttcgtgtgcctgaactgcggcttcgagacacacgcagccgagcaagccgccctgaacatcgccagatcctggctgttcctgcggagccaggagtacaagaaataccagacaaacaagacaaccggcaacaccgataagagagccttcgtcgagacctggcagtccttttaccggaagaagcttaaggaggtgtggaaacctgccgtgcggtctggcggatctggcggaggctccaccagccccaagaaaaagagaaaagtctaagctgccttctgcggggcttgccttctggccatgcccttcttctctcccttgcacctgtacctcttggtctttgaataaagcctgagtaggaaggctagcaaaaaaaaaaaaaaaaaaaaaaaaaaaaaaaaaaaaaaaaaaaaaaaaaaaaaaaaaaaaaaaaaaaaaaaaaaaaaaaa

SEQ ID NO: 13080 - RNA, 5785 nt, synthetic construct
  source 1..5785: mol_type = other RNA
aggaaataagagagaaaagaagagtaagaagaaatataagagccaccatggcccctaagaagaagcgtaaagtgagccggatggaacgcctcgtctacgaggtgcggcagaagtgcagaaacatcgaggacatctgcatctcctgcggatctctgaacgtgaccctggagcacccactgttcatcggcggcatgtgccagaactgtaaaaactgttttctggagtgtgcctatcaatacgacgatgacggctaccagagctactgcaccatctgttgcggcggaagagaggtgctgatgtgtggaaataacaactgctgccggtgcttctgcgtggaatgcgtggacctgctggtgggccccggcgccgcccaggccgctattaaggaagatccttggaactgctacatgtgcggccacaagggcacatacggcctgctgagacggagagaggactggcctagcagactgcagatgttcttcgccaataaccacgaccaggagttcgacccccctaaggtgtaccctcccgtccccgccgagaagagaaagcccatccgggtcctgagcctgttcgatggcatcgccaccggtctgctggtgctgaaggacctgggcatccaggtggataggtacattgcctccgaggtgtgcgaggactccatcaccgtgggaatggtgcgtcatcagggcaagatcatgtacgtgggcgacgtgcggagcgtgacacagaagcatatccaggagtggggccctttcgacctggtgatcggcggcagcccttgcaatgacctgagcatcgtgaacccagcccggaagggcctgtacgagggaaccggcagactgttcttcgagttttacagactgctgcacgacgcccggcctaaggaaggcgacgaccggcccttcttttggctgttcgagaatgtggtggccatgggagtcagcgacaagcgggatattagccggttcctggagagcaaccccgtgatgatcgatgccaaggaagtgagcgccgcccaccgggccagatacttctggggcaatctgcctggcatgaacagacccctggccagcaccgtgaacgacaagctggagctgcaggagtgcctggagcacggccggatcgccaagttcagcaaggtgagaaccatcaccacccgaagcaacagcatcaaacaaggcaaggaccagcactttcctgtgttcatgaacgagaaggaggacatcctgtggtgtaccgagatggagagagtgttcgggttcccagtccactacacagatgtcagcaacatgtctagactggccagacagagactgctgggaagaagctggtccgtccctgtgatcagacacctgttcgcccctctgaaggagtacttcgcctgcgtgagcagcggcaacagcaacgccaacagccggggccccagcttctctagcggcctggtgccactgtccctgagagggagccacatgggccccatggagatctacaaaaccgtgagcgcctggaagcggcagcctgtgcgcgtgctgagcctgtttcggaatatcgataaagtcctgaaaagcctgggattcctggagagcggctctggctccggcggtggcaccctgaagtacgtggaggatgtgacaaacgtggtcagacgggatgtggagaagtggggccccttcgatctggtgtacggcagcacccaacccctgggcagctcttgtgaccggtgccctggctggtacatgtttcagttccaccggatcctgcagtacgccctgccgagacaggagtcccagcggccattcttttggattttcatggacaacttgctgctgaccgaggatgaccaggaaactaccactcggttcctgcagaccgaagccgtgaccctgcaggacgtgagaggccgggactaccagaacgccatgcgggtgtggtccaacatccctggactgaaaagcaagcacgcacctctgacccctaaagaagaggagtacctgcaggcccaggtgcggagcagaagcaagctggacgcccctaaggtggatctgctggtgaagaattgcctcctgcccctgagagagtacttcaagtatttcagccagaatagtctgcccctgggaggcagcggcggcggccaggccgaggtgaccttcgaggacgtggccgtgctgctgagcagggaggagtggggcaggctgggccccgtgcagaagggcctgtacagggacgtgatgctggagacctacaggaacctggtgagcctgggcgccggccccgccggccccaagcccgaggtgatcacccagctggagaggggcgacgagccctgggtgcccgacgtgcagggcagggagaggcccaacatcgacggcagcgccggcggcccaagcagcggcgcccctcctcccagcggcggcagcccagccggctccccaacctctaccgaggagggcacctctgagtccgccacccccgagagcggccctggcacctccaccgagcccagcgagggcagcgcacccggcagccctgccggcagccccacctccacagaggagggaaccagcaccgagcccagcgaaggcagcgccccaggcaccagcaccgagcctagtgagcaggagattaaacggatcaacaagatcagaagaagacttgtgaaagacagcaacaccaagaaggccggcaagacaggccccatgaaaaccctgctggttagagtgatgacacccgatctgagagagcggctggaaaacctgagaaagaagcctgaaaatatcccccagcccatcagcaatacatctagagccaacctgaataagctgctgaccgattacaccgaaatgaagaaggcgatcctgcatgtgtactgggaagagttccagaaggaccctgtgggcctgatgagccgggtggcccagcctgccagcaagaagatcgatcagaacaagctgaaacctgagatggacgagaagggcaacctgaccaccgccggctttgcctgctctcagtgtggccagcccctgttcgtgtacaagctggagcaggtgtctgagaagggcaaggcttacaccaactacttcggacggtgcaatgtggccgagcacgaaaagctgatcctgctggcccagctgaagcccgagaaggatagcgacgaagccgtgacatatagcctgggaaagtttgggcagagggccctggatttctacagcattcatgtgaccaaggagtccacccaccccgtgaagcccctggcccagatcgccggaaacagatacgcctccggacctgtgggaaaggccctgagcgacgcatgtatgggcacaatcgcctccttcctgtctaagtaccaggacatcatcatcgaacaccagaaggtggtgaagggcaaccagaagagactggagagcctgcgggagctggccggcaaggaaaacctggaataccctagcgtgaccctgccacctcagcctcacaccaaggagggcgttgatgcctacaacgaagtgatcgcccgggtgcgaatgtgggtgaacctgaacctgtggcagaagctgaagctaagcagagatgatgccaagcctctgctgagactgaagggattcccttcctttcctctggtcgagagacaggccaacgaagtggactggtgggacatggtgtgtaacgtgaagaagctgatcaacgagaaaaaggaggatggcaaggtgttttggcagaatctggctggctacaagagacaggaagccctgagaccatacctgagcagcgaggaagatcggaagaagggaaagaaattcgctcggtaccagctgggcgacctgctgctgcacctggaaaagaagcacggcgaggactggggaaaggtgtacgacgaggcctgggagcggattgacaagaaagtggaaggcctgagcaagcacatcaagctggaagaggaacggagaagcgaggacgcccagagcaaggccgccctgaccgactggctgcgggctaaggccagcttcgtgatcgagggcctgaaggaggccgacaaggacgagttctgcagatgcgagctgaagctgcagaagtggtacggggacctgcggggaaagcccttcgccatcgaagccgagaacagcatcctggacatcagcggcttcagcaagcagtacaactgtgccttcatctggcagaaggacggcgtgaagaagctgaacctgtacctgatcatcaactacttcaagggcggcaagctgcggttcaagaagatcaaacctgaagccttcgaagccaacagattctacaccgtgatcaacaaaaagagcggcgagatcgtgcccatggaggtgaacttcaacttcgacgaccccaacctgatcatcctgcctctggcctttggcaagagacagggcagagaattcatctggaacgacctgctgtccctggaaaccggcagcctgaagctggccaacggaagagtgatcgagaagacactgtacaacagaagaacccggcaggatgagcctgccctgttcgtggccctgaccttcgagcggcgggaggtcctggactcctccaatatcaaaccaatgaacctgatcggcgtggcaagaggcgaaaacatccccgccgtgatcgccctgaccgaccccgagggctgcccactgagccggtttaaggatagcctgggaaacccaacccacatcctgagaatcggcgagagctataaggagaagcagcggaccatccaggccaagaaggaggtggagcagcggagagccggcggctacagccggaagtacgccagcaaagccaagaatctggcagacgatatggtgagaaacaccgctagagatctgctgtactacgccgtgacccaggatgccatgctgatcttcgccaacctgagccggggcttcggccggcagggcaagcggaccttcatggccgagagacagtacacacggatggaggactggctgaccgccaagctggcctacgagggcctgagcaagacctacctgtccaagacactggcccagtacacctccaagacatgcagcaactgtgggtttaccatcaccagcgccgactacgacagggtgctggagaagctgaagaagacagcaacaggctggatgaccacaattaacggcaaggagctgaaggtggagggccagattacctactacaacagatacaagagacagaacgtagtcaaggacctgtccgtcgagctggatagactgagcgaagaatctgtgaacaacgacatctcctcctggacaaagggcagaagcggagaagctctgagcctcctgaagaaaagattctcccatagacccgtgcaggagaagttcgtgtgcctgaactgcggcttcgagacacacgcagccgagcaagccgccctgaacatcgccagatcctggctgttcctgcggagccaggagtacaagaaataccagacaaacaagacaaccggcaacaccgataagagagccttcgtcgagacctggcagtccttttaccggaagaagcttaaggaggtgtggaaacctgccgtgcggtctggcggatctggcggaggctccaccagccccaagaaaaagagaaaagtctaagctgccttctgcggggcttgccttctggccatgcccttcttctctcccttgcacctgtacctcttggtctttgaataaagcctgagtaggaaggctagcaaaaaaaaaaaaaaaaaaaaaaaaaaaaaaaaaaaaaaaaaaaaaaaaaaaaaaaaaaaaaaaaaaaaaaaaaaaaaaaa

SEQ ID NO: 13081 - RNA, 5785 nt, synthetic construct
  source 1..5785: mol_type = other RNA
aggaaataagagagaaaagaagagtaagaagaaatataagagccaccatggcccctaagaagaagcgtaaagtgagccggatggaacgcctcgtctacgaggtgcggcagaagtgcagaaacatcgaggacatctgcatctcctgcggatctctgaacgtgaccctggagcacccactgttcatcggcggcatgtgccagaactgtaaaaactgttttctggagtgtgcctatcaatacgacgatgacggctaccagagctactgcaccatctgttgcggcggaagagaggtgctgatgtgtggaaataacaactgctgccggtgcttctgcgtggaatgcgtggacctgctggtgggccccggcgccgcccaggccgctattaaggaagatccttggaactgctacatgtgcggccacaagggcacatacggcctgctgagacggagagaggactggcctagcagactgcagatgttcttcgccaataaccacgaccaggagttcgacccccctaaggtgtaccctcccgtccccgccgagaagagaaagcccatccgggtcctgagcctgttcgatggcatcgccaccggtctgctggtgctgaaggacctgggcatccaggtggataggtacattgcctccgaggtgtgcgaggactccatcaccgtgggaatggtgcgtcatcagggcaagatcatgtacgtgggcgacgtgcggagcgtgacacagaagcatatccaggagtggggccctttcgacctggtgatcggcggcagcccttgcaatgacctgagcatcgtgaacccagcccggaagggcctgtacgagggaaccggcagactgttcttcgagttttacagactgctgcacgacgcccggcctaaggaaggcgacgaccggcccttcttttggctgttcgagaatgtggtggccatgggagtcagcgacaagcgggatattagccggttcctggagagcaaccccgtgatgatcgatgccaaggaagtgagcgccgcccaccgggccagatacttctggggcaatctgcctggcatgaacagacccctggccagcaccgtgaacgacaagctggagctgcaggagtgcctggagcacggccggatcgccaagttcagcaaggtgagaaccatcaccacccgaagcaacagcatcaaacaaggcaaggaccagcactttcctgtgttcatgaacgagaaggaggacatcctgtggtgtaccgagatggagagagtgttcgggttcccagtccactacacagatgtcagcaacatgtctagactggccagacagagactgctgggaagaagctggtccgtccctgtgatcagacacctgttcgcccctctgaaggagtacttcgcctgcgtgagcagcggcaacagcaacgccaacagccggggccccagcttctctagcggcctggtgccactgtccctgagagggagccacatgggccccatggagatctacaaaaccgtgagcgcctggaagcggcagcctgtgcgcgtgctgagcctgtttcggaatatcgataaagtcctgaaaagcctgggattcctggagagcggctctggctccggcggtggcaccctgaagtacgtggaggatgtgacaaacgtggtcagacgggatgtggagaagtggggccccttcgatctggtgtacggcagcacccaacccctgggcagctcttgtgaccggtgccctggctggtacatgtttcagttccaccggatcctgcagtacgccctgccgagacaggagtcccagcggccattcttttggattttcatggacaacttgctgctgaccgaggatgaccaggaaactaccactcggttcctgcagaccgaagccgtgaccctgcaggacgtgagaggccgggactaccagaacgccatgcgggtgtggtccaacatccctggactgaaaagcaagcacgcacctctgacccctaaagaagaggagtacctgcaggcccaggtgcggagcagaagcaagctggacgcccctaaggtggatctgctggtgaagaattgcctcctgcccctgagagagtacttcaagtatttcagccagaatagtctgcccctgggaggcagcggcggcggcctgagggacctggtgaccttcgaggacgtggccgtggacttcacccaggaggagtgggccctgctggacgccagccagaggagcctgtacagggaggtgatgctggagaactgcaggaacctggccagcctgggctgccacgtggacaagcccagcctgatcagccagctggagcaggaggaccaggccatgaccgaggagaggggcaacctgcccggcacctgccccgacctggagaccgtgggcggcccaagcagcggcgcccctcctcccagcggcggcagcccagccggctccccaacctctaccgaggagggcacctctgagtccgccacccccgagagcggccctggcacctccaccgagcccagcgagggcagcgcacccggcagccctgccggcagccccacctccacagaggagggaaccagcaccgagcccagcgaaggcagcgccccaggcaccagcaccgagcctagtgagcaggagattaaacggatcaacaagatcagaagaagacttgtgaaagacagcaacaccaagaaggccggcaagacaggccccatgaaaaccctgctggttagagtgatgacacccgatctgagagagcggctggaaaacctgagaaagaagcctgaaaatatcccccagcccatcagcaatacatctagagccaacctgaataagctgctgaccgattacaccgaaatgaagaaggcgatcctgcatgtgtactgggaagagttccagaaggaccctgtgggcctgatgagccgggtggcccagcctgccagcaagaagatcgatcagaacaagctgaaacctgagatggacgagaagggcaacctgaccaccgccggctttgcctgctctcagtgtggccagcccctgttcgtgtacaagctggagcaggtgtctgagaagggcaaggcttacaccaactacttcggacggtgcaatgtggccgagcacgaaaagctgatcctgctggcccagctgaagcccgagaaggatagcgacgaagccgtgacatatagcctgggaaagtttgggcagagggccctggatttctacagcattcatgtgaccaaggagtccacccaccccgtgaagcccctggcccagatcgccggaaacagatacgcctccggacctgtgggaaaggccctgagcgacgcatgtatgggcacaatcgcctccttcctgtctaagtaccaggacatcatcatcgaacaccagaaggtggtgaagggcaaccagaagagactggagagcctgcgggagctggccggcaaggaaaacctggaataccctagcgtgaccctgccacctcagcctcacaccaaggagggcgttgatgcctacaacgaagtgatcgcccgggtgcgaatgtgggtgaacctgaacctgtggcagaagctgaagctaagcagagatgatgccaagcctctgctgagactgaagggattcccttcctttcctctggtcgagagacaggccaacgaagtggactggtgggacatggtgtgtaacgtgaagaagctgatcaacgagaaaaaggaggatggcaaggtgttttggcagaatctggctggctacaagagacaggaagccctgagaccatacctgagcagcgaggaagatcggaagaagggaaagaaattcgctcggtaccagctgggcgacctgctgctgcacctggaaaagaagcacggcgaggactggggaaaggtgtacgacgaggcctgggagcggattgacaagaaagtggaaggcctgagcaagcacatcaagctggaagaggaacggagaagcgaggacgcccagagcaaggccgccctgaccgactggctgcgggctaaggccagcttcgtgatcgagggcctgaaggaggccgacaaggacgagttctgcagatgcgagctgaagctgcagaagtggtacggggacctgcggggaaagcccttcgccatcgaagccgagaacagcatcctggacatcagcggcttcagcaagcagtacaactgtgccttcatctggcagaaggacggcgtgaagaagctgaacctgtacctgatcatcaactacttcaagggcggcaagctgcggttcaagaagatcaaacctgaagccttcgaagccaacagattctacaccgtgatcaacaaaaagagcggcgagatcgtgcccatggaggtgaacttcaacttcgacgaccccaacctgatcatcctgcctctggcctttggcaagagacagggcagagaattcatctggaacgacctgctgtccctggaaaccggcagcctgaagctggccaacggaagagtgatcgagaagacactgtacaacagaagaacccggcaggatgagcctgccctgttcgtggccctgaccttcgagcggcgggaggtcctggactcctccaatatcaaaccaatgaacctgatcggcgtggcaagaggcgaaaacatccccgccgtgatcgccctgaccgaccccgagggctgcccactgagccggtttaaggatagcctgggaaacccaacccacatcctgagaatcggcgagagctataaggagaagcagcggaccatccaggccaagaaggaggtggagcagcggagagccggcggctacagccggaagtacgccagcaaagccaagaatctggcagacgatatggtgagaaacaccgctagagatctgctgtactacgccgtgacccaggatgccatgctgatcttcgccaacctgagccggggcttcggccggcagggcaagcggaccttcatggccgagagacagtacacacggatggaggactggctgaccgccaagctggcctacgagggcctgagcaagacctacctgtccaagacactggcccagtacacctccaagacatgcagcaactgtgggtttaccatcaccagcgccgactacgacagggtgctggagaagctgaagaagacagcaacaggctggatgaccacaattaacggcaaggagctgaaggtggagggccagattacctactacaacagatacaagagacagaacgtagtcaaggacctgtccgtcgagctggatagactgagcgaagaatctgtgaacaacgacatctcctcctggacaaagggcagaagcggagaagctctgagcctcctgaagaaaagattctcccatagacccgtgcaggagaagttcgtgtgcctgaactgcggcttcgagacacacgcagccgagcaagccgccctgaacatcgccagatcctggctgttcctgcggagccaggagtacaagaaataccagacaaacaagacaaccggcaacaccgataagagagccttcgtcgagacctggcagtccttttaccggaagaagcttaaggaggtgtggaaacctgccgtgcggtctggcggatctggcggaggctccaccagccccaagaaaaagagaaaagtctaagctgccttctgcggggcttgccttctggccatgcccttcttctctcccttgcacctgtacctcttggtctttgaataaagcctgagtaggaaggctagcaaaaaaaaaaaaaaaaaaaaaaaaaaaaaaaaaaaaaaaaaaaaaaaaaaaaaaaaaaaaaaaaaaaaaaaaaaaaaaaa

SEQ ID NO: 13082 - RNA, 5785 nt, synthetic construct
  source 1..5785: mol_type = other RNA
aggaaataagagagaaaagaagagtaagaagaaatataagagccaccatggcccctaagaagaagcgtaaagtgagccggatggaacgcctcgtctacgaggtgcggcagaagtgcagaaacatcgaggacatctgcatctcctgcggatctctgaacgtgaccctggagcacccactgttcatcggcggcatgtgccagaactgtaaaaactgttttctggagtgtgcctatcaatacgacgatgacggctaccagagctactgcaccatctgttgcggcggaagagaggtgctgatgtgtggaaataacaactgctgccggtgcttctgcgtggaatgcgtggacctgctggtgggccccggcgccgcccaggccgctattaaggaagatccttggaactgctacatgtgcggccacaagggcacatacggcctgctgagacggagagaggactggcctagcagactgcagatgttcttcgccaataaccacgaccaggagttcgacccccctaaggtgtaccctcccgtccccgccgagaagagaaagcccatccgggtcctgagcctgttcgatggcatcgccaccggtctgctggtgctgaaggacctgggcatccaggtggataggtacattgcctccgaggtgtgcgaggactccatcaccgtgggaatggtgcgtcatcagggcaagatcatgtacgtgggcgacgtgcggagcgtgacacagaagcatatccaggagtggggccctttcgacctggtgatcggcggcagcccttgcaatgacctgagcatcgtgaacccagcccggaagggcctgtacgagggaaccggcagactgttcttcgagttttacagactgctgcacgacgcccggcctaaggaaggcgacgaccggcccttcttttggctgttcgagaatgtggtggccatgggagtcagcgacaagcgggatattagccggttcctggagagcaaccccgtgatgatcgatgccaaggaagtgagcgccgcccaccgggccagatacttctggggcaatctgcctggcatgaacagacccctggccagcaccgtgaacgacaagctggagctgcaggagtgcctggagcacggccggatcgccaagttcagcaaggtgagaaccatcaccacccgaagcaacagcatcaaacaaggcaaggaccagcactttcctgtgttcatgaacgagaaggaggacatcctgtggtgtaccgagatggagagagtgttcgggttcccagtccactacacagatgtcagcaacatgtctagactggccagacagagactgctgggaagaagctggtccgtccctgtgatcagacacctgttcgcccctctgaaggagtacttcgcctgcgtgagcagcggcaacagcaacgccaacagccggggccccagcttctctagcggcctggtgccactgtccctgagagggagccacatgggccccatggagatctacaaaaccgtgagcgcctggaagcggcagcctgtgcgcgtgctgagcctgtttcggaatatcgataaagtcctgaaaagcctgggattcctggagagcggctctggctccggcggtggcaccctgaagtacgtggaggatgtgacaaacgtggtcagacgggatgtggagaagtggggccccttcgatctggtgtacggcagcacccaacccctgggcagctcttgtgaccggtgccctggctggtacatgtttcagttccaccggatcctgcagtacgccctgccgagacaggagtcccagcggccattcttttggattttcatggacaacttgctgctgaccgaggatgaccaggaaactaccactcggttcctgcagaccgaagccgtgaccctgcaggacgtgagaggccgggactaccagaacgccatgcgggtgtggtccaacatccctggactgaaaagcaagcacgcacctctgacccctaaagaagaggagtacctgcaggcccaggtgcggagcagaagcaagctggacgcccctaaggtggatctgctggtgaagaattgcctcctgcccctgagagagtacttcaagtatttcagccagaatagtctgcccctgggaggcagcggcggcggcgcccagaggcccgtgaccttcgaggacgtggccgtgtacttcagcgaggcccagggcaccctgctggaccccgaccagaaggccctgtacagggaggtgatgatggagaactacgagaacgtggccagcctgggcagcctgacccccaagcccgagctgatcatcaggctggagaggggcgaggagccctgggtgagcgaccccggcgacgcccccgtgagcggcgacttcaggaagagccacggcggcccaagcagcggcgcccctcctcccagcggcggcagcccagccggctccccaacctctaccgaggagggcacctctgagtccgccacccccgagagcggccctggcacctccaccgagcccagcgagggcagcgcacccggcagccctgccggcagccccacctccacagaggagggaaccagcaccgagcccagcgaaggcagcgccccaggcaccagcaccgagcctagtgagcaggagattaaacggatcaacaagatcagaagaagacttgtgaaagacagcaacaccaagaaggccggcaagacaggccccatgaaaaccctgctggttagagtgatgacacccgatctgagagagcggctggaaaacctgagaaagaagcctgaaaatatcccccagcccatcagcaatacatctagagccaacctgaataagctgctgaccgattacaccgaaatgaagaaggcgatcctgcatgtgtactgggaagagttccagaaggaccctgtgggcctgatgagccgggtggcccagcctgccagcaagaagatcgatcagaacaagctgaaacctgagatggacgagaagggcaacctgaccaccgccggctttgcctgctctcagtgtggccagcccctgttcgtgtacaagctggagcaggtgtctgagaagggcaaggcttacaccaactacttcggacggtgcaatgtggccgagcacgaaaagctgatcctgctggcccagctgaagcccgagaaggatagcgacgaagccgtgacatatagcctgggaaagtttgggcagagggccctggatttctacagcattcatgtgaccaaggagtccacccaccccgtgaagcccctggcccagatcgccggaaacagatacgcctccggacctgtgggaaaggccctgagcgacgcatgtatgggcacaatcgcctccttcctgtctaagtaccaggacatcatcatcgaacaccagaaggtggtgaagggcaaccagaagagactggagagcctgcgggagctggccggcaaggaaaacctggaataccctagcgtgaccctgccacctcagcctcacaccaaggagggcgttgatgcctacaacgaagtgatcgcccgggtgcgaatgtgggtgaacctgaacctgtggcagaagctgaagctaagcagagatgatgccaagcctctgctgagactgaagggattcccttcctttcctctggtcgagagacaggccaacgaagtggactggtgggacatggtgtgtaacgtgaagaagctgatcaacgagaaaaaggaggatggcaaggtgttttggcagaatctggctggctacaagagacaggaagccctgagaccatacctgagcagcgaggaagatcggaagaagggaaagaaattcgctcggtaccagctgggcgacctgctgctgcacctggaaaagaagcacggcgaggactggggaaaggtgtacgacgaggcctgggagcggattgacaagaaagtggaaggcctgagcaagcacatcaagctggaagaggaacggagaagcgaggacgcccagagcaaggccgccctgaccgactggctgcgggctaaggccagcttcgtgatcgagggcctgaaggaggccgacaaggacgagttctgcagatgcgagctgaagctgcagaagtggtacggggacctgcggggaaagcccttcgccatcgaagccgagaacagcatcctggacatcagcggcttcagcaagcagtacaactgtgccttcatctggcagaaggacggcgtgaagaagctgaacctgtacctgatcatcaactacttcaagggcggcaagctgcggttcaagaagatcaaacctgaagccttcgaagccaacagattctacaccgtgatcaacaaaaagagcggcgagatcgtgcccatggaggtgaacttcaacttcgacgaccccaacctgatcatcctgcctctggcctttggcaagagacagggcagagaattcatctggaacgacctgctgtccctggaaaccggcagcctgaagctggccaacggaagagtgatcgagaagacactgtacaacagaagaacccggcaggatgagcctgccctgttcgtggccctgaccttcgagcggcgggaggtcctggactcctccaatatcaaaccaatgaacctgatcggcgtggcaagaggcgaaaacatccccgccgtgatcgccctgaccgaccccgagggctgcccactgagccggtttaaggatagcctgggaaacccaacccacatcctgagaatcggcgagagctataaggagaagcagcggaccatccaggccaagaaggaggtggagcagcggagagccggcggctacagccggaagtacgccagcaaagccaagaatctggcagacgatatggtgagaaacaccgctagagatctgctgtactacgccgtgacccaggatgccatgctgatcttcgccaacctgagccggggcttcggccggcagggcaagcggaccttcatggccgagagacagtacacacggatggaggactggctgaccgccaagctggcctacgagggcctgagcaagacctacctgtccaagacactggcccagtacacctccaagacatgcagcaactgtgggtttaccatcaccagcgccgactacgacagggtgctggagaagctgaagaagacagcaacaggctggatgaccacaattaacggcaaggagctgaaggtggagggccagattacctactacaacagatacaagagacagaacgtagtcaaggacctgtccgtcgagctggatagactgagcgaagaatctgtgaacaacgacatctcctcctggacaaagggcagaagcggagaagctctgagcctcctgaagaaaagattctcccatagacccgtgcaggagaagttcgtgtgcctgaactgcggcttcgagacacacgcagccgagcaagccgccctgaacatcgccagatcctggctgttcctgcggagccaggagtacaagaaataccagacaaacaagacaaccggcaacaccgataagagagccttcgtcgagacctggcagtccttttaccggaagaagcttaaggaggtgtggaaacctgccgtgcggtctggcggatctggcggaggctccaccagccccaagaaaaagagaaaagtctaagctgccttctgcggggcttgccttctggccatgcccttcttctctcccttgcacctgtacctcttggtctttgaataaagcctgagtaggaaggctagcaaaaaaaaaaaaaaaaaaaaaaaaaaaaaaaaaaaaaaaaaaaaaaaaaaaaaaaaaaaaaaaaaaaaaaaaaaaaaaaa

SEQ ID NO: 13083 - RNA, 5785 nt, synthetic construct
  source 1..5785: mol_type = other RNA
aggaaataagagagaaaagaagagtaagaagaaatataagagccaccatggcccctaagaagaagcgtaaagtgagccggatggaacgcctcgtctacgaggtgcggcagaagtgcagaaacatcgaggacatctgcatctcctgcggatctctgaacgtgaccctggagcacccactgttcatcggcggcatgtgccagaactgtaaaaactgttttctggagtgtgcctatcaatacgacgatgacggctaccagagctactgcaccatctgttgcggcggaagagaggtgctgatgtgtggaaataacaactgctgccggtgcttctgcgtggaatgcgtggacctgctggtgggccccggcgccgcccaggccgctattaaggaagatccttggaactgctacatgtgcggccacaagggcacatacggcctgctgagacggagagaggactggcctagcagactgcagatgttcttcgccaataaccacgaccaggagttcgacccccctaaggtgtaccctcccgtccccgccgagaagagaaagcccatccgggtcctgagcctgttcgatggcatcgccaccggtctgctggtgctgaaggacctgggcatccaggtggataggtacattgcctccgaggtgtgcgaggactccatcaccgtgggaatggtgcgtcatcagggcaagatcatgtacgtgggcgacgtgcggagcgtgacacagaagcatatccaggagtggggccctttcgacctggtgatcggcggcagcccttgcaatgacctgagcatcgtgaacccagcccggaagggcctgtacgagggaaccggcagactgttcttcgagttttacagactgctgcacgacgcccggcctaaggaaggcgacgaccggcccttcttttggctgttcgagaatgtggtggccatgggagtcagcgacaagcgggatattagccggttcctggagagcaaccccgtgatgatcgatgccaaggaagtgagcgccgcccaccgggccagatacttctggggcaatctgcctggcatgaacagacccctggccagcaccgtgaacgacaagctggagctgcaggagtgcctggagcacggccggatcgccaagttcagcaaggtgagaaccatcaccacccgaagcaacagcatcaaacaaggcaaggaccagcactttcctgtgttcatgaacgagaaggaggacatcctgtggtgtaccgagatggagagagtgttcgggttcccagtccactacacagatgtcagcaacatgtctagactggccagacagagactgctgggaagaagctggtccgtccctgtgatcagacacctgttcgcccctctgaaggagtacttcgcctgcgtgagcagcggcaacagcaacgccaacagccggggccccagcttctctagcggcctggtgccactgtccctgagagggagccacatgggccccatggagatctacaaaaccgtgagcgcctggaagcggcagcctgtgcgcgtgctgagcctgtttcggaatatcgataaagtcctgaaaagcctgggattcctggagagcggctctggctccggcggtggcaccctgaagtacgtggaggatgtgacaaacgtggtcagacgggatgtggagaagtggggccccttcgatctggtgtacggcagcacccaacccctgggcagctcttgtgaccggtgccctggctggtacatgtttcagttccaccggatcctgcagtacgccctgccgagacaggagtcccagcggccattcttttggattttcatggacaacttgctgctgaccgaggatgaccaggaaactaccactcggttcctgcagaccgaagccgtgaccctgcaggacgtgagaggccgggactaccagaacgccatgcgggtgtggtccaacatccctggactgaaaagcaagcacgcacctctgacccctaaagaagaggagtacctgcaggcccaggtgcggagcagaagcaagctggacgcccctaaggtggatctgctggtgaagaattgcctcctgcccctgagagagtacttcaagtatttcagccagaatagtctgcccctgggaggcagcggcggcggcgcccaggtgcccgtgaccttcgaggaggtggccgtgtacttcaccgccggccagggcgccctgctgggccccaaccagagggccctgtacagggacgtgatgcaggagaactacgagaccgtggccagcctgggcttcagcatccccaagcccgacctgatcacccagctggagaggggcgaggagccctgggtgcccgacctgcagcccagcaaggagatggagttcctgaggggcacctgcggcggcccaagcagcggcgcccctcctcccagcggcggcagcccagccggctccccaacctctaccgaggagggcacctctgagtccgccacccccgagagcggccctggcacctccaccgagcccagcgagggcagcgcacccggcagccctgccggcagccccacctccacagaggagggaaccagcaccgagcccagcgaaggcagcgccccaggcaccagcaccgagcctagtgagcaggagattaaacggatcaacaagatcagaagaagacttgtgaaagacagcaacaccaagaaggccggcaagacaggccccatgaaaaccctgctggttagagtgatgacacccgatctgagagagcggctggaaaacctgagaaagaagcctgaaaatatcccccagcccatcagcaatacatctagagccaacctgaataagctgctgaccgattacaccgaaatgaagaaggcgatcctgcatgtgtactgggaagagttccagaaggaccctgtgggcctgatgagccgggtggcccagcctgccagcaagaagatcgatcagaacaagctgaaacctgagatggacgagaagggcaacctgaccaccgccggctttgcctgctctcagtgtggccagcccctgttcgtgtacaagctggagcaggtgtctgagaagggcaaggcttacaccaactacttcggacggtgcaatgtggccgagcacgaaaagctgatcctgctggcccagctgaagcccgagaaggatagcgacgaagccgtgacatatagcctgggaaagtttgggcagagggccctggatttctacagcattcatgtgaccaaggagtccacccaccccgtgaagcccctggcccagatcgccggaaacagatacgcctccggacctgtgggaaaggccctgagcgacgcatgtatgggcacaatcgcctccttcctgtctaagtaccaggacatcatcatcgaacaccagaaggtggtgaagggcaaccagaagagactggagagcctgcgggagctggccggcaaggaaaacctggaataccctagcgtgaccctgccacctcagcctcacaccaaggagggcgttgatgcctacaacgaagtgatcgcccgggtgcgaatgtgggtgaacctgaacctgtggcagaagctgaagctaagcagagatgatgccaagcctctgctgagactgaagggattcccttcctttcctctggtcgagagacaggccaacgaagtggactggtgggacatggtgtgtaacgtgaagaagctgatcaacgagaaaaaggaggatggcaaggtgttttggcagaatctggctggctacaagagacaggaagccctgagaccatacctgagcagcgaggaagatcggaagaagggaaagaaattcgctcggtaccagctgggcgacctgctgctgcacctggaaaagaagcacggcgaggactggggaaaggtgtacgacgaggcctgggagcggattgacaagaaagtggaaggcctgagcaagcacatcaagctggaagaggaacggagaagcgaggacgcccagagcaaggccgccctgaccgactggctgcgggctaaggccagcttcgtgatcgagggcctgaaggaggccgacaaggacgagttctgcagatgcgagctgaagctgcagaagtggtacggggacctgcggggaaagcccttcgccatcgaagccgagaacagcatcctggacatcagcggcttcagcaagcagtacaactgtgccttcatctggcagaaggacggcgtgaagaagctgaacctgtacctgatcatcaactacttcaagggcggcaagctgcggttcaagaagatcaaacctgaagccttcgaagccaacagattctacaccgtgatcaacaaaaagagcggcgagatcgtgcccatggaggtgaacttcaacttcgacgaccccaacctgatcatcctgcctctggcctttggcaagagacagggcagagaattcatctggaacgacctgctgtccctggaaaccggcagcctgaagctggccaacggaagagtgatcgagaagacactgtacaacagaagaacccggcaggatgagcctgccctgttcgtggccctgaccttcgagcggcgggaggtcctggactcctccaatatcaaaccaatgaacctgatcggcgtggcaagaggcgaaaacatccccgccgtgatcgccctgaccgaccccgagggctgcccactgagccggtttaaggatagcctgggaaacccaacccacatcctgagaatcggcgagagctataaggagaagcagcggaccatccaggccaagaaggaggtggagcagcggagagccggcggctacagccggaagtacgccagcaaagccaagaatctggcagacgatatggtgagaaacaccgctagagatctgctgtactacgccgtgacccaggatgccatgctgatcttcgccaacctgagccggggcttcggccggcagggcaagcggaccttcatggccgagagacagtacacacggatggaggactggctgaccgccaagctggcctacgagggcctgagcaagacctacctgtccaagacactggcccagtacacctccaagacatgcagcaactgtgggtttaccatcaccagcgccgactacgacagggtgctggagaagctgaagaagacagcaacaggctggatgaccacaattaacggcaaggagctgaaggtggagggccagattacctactacaacagatacaagagacagaacgtagtcaaggacctgtccgtcgagctggatagactgagcgaagaatctgtgaacaacgacatctcctcctggacaaagggcagaagcggagaagctctgagcctcctgaagaaaagattctcccatagacccgtgcaggagaagttcgtgtgcctgaactgcggcttcgagacacacgcagccgagcaagccgccctgaacatcgccagatcctggctgttcctgcggagccaggagtacaagaaataccagacaaacaagacaaccggcaacaccgataagagagccttcgtcgagacctggcagtccttttaccggaagaagcttaaggaggtgtggaaacctgccgtgcggtctggcggatctggcggaggctccaccagccccaagaaaaagagaaaagtctaagctgccttctgcggggcttgccttctggccatgcccttcttctctcccttgcacctgtacctcttggtctttgaataaagcctgagtaggaaggctagcaaaaaaaaaaaaaaaaaaaaaaaaaaaaaaaaaaaaaaaaaaaaaaaaaaaaaaaaaaaaaaaaaaaaaaaaaaaaaaaa

SEQ ID NO: 13084 - RNA, 5785 nt, synthetic construct
  source 1..5785: mol_type = other RNA
aggaaataagagagaaaagaagagtaagaagaaatataagagccaccatggcccctaagaagaagcgtaaagtgagccggatggaacgcctcgtctacgaggtgcggcagaagtgcagaaacatcgaggacatctgcatctcctgcggatctctgaacgtgaccctggagcacccactgttcatcggcggcatgtgccagaactgtaaaaactgttttctggagtgtgcctatcaatacgacgatgacggctaccagagctactgcaccatctgttgcggcggaagagaggtgctgatgtgtggaaataacaactgctgccggtgcttctgcgtggaatgcgtggacctgctggtgggccccggcgccgcccaggccgctattaaggaagatccttggaactgctacatgtgcggccacaagggcacatacggcctgctgagacggagagaggactggcctagcagactgcagatgttcttcgccaataaccacgaccaggagttcgacccccctaaggtgtaccctcccgtccccgccgagaagagaaagcccatccgggtcctgagcctgttcgatggcatcgccaccggtctgctggtgctgaaggacctgggcatccaggtggataggtacattgcctccgaggtgtgcgaggactccatcaccgtgggaatggtgcgtcatcagggcaagatcatgtacgtgggcgacgtgcggagcgtgacacagaagcatatccaggagtggggccctttcgacctggtgatcggcggcagcccttgcaatgacctgagcatcgtgaacccagcccggaagggcctgtacgagggaaccggcagactgttcttcgagttttacagactgctgcacgacgcccggcctaaggaaggcgacgaccggcccttcttttggctgttcgagaatgtggtggccatgggagtcagcgacaagcgggatattagccggttcctggagagcaaccccgtgatgatcgatgccaaggaagtgagcgccgcccaccgggccagatacttctggggcaatctgcctggcatgaacagacccctggccagcaccgtgaacgacaagctggagctgcaggagtgcctggagcacggccggatcgccaagttcagcaaggtgagaaccatcaccacccgaagcaacagcatcaaacaaggcaaggaccagcactttcctgtgttcatgaacgagaaggaggacatcctgtggtgtaccgagatggagagagtgttcgggttcccagtccactacacagatgtcagcaacatgtctagactggccagacagagactgctgggaagaagctggtccgtccctgtgatcagacacctgttcgcccctctgaaggagtacttcgcctgcgtgagcagcggcaacagcaacgccaacagccggggccccagcttctctagcggcctggtgccactgtccctgagagggagccacatgggccccatggagatctacaaaaccgtgagcgcctggaagcggcagcctgtgcgcgtgctgagcctgtttcggaatatcgataaagtcctgaaaagcctgggattcctggagagcggctctggctccggcggtggcaccctgaagtacgtggaggatgtgacaaacgtggtcagacgggatgtggagaagtggggccccttcgatctggtgtacggcagcacccaacccctgggcagctcttgtgaccggtgccctggctggtacatgtttcagttccaccggatcctgcagtacgccctgccgagacaggagtcccagcggccattcttttggattttcatggacaacttgctgctgaccgaggatgaccaggaaactaccactcggttcctgcagaccgaagccgtgaccctgcaggacgtgagaggccgggactaccagaacgccatgcgggtgtggtccaacatccctggactgaaaagcaagcacgcacctctgacccctaaagaagaggagtacctgcaggcccaggtgcggagcagaagcaagctggacgcccctaaggtggatctgctggtgaagaattgcctcctgcccctgagagagtacttcaagtatttcagccagaatagtctgcccctgggaggcagcggcggcggccccaacgccctggtgaccttccaggacgtgttcgtggacttcagccccgaggagctggccagcctgagcgccgcccagaggaggctgcacagggaggtgaccctggagaactacaggaacctggtgagcctgggctaccagttccccaggcccgacatcatcacccagctggaggaggaggagagcagcgccatggaggaggacagcaacaccaagaccggccccgactgggagaccggccccggcggcccaagcagcggcgcccctcctcccagcggcggcagcccagccggctccccaacctctaccgaggagggcacctctgagtccgccacccccgagagcggccctggcacctccaccgagcccagcgagggcagcgcacccggcagccctgccggcagccccacctccacagaggagggaaccagcaccgagcccagcgaaggcagcgccccaggcaccagcaccgagcctagtgagcaggagattaaacggatcaacaagatcagaagaagacttgtgaaagacagcaacaccaagaaggccggcaagacaggccccatgaaaaccctgctggttagagtgatgacacccgatctgagagagcggctggaaaacctgagaaagaagcctgaaaatatcccccagcccatcagcaatacatctagagccaacctgaataagctgctgaccgattacaccgaaatgaagaaggcgatcctgcatgtgtactgggaagagttccagaaggaccctgtgggcctgatgagccgggtggcccagcctgccagcaagaagatcgatcagaacaagctgaaacctgagatggacgagaagggcaacctgaccaccgccggctttgcctgctctcagtgtggccagcccctgttcgtgtacaagctggagcaggtgtctgagaagggcaaggcttacaccaactacttcggacggtgcaatgtggccgagcacgaaaagctgatcctgctggcccagctgaagcccgagaaggatagcgacgaagccgtgacatatagcctgggaaagtttgggcagagggccctggatttctacagcattcatgtgaccaaggagtccacccaccccgtgaagcccctggcccagatcgccggaaacagatacgcctccggacctgtgggaaaggccctgagcgacgcatgtatgggcacaatcgcctccttcctgtctaagtaccaggacatcatcatcgaacaccagaaggtggtgaagggcaaccagaagagactggagagcctgcgggagctggccggcaaggaaaacctggaataccctagcgtgaccctgccacctcagcctcacaccaaggagggcgttgatgcctacaacgaagtgatcgcccgggtgcgaatgtgggtgaacctgaacctgtggcagaagctgaagctaagcagagatgatgccaagcctctgctgagactgaagggattcccttcctttcctctggtcgagagacaggccaacgaagtggactggtgggacatggtgtgtaacgtgaagaagctgatcaacgagaaaaaggaggatggcaaggtgttttggcagaatctggctggctacaagagacaggaagccctgagaccatacctgagcagcgaggaagatcggaagaagggaaagaaattcgctcggtaccagctgggcgacctgctgctgcacctggaaaagaagcacggcgaggactggggaaaggtgtacgacgaggcctgggagcggattgacaagaaagtggaaggcctgagcaagcacatcaagctggaagaggaacggagaagcgaggacgcccagagcaaggccgccctgaccgactggctgcgggctaaggccagcttcgtgatcgagggcctgaaggaggccgacaaggacgagttctgcagatgcgagctgaagctgcagaagtggtacggggacctgcggggaaagcccttcgccatcgaagccgagaacagcatcctggacatcagcggcttcagcaagcagtacaactgtgccttcatctggcagaaggacggcgtgaagaagctgaacctgtacctgatcatcaactacttcaagggcggcaagctgcggttcaagaagatcaaacctgaagccttcgaagccaacagattctacaccgtgatcaacaaaaagagcggcgagatcgtgcccatggaggtgaacttcaacttcgacgaccccaacctgatcatcctgcctctggcctttggcaagagacagggcagagaattcatctggaacgacctgctgtccctggaaaccggcagcctgaagctggccaacggaagagtgatcgagaagacactgtacaacagaagaacccggcaggatgagcctgccctgttcgtggccctgaccttcgagcggcgggaggtcctggactcctccaatatcaaaccaatgaacctgatcggcgtggcaagaggcgaaaacatccccgccgtgatcgccctgaccgaccccgagggctgcccactgagccggtttaaggatagcctgggaaacccaacccacatcctgagaatcggcgagagctataaggagaagcagcggaccatccaggccaagaaggaggtggagcagcggagagccggcggctacagccggaagtacgccagcaaagccaagaatctggcagacgatatggtgagaaacaccgctagagatctgctgtactacgccgtgacccaggatgccatgctgatcttcgccaacctgagccggggcttcggccggcagggcaagcggaccttcatggccgagagacagtacacacggatggaggactggctgaccgccaagctggcctacgagggcctgagcaagacctacctgtccaagacactggcccagtacacctccaagacatgcagcaactgtgggtttaccatcaccagcgccgactacgacagggtgctggagaagctgaagaagacagcaacaggctggatgaccacaattaacggcaaggagctgaaggtggagggccagattacctactacaacagatacaagagacagaacgtagtcaaggacctgtccgtcgagctggatagactgagcgaagaatctgtgaacaacgacatctcctcctggacaaagggcagaagcggagaagctctgagcctcctgaagaaaagattctcccatagacccgtgcaggagaagttcgtgtgcctgaactgcggcttcgagacacacgcagccgagcaagccgccctgaacatcgccagatcctggctgttcctgcggagccaggagtacaagaaataccagacaaacaagacaaccggcaacaccgataagagagccttcgtcgagacctggcagtccttttaccggaagaagcttaaggaggtgtggaaacctgccgtgcggtctggcggatctggcggaggctccaccagccccaagaaaaagagaaaagtctaagctgccttctgcggggcttgccttctggccatgcccttcttctctcccttgcacctgtacctcttggtctttgaataaagcctgagtaggaaggctagcaaaaaaaaaaaaaaaaaaaaaaaaaaaaaaaaaaaaaaaaaaaaaaaaaaaaaaaaaaaaaaaaaaaaaaaaaaaaaaaa

SEQ ID NO: 13085 - RNA, 5785 nt, synthetic construct
  source 1..5785: mol_type = other RNA
aggaaataagagagaaaagaagagtaagaagaaatataagagccaccatggcccctaagaagaagcgtaaagtgagccggatggaacgcctcgtctacgaggtgcggcagaagtgcagaaacatcgaggacatctgcatctcctgcggatctctgaacgtgaccctggagcacccactgttcatcggcggcatgtgccagaactgtaaaaactgttttctggagtgtgcctatcaatacgacgatgacggctaccagagctactgcaccatctgttgcggcggaagagaggtgctgatgtgtggaaataacaactgctgccggtgcttctgcgtggaatgcgtggacctgctggtgggccccggcgccgcccaggccgctattaaggaagatccttggaactgctacatgtgcggccacaagggcacatacggcctgctgagacggagagaggactggcctagcagactgcagatgttcttcgccaataaccacgaccaggagttcgacccccctaaggtgtaccctcccgtccccgccgagaagagaaagcccatccgggtcctgagcctgttcgatggcatcgccaccggtctgctggtgctgaaggacctgggcatccaggtggataggtacattgcctccgaggtgtgcgaggactccatcaccgtgggaatggtgcgtcatcagggcaagatcatgtacgtgggcgacgtgcggagcgtgacacagaagcatatccaggagtggggccctttcgacctggtgatcggcggcagcccttgcaatgacctgagcatcgtgaacccagcccggaagggcctgtacgagggaaccggcagactgttcttcgagttttacagactgctgcacgacgcccggcctaaggaaggcgacgaccggcccttcttttggctgttcgagaatgtggtggccatgggagtcagcgacaagcgggatattagccggttcctggagagcaaccccgtgatgatcgatgccaaggaagtgagcgccgcccaccgggccagatacttctggggcaatctgcctggcatgaacagacccctggccagcaccgtgaacgacaagctggagctgcaggagtgcctggagcacggccggatcgccaagttcagcaaggtgagaaccatcaccacccgaagcaacagcatcaaacaaggcaaggaccagcactttcctgtgttcatgaacgagaaggaggacatcctgtggtgtaccgagatggagagagtgttcgggttcccagtccactacacagatgtcagcaacatgtctagactggccagacagagactgctgggaagaagctggtccgtccctgtgatcagacacctgttcgcccctctgaaggagtacttcgcctgcgtgagcagcggcaacagcaacgccaacagccggggccccagcttctctagcggcctggtgccactgtccctgagagggagccacatgggccccatggagatctacaaaaccgtgagcgcctggaagcggcagcctgtgcgcgtgctgagcctgtttcggaatatcgataaagtcctgaaaagcctgggattcctggagagcggctctggctccggcggtggcaccctgaagtacgtggaggatgtgacaaacgtggtcagacgggatgtggagaagtggggccccttcgatctggtgtacggcagcacccaacccctgggcagctcttgtgaccggtgccctggctggtacatgtttcagttccaccggatcctgcagtacgccctgccgagacaggagtcccagcggccattcttttggattttcatggacaacttgctgctgaccgaggatgaccaggaaactaccactcggttcctgcagaccgaagccgtgaccctgcaggacgtgagaggccgggactaccagaacgccatgcgggtgtggtccaacatccctggactgaaaagcaagcacgcacctctgacccctaaagaagaggagtacctgcaggcccaggtgcggagcagaagcaagctggacgcccctaaggtggatctgctggtgaagaattgcctcctgcccctgagagagtacttcaagtatttcagccagaatagtctgcccctgggaggcagcggcggcggcgcccaggagagcgtgatgttcagcgacgtgagcatcgacttcagccaggaggagtgggagtgcctgaacgacgaccagagggacctgtacagggacgtgatgctggagaactacagcaacctggtgagcatgggccacagcatcagcaagcccaacgtgatcagctacctggagcagggcaaggagccctggctggtggacagggagctgaccaggggccagtggcccgtgctggagagcaggggcggcccaagcagcggcgcccctcctcccagcggcggcagcccagccggctccccaacctctaccgaggagggcacctctgagtccgccacccccgagagcggccctggcacctccaccgagcccagcgagggcagcgcacccggcagccctgccggcagccccacctccacagaggagggaaccagcaccgagcccagcgaaggcagcgccccaggcaccagcaccgagcctagtgagcaggagattaaacggatcaacaagatcagaagaagacttgtgaaagacagcaacaccaagaaggccggcaagacaggccccatgaaaaccctgctggttagagtgatgacacccgatctgagagagcggctggaaaacctgagaaagaagcctgaaaatatcccccagcccatcagcaatacatctagagccaacctgaataagctgctgaccgattacaccgaaatgaagaaggcgatcctgcatgtgtactgggaagagttccagaaggaccctgtgggcctgatgagccgggtggcccagcctgccagcaagaagatcgatcagaacaagctgaaacctgagatggacgagaagggcaacctgaccaccgccggctttgcctgctctcagtgtggccagcccctgttcgtgtacaagctggagcaggtgtctgagaagggcaaggcttacaccaactacttcggacggtgcaatgtggccgagcacgaaaagctgatcctgctggcccagctgaagcccgagaaggatagcgacgaagccgtgacatatagcctgggaaagtttgggcagagggccctggatttctacagcattcatgtgaccaaggagtccacccaccccgtgaagcccctggcccagatcgccggaaacagatacgcctccggacctgtgggaaaggccctgagcgacgcatgtatgggcacaatcgcctccttcctgtctaagtaccaggacatcatcatcgaacaccagaaggtggtgaagggcaaccagaagagactggagagcctgcgggagctggccggcaaggaaaacctggaataccctagcgtgaccctgccacctcagcctcacaccaaggagggcgttgatgcctacaacgaagtgatcgcccgggtgcgaatgtgggtgaacctgaacctgtggcagaagctgaagctaagcagagatgatgccaagcctctgctgagactgaagggattcccttcctttcctctggtcgagagacaggccaacgaagtggactggtgggacatggtgtgtaacgtgaagaagctgatcaacgagaaaaaggaggatggcaaggtgttttggcagaatctggctggctacaagagacaggaagccctgagaccatacctgagcagcgaggaagatcggaagaagggaaagaaattcgctcggtaccagctgggcgacctgctgctgcacctggaaaagaagcacggcgaggactggggaaaggtgtacgacgaggcctgggagcggattgacaagaaagtggaaggcctgagcaagcacatcaagctggaagaggaacggagaagcgaggacgcccagagcaaggccgccctgaccgactggctgcgggctaaggccagcttcgtgatcgagggcctgaaggaggccgacaaggacgagttctgcagatgcgagctgaagctgcagaagtggtacggggacctgcggggaaagcccttcgccatcgaagccgagaacagcatcctggacatcagcggcttcagcaagcagtacaactgtgccttcatctggcagaaggacggcgtgaagaagctgaacctgtacctgatcatcaactacttcaagggcggcaagctgcggttcaagaagatcaaacctgaagccttcgaagccaacagattctacaccgtgatcaacaaaaagagcggcgagatcgtgcccatggaggtgaacttcaacttcgacgaccccaacctgatcatcctgcctctggcctttggcaagagacagggcagagaattcatctggaacgacctgctgtccctggaaaccggcagcctgaagctggccaacggaagagtgatcgagaagacactgtacaacagaagaacccggcaggatgagcctgccctgttcgtggccctgaccttcgagcggcgggaggtcctggactcctccaatatcaaaccaatgaacctgatcggcgtggcaagaggcgaaaacatccccgccgtgatcgccctgaccgaccccgagggctgcccactgagccggtttaaggatagcctgggaaacccaacccacatcctgagaatcggcgagagctataaggagaagcagcggaccatccaggccaagaaggaggtggagcagcggagagccggcggctacagccggaagtacgccagcaaagccaagaatctggcagacgatatggtgagaaacaccgctagagatctgctgtactacgccgtgacccaggatgccatgctgatcttcgccaacctgagccggggcttcggccggcagggcaagcggaccttcatggccgagagacagtacacacggatggaggactggctgaccgccaagctggcctacgagggcctgagcaagacctacctgtccaagacactggcccagtacacctccaagacatgcagcaactgtgggtttaccatcaccagcgccgactacgacagggtgctggagaagctgaagaagacagcaacaggctggatgaccacaattaacggcaaggagctgaaggtggagggccagattacctactacaacagatacaagagacagaacgtagtcaaggacctgtccgtcgagctggatagactgagcgaagaatctgtgaacaacgacatctcctcctggacaaagggcagaagcggagaagctctgagcctcctgaagaaaagattctcccatagacccgtgcaggagaagttcgtgtgcctgaactgcggcttcgagacacacgcagccgagcaagccgccctgaacatcgccagatcctggctgttcctgcggagccaggagtacaagaaataccagacaaacaagacaaccggcaacaccgataagagagccttcgtcgagacctggcagtccttttaccggaagaagcttaaggaggtgtggaaacctgccgtgcggtctggcggatctggcggaggctccaccagccccaagaaaaagagaaaagtctaagctgccttctgcggggcttgccttctggccatgcccttcttctctcccttgcacctgtacctcttggtctttgaataaagcctgagtaggaaggctagcaaaaaaaaaaaaaaaaaaaaaaaaaaaaaaaaaaaaaaaaaaaaaaaaaaaaaaaaaaaaaaaaaaaaaaaaaaaaaaaa

SEQ ID NO: 13086 - RNA, 5785 nt, synthetic construct
  source 1..5785: mol_type = other RNA
aggaaataagagagaaaagaagagtaagaagaaatataagagccaccatggcccctaagaagaagcgtaaagtgagccggatggaacgcctcgtctacgaggtgcggcagaagtgcagaaacatcgaggacatctgcatctcctgcggatctctgaacgtgaccctggagcacccactgttcatcggcggcatgtgccagaactgtaaaaactgttttctggagtgtgcctatcaatacgacgatgacggctaccagagctactgcaccatctgttgcggcggaagagaggtgctgatgtgtggaaataacaactgctgccggtgcttctgcgtggaatgcgtggacctgctggtgggccccggcgccgcccaggccgctattaaggaagatccttggaactgctacatgtgcggccacaagggcacatacggcctgctgagacggagagaggactggcctagcagactgcagatgttcttcgccaataaccacgaccaggagttcgacccccctaaggtgtaccctcccgtccccgccgagaagagaaagcccatccgggtcctgagcctgttcgatggcatcgccaccggtctgctggtgctgaaggacctgggcatccaggtggataggtacattgcctccgaggtgtgcgaggactccatcaccgtgggaatggtgcgtcatcagggcaagatcatgtacgtgggcgacgtgcggagcgtgacacagaagcatatccaggagtggggccctttcgacctggtgatcggcggcagcccttgcaatgacctgagcatcgtgaacccagcccggaagggcctgtacgagggaaccggcagactgttcttcgagttttacagactgctgcacgacgcccggcctaaggaaggcgacgaccggcccttcttttggctgttcgagaatgtggtggccatgggagtcagcgacaagcgggatattagccggttcctggagagcaaccccgtgatgatcgatgccaaggaagtgagcgccgcccaccgggccagatacttctggggcaatctgcctggcatgaacagacccctggccagcaccgtgaacgacaagctggagctgcaggagtgcctggagcacggccggatcgccaagttcagcaaggtgagaaccatcaccacccgaagcaacagcatcaaacaaggcaaggaccagcactttcctgtgttcatgaacgagaaggaggacatcctgtggtgtaccgagatggagagagtgttcgggttcccagtccactacacagatgtcagcaacatgtctagactggccagacagagactgctgggaagaagctggtccgtccctgtgatcagacacctgttcgcccctctgaaggagtacttcgcctgcgtgagcagcggcaacagcaacgccaacagccggggccccagcttctctagcggcctggtgccactgtccctgagagggagccacatgggccccatggagatctacaaaaccgtgagcgcctggaagcggcagcctgtgcgcgtgctgagcctgtttcggaatatcgataaagtcctgaaaagcctgggattcctggagagcggctctggctccggcggtggcaccctgaagtacgtggaggatgtgacaaacgtggtcagacgggatgtggagaagtggggccccttcgatctggtgtacggcagcacccaacccctgggcagctcttgtgaccggtgccctggctggtacatgtttcagttccaccggatcctgcagtacgccctgccgagacaggagtcccagcggccattcttttggattttcatggacaacttgctgctgaccgaggatgaccaggaaactaccactcggttcctgcagaccgaagccgtgaccctgcaggacgtgagaggccgggactaccagaacgccatgcgggtgtggtccaacatccctggactgaaaagcaagcacgcacctctgacccctaaagaagaggagtacctgcaggcccaggtgcggagcagaagcaagctggacgcccctaaggtggatctgctggtgaagaattgcctcctgcccctgagagagtacttcaagtatttcagccagaatagtctgcccctgggaggcagcggcggcggcaccatgagctgcagcagggccggcggcatcaccggctgcatcaagtacagcaccgccagcgtggccttcagggacgtggccgtggacttcacccaggaggagtggaggctgctgagccccgcccagaggaccctgcacagggaggtgatgctggagacctacaaccacctggtgagcctggagatccccagcagcaagcccaagctgatcgcccagctggagaggggcgaggagccctggaggggcggcccaagcagcggcgcccctcctcccagcggcggcagcccagccggctccccaacctctaccgaggagggcacctctgagtccgccacccccgagagcggccctggcacctccaccgagcccagcgagggcagcgcacccggcagccctgccggcagccccacctccacagaggagggaaccagcaccgagcccagcgaaggcagcgccccaggcaccagcaccgagcctagtgagcaggagattaaacggatcaacaagatcagaagaagacttgtgaaagacagcaacaccaagaaggccggcaagacaggccccatgaaaaccctgctggttagagtgatgacacccgatctgagagagcggctggaaaacctgagaaagaagcctgaaaatatcccccagcccatcagcaatacatctagagccaacctgaataagctgctgaccgattacaccgaaatgaagaaggcgatcctgcatgtgtactgggaagagttccagaaggaccctgtgggcctgatgagccgggtggcccagcctgccagcaagaagatcgatcagaacaagctgaaacctgagatggacgagaagggcaacctgaccaccgccggctttgcctgctctcagtgtggccagcccctgttcgtgtacaagctggagcaggtgtctgagaagggcaaggcttacaccaactacttcggacggtgcaatgtggccgagcacgaaaagctgatcctgctggcccagctgaagcccgagaaggatagcgacgaagccgtgacatatagcctgggaaagtttgggcagagggccctggatttctacagcattcatgtgaccaaggagtccacccaccccgtgaagcccctggcccagatcgccggaaacagatacgcctccggacctgtgggaaaggccctgagcgacgcatgtatgggcacaatcgcctccttcctgtctaagtaccaggacatcatcatcgaacaccagaaggtggtgaagggcaaccagaagagactggagagcctgcgggagctggccggcaaggaaaacctggaataccctagcgtgaccctgccacctcagcctcacaccaaggagggcgttgatgcctacaacgaagtgatcgcccgggtgcgaatgtgggtgaacctgaacctgtggcagaagctgaagctaagcagagatgatgccaagcctctgctgagactgaagggattcccttcctttcctctggtcgagagacaggccaacgaagtggactggtgggacatggtgtgtaacgtgaagaagctgatcaacgagaaaaaggaggatggcaaggtgttttggcagaatctggctggctacaagagacaggaagccctgagaccatacctgagcagcgaggaagatcggaagaagggaaagaaattcgctcggtaccagctgggcgacctgctgctgcacctggaaaagaagcacggcgaggactggggaaaggtgtacgacgaggcctgggagcggattgacaagaaagtggaaggcctgagcaagcacatcaagctggaagaggaacggagaagcgaggacgcccagagcaaggccgccctgaccgactggctgcgggctaaggccagcttcgtgatcgagggcctgaaggaggccgacaaggacgagttctgcagatgcgagctgaagctgcagaagtggtacggggacctgcggggaaagcccttcgccatcgaagccgagaacagcatcctggacatcagcggcttcagcaagcagtacaactgtgccttcatctggcagaaggacggcgtgaagaagctgaacctgtacctgatcatcaactacttcaagggcggcaagctgcggttcaagaagatcaaacctgaagccttcgaagccaacagattctacaccgtgatcaacaaaaagagcggcgagatcgtgcccatggaggtgaacttcaacttcgacgaccccaacctgatcatcctgcctctggcctttggcaagagacagggcagagaattcatctggaacgacctgctgtccctggaaaccggcagcctgaagctggccaacggaagagtgatcgagaagacactgtacaacagaagaacccggcaggatgagcctgccctgttcgtggccctgaccttcgagcggcgggaggtcctggactcctccaatatcaaaccaatgaacctgatcggcgtggcaagaggcgaaaacatccccgccgtgatcgccctgaccgaccccgagggctgcccactgagccggtttaaggatagcctgggaaacccaacccacatcctgagaatcggcgagagctataaggagaagcagcggaccatccaggccaagaaggaggtggagcagcggagagccggcggctacagccggaagtacgccagcaaagccaagaatctggcagacgatatggtgagaaacaccgctagagatctgctgtactacgccgtgacccaggatgccatgctgatcttcgccaacctgagccggggcttcggccggcagggcaagcggaccttcatggccgagagacagtacacacggatggaggactggctgaccgccaagctggcctacgagggcctgagcaagacctacctgtccaagacactggcccagtacacctccaagacatgcagcaactgtgggtttaccatcaccagcgccgactacgacagggtgctggagaagctgaagaagacagcaacaggctggatgaccacaattaacggcaaggagctgaaggtggagggccagattacctactacaacagatacaagagacagaacgtagtcaaggacctgtccgtcgagctggatagactgagcgaagaatctgtgaacaacgacatctcctcctggacaaagggcagaagcggagaagctctgagcctcctgaagaaaagattctcccatagacccgtgcaggagaagttcgtgtgcctgaactgcggcttcgagacacacgcagccgagcaagccgccctgaacatcgccagatcctggctgttcctgcggagccaggagtacaagaaataccagacaaacaagacaaccggcaacaccgataagagagccttcgtcgagacctggcagtccttttaccggaagaagcttaaggaggtgtggaaacctgccgtgcggtctggcggatctggcggaggctccaccagccccaagaaaaagagaaaagtctaagctgccttctgcggggcttgccttctggccatgcccttcttctctcccttgcacctgtacctcttggtctttgaataaagcctgagtaggaaggctagcaaaaaaaaaaaaaaaaaaaaaaaaaaaaaaaaaaaaaaaaaaaaaaaaaaaaaaaaaaaaaaaaaaaaaaaaaaaaaaaa

SEQ ID NO: 13087 - RNA, 5785 nt, synthetic construct
  source 1..5785: mol_type = other RNA
aggaaataagagagaaaagaagagtaagaagaaatataagagccaccatggcccctaagaagaagcgtaaagtgagccggatggaacgcctcgtctacgaggtgcggcagaagtgcagaaacatcgaggacatctgcatctcctgcggatctctgaacgtgaccctggagcacccactgttcatcggcggcatgtgccagaactgtaaaaactgttttctggagtgtgcctatcaatacgacgatgacggctaccagagctactgcaccatctgttgcggcggaagagaggtgctgatgtgtggaaataacaactgctgccggtgcttctgcgtggaatgcgtggacctgctggtgggccccggcgccgcccaggccgctattaaggaagatccttggaactgctacatgtgcggccacaagggcacatacggcctgctgagacggagagaggactggcctagcagactgcagatgttcttcgccaataaccacgaccaggagttcgacccccctaaggtgtaccctcccgtccccgccgagaagagaaagcccatccgggtcctgagcctgttcgatggcatcgccaccggtctgctggtgctgaaggacctgggcatccaggtggataggtacattgcctccgaggtgtgcgaggactccatcaccgtgggaatggtgcgtcatcagggcaagatcatgtacgtgggcgacgtgcggagcgtgacacagaagcatatccaggagtggggccctttcgacctggtgatcggcggcagcccttgcaatgacctgagcatcgtgaacccagcccggaagggcctgtacgagggaaccggcagactgttcttcgagttttacagactgctgcacgacgcccggcctaaggaaggcgacgaccggcccttcttttggctgttcgagaatgtggtggccatgggagtcagcgacaagcgggatattagccggttcctggagagcaaccccgtgatgatcgatgccaaggaagtgagcgccgcccaccgggccagatacttctggggcaatctgcctggcatgaacagacccctggccagcaccgtgaacgacaagctggagctgcaggagtgcctggagcacggccggatcgccaagttcagcaaggtgagaaccatcaccacccgaagcaacagcatcaaacaaggcaaggaccagcactttcctgtgttcatgaacgagaaggaggacatcctgtggtgtaccgagatggagagagtgttcgggttcccagtccactacacagatgtcagcaacatgtctagactggccagacagagactgctgggaagaagctggtccgtccctgtgatcagacacctgttcgcccctctgaaggagtacttcgcctgcgtgagcagcggcaacagcaacgccaacagccggggccccagcttctctagcggcctggtgccactgtccctgagagggagccacatgggccccatggagatctacaaaaccgtgagcgcctggaagcggcagcctgtgcgcgtgctgagcctgtttcggaatatcgataaagtcctgaaaagcctgggattcctggagagcggctctggctccggcggtggcaccctgaagtacgtggaggatgtgacaaacgtggtcagacgggatgtggagaagtggggccccttcgatctggtgtacggcagcacccaacccctgggcagctcttgtgaccggtgccctggctggtacatgtttcagttccaccggatcctgcagtacgccctgccgagacaggagtcccagcggccattcttttggattttcatggacaacttgctgctgaccgaggatgaccaggaaactaccactcggttcctgcagaccgaagccgtgaccctgcaggacgtgagaggccgggactaccagaacgccatgcgggtgtggtccaacatccctggactgaaaagcaagcacgcacctctgacccctaaagaagaggagtacctgcaggcccaggtgcggagcagaagcaagctggacgcccctaaggtggatctgctggtgaagaattgcctcctgcccctgagagagtacttcaagtatttcagccagaatagtctgcccctgggaggcagcggcggcggcgacatgggcctggtgagcttcgaggacgtggccgtggacttcacctggcaggagtggcaggagctggacgccgcccagaggaccctgtacagggacgtgatgctggagaactacagcagcctggtgagcctgggcaactgcctggacaagcccgagctgatcagcaagctggagcagggcctggtgccctggagcggcgccgaggccaccgagcagtaccagcccgacgtgcacaagtggagcggcggcccaagcagcggcgcccctcctcccagcggcggcagcccagccggctccccaacctctaccgaggagggcacctctgagtccgccacccccgagagcggccctggcacctccaccgagcccagcgagggcagcgcacccggcagccctgccggcagccccacctccacagaggagggaaccagcaccgagcccagcgaaggcagcgccccaggcaccagcaccgagcctagtgagcaggagattaaacggatcaacaagatcagaagaagacttgtgaaagacagcaacaccaagaaggccggcaagacaggccccatgaaaaccctgctggttagagtgatgacacccgatctgagagagcggctggaaaacctgagaaagaagcctgaaaatatcccccagcccatcagcaatacatctagagccaacctgaataagctgctgaccgattacaccgaaatgaagaaggcgatcctgcatgtgtactgggaagagttccagaaggaccctgtgggcctgatgagccgggtggcccagcctgccagcaagaagatcgatcagaacaagctgaaacctgagatggacgagaagggcaacctgaccaccgccggctttgcctgctctcagtgtggccagcccctgttcgtgtacaagctggagcaggtgtctgagaagggcaaggcttacaccaactacttcggacggtgcaatgtggccgagcacgaaaagctgatcctgctggcccagctgaagcccgagaaggatagcgacgaagccgtgacatatagcctgggaaagtttgggcagagggccctggatttctacagcattcatgtgaccaaggagtccacccaccccgtgaagcccctggcccagatcgccggaaacagatacgcctccggacctgtgggaaaggccctgagcgacgcatgtatgggcacaatcgcctccttcctgtctaagtaccaggacatcatcatcgaacaccagaaggtggtgaagggcaaccagaagagactggagagcctgcgggagctggccggcaaggaaaacctggaataccctagcgtgaccctgccacctcagcctcacaccaaggagggcgttgatgcctacaacgaagtgatcgcccgggtgcgaatgtgggtgaacctgaacctgtggcagaagctgaagctaagcagagatgatgccaagcctctgctgagactgaagggattcccttcctttcctctggtcgagagacaggccaacgaagtggactggtgggacatggtgtgtaacgtgaagaagctgatcaacgagaaaaaggaggatggcaaggtgttttggcagaatctggctggctacaagagacaggaagccctgagaccatacctgagcagcgaggaagatcggaagaagggaaagaaattcgctcggtaccagctgggcgacctgctgctgcacctggaaaagaagcacggcgaggactggggaaaggtgtacgacgaggcctgggagcggattgacaagaaagtggaaggcctgagcaagcacatcaagctggaagaggaacggagaagcgaggacgcccagagcaaggccgccctgaccgactggctgcgggctaaggccagcttcgtgatcgagggcctgaaggaggccgacaaggacgagttctgcagatgcgagctgaagctgcagaagtggtacggggacctgcggggaaagcccttcgccatcgaagccgagaacagcatcctggacatcagcggcttcagcaagcagtacaactgtgccttcatctggcagaaggacggcgtgaagaagctgaacctgtacctgatcatcaactacttcaagggcggcaagctgcggttcaagaagatcaaacctgaagccttcgaagccaacagattctacaccgtgatcaacaaaaagagcggcgagatcgtgcccatggaggtgaacttcaacttcgacgaccccaacctgatcatcctgcctctggcctttggcaagagacagggcagagaattcatctggaacgacctgctgtccctggaaaccggcagcctgaagctggccaacggaagagtgatcgagaagacactgtacaacagaagaacccggcaggatgagcctgccctgttcgtggccctgaccttcgagcggcgggaggtcctggactcctccaatatcaaaccaatgaacctgatcggcgtggcaagaggcgaaaacatccccgccgtgatcgccctgaccgaccccgagggctgcccactgagccggtttaaggatagcctgggaaacccaacccacatcctgagaatcggcgagagctataaggagaagcagcggaccatccaggccaagaaggaggtggagcagcggagagccggcggctacagccggaagtacgccagcaaagccaagaatctggcagacgatatggtgagaaacaccgctagagatctgctgtactacgccgtgacccaggatgccatgctgatcttcgccaacctgagccggggcttcggccggcagggcaagcggaccttcatggccgagagacagtacacacggatggaggactggctgaccgccaagctggcctacgagggcctgagcaagacctacctgtccaagacactggcccagtacacctccaagacatgcagcaactgtgggtttaccatcaccagcgccgactacgacagggtgctggagaagctgaagaagacagcaacaggctggatgaccacaattaacggcaaggagctgaaggtggagggccagattacctactacaacagatacaagagacagaacgtagtcaaggacctgtccgtcgagctggatagactgagcgaagaatctgtgaacaacgacatctcctcctggacaaagggcagaagcggagaagctctgagcctcctgaagaaaagattctcccatagacccgtgcaggagaagttcgtgtgcctgaactgcggcttcgagacacacgcagccgagcaagccgccctgaacatcgccagatcctggctgttcctgcggagccaggagtacaagaaataccagacaaacaagacaaccggcaacaccgataagagagccttcgtcgagacctggcagtccttttaccggaagaagcttaaggaggtgtggaaacctgccgtgcggtctggcggatctggcggaggctccaccagccccaagaaaaagagaaaagtctaagctgccttctgcggggcttgccttctggccatgcccttcttctctcccttgcacctgtacctcttggtctttgaataaagcctgagtaggaaggctagcaaaaaaaaaaaaaaaaaaaaaaaaaaaaaaaaaaaaaaaaaaaaaaaaaaaaaaaaaaaaaaaaaaaaaaaaaaaaaaaa

SEQ ID NO: 13088 - RNA, 5785 nt, synthetic construct
  source 1..5785: mol_type = other RNA
aggaaataagagagaaaagaagagtaagaagaaatataagagccaccatggcccctaagaagaagcgtaaagtgagccggatggaacgcctcgtctacgaggtgcggcagaagtgcagaaacatcgaggacatctgcatctcctgcggatctctgaacgtgaccctggagcacccactgttcatcggcggcatgtgccagaactgtaaaaactgttttctggagtgtgcctatcaatacgacgatgacggctaccagagctactgcaccatctgttgcggcggaagagaggtgctgatgtgtggaaataacaactgctgccggtgcttctgcgtggaatgcgtggacctgctggtgggccccggcgccgcccaggccgctattaaggaagatccttggaactgctacatgtgcggccacaagggcacatacggcctgctgagacggagagaggactggcctagcagactgcagatgttcttcgccaataaccacgaccaggagttcgacccccctaaggtgtaccctcccgtccccgccgagaagagaaagcccatccgggtcctgagcctgttcgatggcatcgccaccggtctgctggtgctgaaggacctgggcatccaggtggataggtacattgcctccgaggtgtgcgaggactccatcaccgtgggaatggtgcgtcatcagggcaagatcatgtacgtgggcgacgtgcggagcgtgacacagaagcatatccaggagtggggccctttcgacctggtgatcggcggcagcccttgcaatgacctgagcatcgtgaacccagcccggaagggcctgtacgagggaaccggcagactgttcttcgagttttacagactgctgcacgacgcccggcctaaggaaggcgacgaccggcccttcttttggctgttcgagaatgtggtggccatgggagtcagcgacaagcgggatattagccggttcctggagagcaaccccgtgatgatcgatgccaaggaagtgagcgccgcccaccgggccagatacttctggggcaatctgcctggcatgaacagacccctggccagcaccgtgaacgacaagctggagctgcaggagtgcctggagcacggccggatcgccaagttcagcaaggtgagaaccatcaccacccgaagcaacagcatcaaacaaggcaaggaccagcactttcctgtgttcatgaacgagaaggaggacatcctgtggtgtaccgagatggagagagtgttcgggttcccagtccactacacagatgtcagcaacatgtctagactggccagacagagactgctgggaagaagctggtccgtccctgtgatcagacacctgttcgcccctctgaaggagtacttcgcctgcgtgagcagcggcaacagcaacgccaacagccggggccccagcttctctagcggcctggtgccactgtccctgagagggagccacatgggccccatggagatctacaaaaccgtgagcgcctggaagcggcagcctgtgcgcgtgctgagcctgtttcggaatatcgataaagtcctgaaaagcctgggattcctggagagcggctctggctccggcggtggcaccctgaagtacgtggaggatgtgacaaacgtggtcagacgggatgtggagaagtggggccccttcgatctggtgtacggcagcacccaacccctgggcagctcttgtgaccggtgccctggctggtacatgtttcagttccaccggatcctgcagtacgccctgccgagacaggagtcccagcggccattcttttggattttcatggacaacttgctgctgaccgaggatgaccaggaaactaccactcggttcctgcagaccgaagccgtgaccctgcaggacgtgagaggccgggactaccagaacgccatgcgggtgtggtccaacatccctggactgaaaagcaagcacgcacctctgacccctaaagaagaggagtacctgcaggcccaggtgcggagcagaagcaagctggacgcccctaaggtggatctgctggtgaagaattgcctcctgcccctgagagagtacttcaagtatttcagccagaatagtctgcccctgggaggcagcggcggcggcagccaggtgagcgtgaccttcgaggacgtggccgtgctgttcaccagggacgagtggaagaagctggaccacagccagaggagcctgtacagggaggtgatgctggagaactacagcaacctggccagcctgggcttccccttcgccaagcccgagatgatcagcgtgctgcagcagggcgaggagccctggaaggtggagaagaggagcctgggcttcagcctgggctgcaacagcagcctgggcggcccaagcagcggcgcccctcctcccagcggcggcagcccagccggctccccaacctctaccgaggagggcacctctgagtccgccacccccgagagcggccctggcacctccaccgagcccagcgagggcagcgcacccggcagccctgccggcagccccacctccacagaggagggaaccagcaccgagcccagcgaaggcagcgccccaggcaccagcaccgagcctagtgagcaggagattaaacggatcaacaagatcagaagaagacttgtgaaagacagcaacaccaagaaggccggcaagacaggccccatgaaaaccctgctggttagagtgatgacacccgatctgagagagcggctggaaaacctgagaaagaagcctgaaaatatcccccagcccatcagcaatacatctagagccaacctgaataagctgctgaccgattacaccgaaatgaagaaggcgatcctgcatgtgtactgggaagagttccagaaggaccctgtgggcctgatgagccgggtggcccagcctgccagcaagaagatcgatcagaacaagctgaaacctgagatggacgagaagggcaacctgaccaccgccggctttgcctgctctcagtgtggccagcccctgttcgtgtacaagctggagcaggtgtctgagaagggcaaggcttacaccaactacttcggacggtgcaatgtggccgagcacgaaaagctgatcctgctggcccagctgaagcccgagaaggatagcgacgaagccgtgacatatagcctgggaaagtttgggcagagggccctggatttctacagcattcatgtgaccaaggagtccacccaccccgtgaagcccctggcccagatcgccggaaacagatacgcctccggacctgtgggaaaggccctgagcgacgcatgtatgggcacaatcgcctccttcctgtctaagtaccaggacatcatcatcgaacaccagaaggtggtgaagggcaaccagaagagactggagagcctgcgggagctggccggcaaggaaaacctggaataccctagcgtgaccctgccacctcagcctcacaccaaggagggcgttgatgcctacaacgaagtgatcgcccgggtgcgaatgtgggtgaacctgaacctgtggcagaagctgaagctaagcagagatgatgccaagcctctgctgagactgaagggattcccttcctttcctctggtcgagagacaggccaacgaagtggactggtgggacatggtgtgtaacgtgaagaagctgatcaacgagaaaaaggaggatggcaaggtgttttggcagaatctggctggctacaagagacaggaagccctgagaccatacctgagcagcgaggaagatcggaagaagggaaagaaattcgctcggtaccagctgggcgacctgctgctgcacctggaaaagaagcacggcgaggactggggaaaggtgtacgacgaggcctgggagcggattgacaagaaagtggaaggcctgagcaagcacatcaagctggaagaggaacggagaagcgaggacgcccagagcaaggccgccctgaccgactggctgcgggctaaggccagcttcgtgatcgagggcctgaaggaggccgacaaggacgagttctgcagatgcgagctgaagctgcagaagtggtacggggacctgcggggaaagcccttcgccatcgaagccgagaacagcatcctggacatcagcggcttcagcaagcagtacaactgtgccttcatctggcagaaggacggcgtgaagaagctgaacctgtacctgatcatcaactacttcaagggcggcaagctgcggttcaagaagatcaaacctgaagccttcgaagccaacagattctacaccgtgatcaacaaaaagagcggcgagatcgtgcccatggaggtgaacttcaacttcgacgaccccaacctgatcatcctgcctctggcctttggcaagagacagggcagagaattcatctggaacgacctgctgtccctggaaaccggcagcctgaagctggccaacggaagagtgatcgagaagacactgtacaacagaagaacccggcaggatgagcctgccctgttcgtggccctgaccttcgagcggcgggaggtcctggactcctccaatatcaaaccaatgaacctgatcggcgtggcaagaggcgaaaacatccccgccgtgatcgccctgaccgaccccgagggctgcccactgagccggtttaaggatagcctgggaaacccaacccacatcctgagaatcggcgagagctataaggagaagcagcggaccatccaggccaagaaggaggtggagcagcggagagccggcggctacagccggaagtacgccagcaaagccaagaatctggcagacgatatggtgagaaacaccgctagagatctgctgtactacgccgtgacccaggatgccatgctgatcttcgccaacctgagccggggcttcggccggcagggcaagcggaccttcatggccgagagacagtacacacggatggaggactggctgaccgccaagctggcctacgagggcctgagcaagacctacctgtccaagacactggcccagtacacctccaagacatgcagcaactgtgggtttaccatcaccagcgccgactacgacagggtgctggagaagctgaagaagacagcaacaggctggatgaccacaattaacggcaaggagctgaaggtggagggccagattacctactacaacagatacaagagacagaacgtagtcaaggacctgtccgtcgagctggatagactgagcgaagaatctgtgaacaacgacatctcctcctggacaaagggcagaagcggagaagctctgagcctcctgaagaaaagattctcccatagacccgtgcaggagaagttcgtgtgcctgaactgcggcttcgagacacacgcagccgagcaagccgccctgaacatcgccagatcctggctgttcctgcggagccaggagtacaagaaataccagacaaacaagacaaccggcaacaccgataagagagccttcgtcgagacctggcagtccttttaccggaagaagcttaaggaggtgtggaaacctgccgtgcggtctggcggatctggcggaggctccaccagccccaagaaaaagagaaaagtctaagctgccttctgcggggcttgccttctggccatgcccttcttctctcccttgcacctgtacctcttggtctttgaataaagcctgagtaggaaggctagcaaaaaaaaaaaaaaaaaaaaaaaaaaaaaaaaaaaaaaaaaaaaaaaaaaaaaaaaaaaaaaaaaaaaaaaaaaaaaaaa

SEQ ID NO: 13089 - RNA, 5785 nt, synthetic construct
  source 1..5785: mol_type = other RNA
aggaaataagagagaaaagaagagtaagaagaaatataagagccaccatggcccctaagaagaagcgtaaagtgagccggatggaacgcctcgtctacgaggtgcggcagaagtgcagaaacatcgaggacatctgcatctcctgcggatctctgaacgtgaccctggagcacccactgttcatcggcggcatgtgccagaactgtaaaaactgttttctggagtgtgcctatcaatacgacgatgacggctaccagagctactgcaccatctgttgcggcggaagagaggtgctgatgtgtggaaataacaactgctgccggtgcttctgcgtggaatgcgtggacctgctggtgggccccggcgccgcccaggccgctattaaggaagatccttggaactgctacatgtgcggccacaagggcacatacggcctgctgagacggagagaggactggcctagcagactgcagatgttcttcgccaataaccacgaccaggagttcgacccccctaaggtgtaccctcccgtccccgccgagaagagaaagcccatccgggtcctgagcctgttcgatggcatcgccaccggtctgctggtgctgaaggacctgggcatccaggtggataggtacattgcctccgaggtgtgcgaggactccatcaccgtgggaatggtgcgtcatcagggcaagatcatgtacgtgggcgacgtgcggagcgtgacacagaagcatatccaggagtggggccctttcgacctggtgatcggcggcagcccttgcaatgacctgagcatcgtgaacccagcccggaagggcctgtacgagggaaccggcagactgttcttcgagttttacagactgctgcacgacgcccggcctaaggaaggcgacgaccggcccttcttttggctgttcgagaatgtggtggccatgggagtcagcgacaagcgggatattagccggttcctggagagcaaccccgtgatgatcgatgccaaggaagtgagcgccgcccaccgggccagatacttctggggcaatctgcctggcatgaacagacccctggccagcaccgtgaacgacaagctggagctgcaggagtgcctggagcacggccggatcgccaagttcagcaaggtgagaaccatcaccacccgaagcaacagcatcaaacaaggcaaggaccagcactttcctgtgttcatgaacgagaaggaggacatcctgtggtgtaccgagatggagagagtgttcgggttcccagtccactacacagatgtcagcaacatgtctagactggccagacagagactgctgggaagaagctggtccgtccctgtgatcagacacctgttcgcccctctgaaggagtacttcgcctgcgtgagcagcggcaacagcaacgccaacagccggggccccagcttctctagcggcctggtgccactgtccctgagagggagccacatgggccccatggagatctacaaaaccgtgagcgcctggaagcggcagcctgtgcgcgtgctgagcctgtttcggaatatcgataaagtcctgaaaagcctgggattcctggagagcggctctggctccggcggtggcaccctgaagtacgtggaggatgtgacaaacgtggtcagacgggatgtggagaagtggggccccttcgatctggtgtacggcagcacccaacccctgggcagctcttgtgaccggtgccctggctggtacatgtttcagttccaccggatcctgcagtacgccctgccgagacaggagtcccagcggccattcttttggattttcatggacaacttgctgctgaccgaggatgaccaggaaactaccactcggttcctgcagaccgaagccgtgaccctgcaggacgtgagaggccgggactaccagaacgccatgcgggtgtggtccaacatccctggactgaaaagcaagcacgcacctctgacccctaaagaagaggagtacctgcaggcccaggtgcggagcagaagcaagctggacgcccctaaggtggatctgctggtgaagaattgcctcctgcccctgagagagtacttcaagtatttcagccagaatagtctgcccctgggaggcagcggcggcggccaggaggaccccgtgaccttccaggacgtggccgtggtgttcacccaggagcagtggggctacctggaccccagccagaaggagctgtacagggacgtgatgctggagaactaccagaacctgctgtgcctgggcctggccgtgagcaagcccgaggtgatctgccagctggagcagggcgaggccccctggaggcccgagggcagggtgcccggcagcagccaccccgacggcgaggtgaggggcggcccaagcagcggcgcccctcctcccagcggcggcagcccagccggctccccaacctctaccgaggagggcacctctgagtccgccacccccgagagcggccctggcacctccaccgagcccagcgagggcagcgcacccggcagccctgccggcagccccacctccacagaggagggaaccagcaccgagcccagcgaaggcagcgccccaggcaccagcaccgagcctagtgagcaggagattaaacggatcaacaagatcagaagaagacttgtgaaagacagcaacaccaagaaggccggcaagacaggccccatgaaaaccctgctggttagagtgatgacacccgatctgagagagcggctggaaaacctgagaaagaagcctgaaaatatcccccagcccatcagcaatacatctagagccaacctgaataagctgctgaccgattacaccgaaatgaagaaggcgatcctgcatgtgtactgggaagagttccagaaggaccctgtgggcctgatgagccgggtggcccagcctgccagcaagaagatcgatcagaacaagctgaaacctgagatggacgagaagggcaacctgaccaccgccggctttgcctgctctcagtgtggccagcccctgttcgtgtacaagctggagcaggtgtctgagaagggcaaggcttacaccaactacttcggacggtgcaatgtggccgagcacgaaaagctgatcctgctggcccagctgaagcccgagaaggatagcgacgaagccgtgacatatagcctgggaaagtttgggcagagggccctggatttctacagcattcatgtgaccaaggagtccacccaccccgtgaagcccctggcccagatcgccggaaacagatacgcctccggacctgtgggaaaggccctgagcgacgcatgtatgggcacaatcgcctccttcctgtctaagtaccaggacatcatcatcgaacaccagaaggtggtgaagggcaaccagaagagactggagagcctgcgggagctggccggcaaggaaaacctggaataccctagcgtgaccctgccacctcagcctcacaccaaggagggcgttgatgcctacaacgaagtgatcgcccgggtgcgaatgtgggtgaacctgaacctgtggcagaagctgaagctaagcagagatgatgccaagcctctgctgagactgaagggattcccttcctttcctctggtcgagagacaggccaacgaagtggactggtgggacatggtgtgtaacgtgaagaagctgatcaacgagaaaaaggaggatggcaaggtgttttggcagaatctggctggctacaagagacaggaagccctgagaccatacctgagcagcgaggaagatcggaagaagggaaagaaattcgctcggtaccagctgggcgacctgctgctgcacctggaaaagaagcacggcgaggactggggaaaggtgtacgacgaggcctgggagcggattgacaagaaagtggaaggcctgagcaagcacatcaagctggaagaggaacggagaagcgaggacgcccagagcaaggccgccctgaccgactggctgcgggctaaggccagcttcgtgatcgagggcctgaaggaggccgacaaggacgagttctgcagatgcgagctgaagctgcagaagtggtacggggacctgcggggaaagcccttcgccatcgaagccgagaacagcatcctggacatcagcggcttcagcaagcagtacaactgtgccttcatctggcagaaggacggcgtgaagaagctgaacctgtacctgatcatcaactacttcaagggcggcaagctgcggttcaagaagatcaaacctgaagccttcgaagccaacagattctacaccgtgatcaacaaaaagagcggcgagatcgtgcccatggaggtgaacttcaacttcgacgaccccaacctgatcatcctgcctctggcctttggcaagagacagggcagagaattcatctggaacgacctgctgtccctggaaaccggcagcctgaagctggccaacggaagagtgatcgagaagacactgtacaacagaagaacccggcaggatgagcctgccctgttcgtggccctgaccttcgagcggcgggaggtcctggactcctccaatatcaaaccaatgaacctgatcggcgtggcaagaggcgaaaacatccccgccgtgatcgccctgaccgaccccgagggctgcccactgagccggtttaaggatagcctgggaaacccaacccacatcctgagaatcggcgagagctataaggagaagcagcggaccatccaggccaagaaggaggtggagcagcggagagccggcggctacagccggaagtacgccagcaaagccaagaatctggcagacgatatggtgagaaacaccgctagagatctgctgtactacgccgtgacccaggatgccatgctgatcttcgccaacctgagccggggcttcggccggcagggcaagcggaccttcatggccgagagacagtacacacggatggaggactggctgaccgccaagctggcctacgagggcctgagcaagacctacctgtccaagacactggcccagtacacctccaagacatgcagcaactgtgggtttaccatcaccagcgccgactacgacagggtgctggagaagctgaagaagacagcaacaggctggatgaccacaattaacggcaaggagctgaaggtggagggccagattacctactacaacagatacaagagacagaacgtagtcaaggacctgtccgtcgagctggatagactgagcgaagaatctgtgaacaacgacatctcctcctggacaaagggcagaagcggagaagctctgagcctcctgaagaaaagattctcccatagacccgtgcaggagaagttcgtgtgcctgaactgcggcttcgagacacacgcagccgagcaagccgccctgaacatcgccagatcctggctgttcctgcggagccaggagtacaagaaataccagacaaacaagacaaccggcaacaccgataagagagccttcgtcgagacctggcagtccttttaccggaagaagcttaaggaggtgtggaaacctgccgtgcggtctggcggatctggcggaggctccaccagccccaagaaaaagagaaaagtctaagctgccttctgcggggcttgccttctggccatgcccttcttctctcccttgcacctgtacctcttggtctttgaataaagcctgagtaggaaggctagcaaaaaaaaaaaaaaaaaaaaaaaaaaaaaaaaaaaaaaaaaaaaaaaaaaaaaaaaaaaaaaaaaaaaaaaaaaaaaaaa

SEQ ID NO: 13090 - RNA, 5785 nt, synthetic construct
  source 1..5785: mol_type = other RNA
aggaaataagagagaaaagaagagtaagaagaaatataagagccaccatggcccctaagaagaagcgtaaagtgagccggatggaacgcctcgtctacgaggtgcggcagaagtgcagaaacatcgaggacatctgcatctcctgcggatctctgaacgtgaccctggagcacccactgttcatcggcggcatgtgccagaactgtaaaaactgttttctggagtgtgcctatcaatacgacgatgacggctaccagagctactgcaccatctgttgcggcggaagagaggtgctgatgtgtggaaataacaactgctgccggtgcttctgcgtggaatgcgtggacctgctggtgggccccggcgccgcccaggccgctattaaggaagatccttggaactgctacatgtgcggccacaagggcacatacggcctgctgagacggagagaggactggcctagcagactgcagatgttcttcgccaataaccacgaccaggagttcgacccccctaaggtgtaccctcccgtccccgccgagaagagaaagcccatccgggtcctgagcctgttcgatggcatcgccaccggtctgctggtgctgaaggacctgggcatccaggtggataggtacattgcctccgaggtgtgcgaggactccatcaccgtgggaatggtgcgtcatcagggcaagatcatgtacgtgggcgacgtgcggagcgtgacacagaagcatatccaggagtggggccctttcgacctggtgatcggcggcagcccttgcaatgacctgagcatcgtgaacccagcccggaagggcctgtacgagggaaccggcagactgttcttcgagttttacagactgctgcacgacgcccggcctaaggaaggcgacgaccggcccttcttttggctgttcgagaatgtggtggccatgggagtcagcgacaagcgggatattagccggttcctggagagcaaccccgtgatgatcgatgccaaggaagtgagcgccgcccaccgggccagatacttctggggcaatctgcctggcatgaacagacccctggccagcaccgtgaacgacaagctggagctgcaggagtgcctggagcacggccggatcgccaagttcagcaaggtgagaaccatcaccacccgaagcaacagcatcaaacaaggcaaggaccagcactttcctgtgttcatgaacgagaaggaggacatcctgtggtgtaccgagatggagagagtgttcgggttcccagtccactacacagatgtcagcaacatgtctagactggccagacagagactgctgggaagaagctggtccgtccctgtgatcagacacctgttcgcccctctgaaggagtacttcgcctgcgtgagcagcggcaacagcaacgccaacagccggggccccagcttctctagcggcctggtgccactgtccctgagagggagccacatgggccccatggagatctacaaaaccgtgagcgcctggaagcggcagcctgtgcgcgtgctgagcctgtttcggaatatcgataaagtcctgaaaagcctgggattcctggagagcggctctggctccggcggtggcaccctgaagtacgtggaggatgtgacaaacgtggtcagacgggatgtggagaagtggggccccttcgatctggtgtacggcagcacccaacccctgggcagctcttgtgaccggtgccctggctggtacatgtttcagttccaccggatcctgcagtacgccctgccgagacaggagtcccagcggccattcttttggattttcatggacaacttgctgctgaccgaggatgaccaggaaactaccactcggttcctgcagaccgaagccgtgaccctgcaggacgtgagaggccgggactaccagaacgccatgcgggtgtggtccaacatccctggactgaaaagcaagcacgcacctctgacccctaaagaagaggagtacctgcaggcccaggtgcggagcagaagcaagctggacgcccctaaggtggatctgctggtgaagaattgcctcctgcccctgagagagtacttcaagtatttcagccagaatagtctgcccctgggaggcagcggcggcggcatggacgccctgaccttcgacgacgtgcacgtgcacttcaccagggaggagtggagcctgctggaccccagccagaagaggctgtacaaggacgtgatgctggagatctacaagaacctgaccgccatcggctacaagtggaaggaccacaacgtgggcgagcacagccagaacgacaggaggtacggcaggcacgagaggagccccgccggcgagaaccacaacgagtacacccagtgcgacggcggcccaagcagcggcgcccctcctcccagcggcggcagcccagccggctccccaacctctaccgaggagggcacctctgagtccgccacccccgagagcggccctggcacctccaccgagcccagcgagggcagcgcacccggcagccctgccggcagccccacctccacagaggagggaaccagcaccgagcccagcgaaggcagcgccccaggcaccagcaccgagcctagtgagcaggagattaaacggatcaacaagatcagaagaagacttgtgaaagacagcaacaccaagaaggccggcaagacaggccccatgaaaaccctgctggttagagtgatgacacccgatctgagagagcggctggaaaacctgagaaagaagcctgaaaatatcccccagcccatcagcaatacatctagagccaacctgaataagctgctgaccgattacaccgaaatgaagaaggcgatcctgcatgtgtactgggaagagttccagaaggaccctgtgggcctgatgagccgggtggcccagcctgccagcaagaagatcgatcagaacaagctgaaacctgagatggacgagaagggcaacctgaccaccgccggctttgcctgctctcagtgtggccagcccctgttcgtgtacaagctggagcaggtgtctgagaagggcaaggcttacaccaactacttcggacggtgcaatgtggccgagcacgaaaagctgatcctgctggcccagctgaagcccgagaaggatagcgacgaagccgtgacatatagcctgggaaagtttgggcagagggccctggatttctacagcattcatgtgaccaaggagtccacccaccccgtgaagcccctggcccagatcgccggaaacagatacgcctccggacctgtgggaaaggccctgagcgacgcatgtatgggcacaatcgcctccttcctgtctaagtaccaggacatcatcatcgaacaccagaaggtggtgaagggcaaccagaagagactggagagcctgcgggagctggccggcaaggaaaacctggaataccctagcgtgaccctgccacctcagcctcacaccaaggagggcgttgatgcctacaacgaagtgatcgcccgggtgcgaatgtgggtgaacctgaacctgtggcagaagctgaagctaagcagagatgatgccaagcctctgctgagactgaagggattcccttcctttcctctggtcgagagacaggccaacgaagtggactggtgggacatggtgtgtaacgtgaagaagctgatcaacgagaaaaaggaggatggcaaggtgttttggcagaatctggctggctacaagagacaggaagccctgagaccatacctgagcagcgaggaagatcggaagaagggaaagaaattcgctcggtaccagctgggcgacctgctgctgcacctggaaaagaagcacggcgaggactggggaaaggtgtacgacgaggcctgggagcggattgacaagaaagtggaaggcctgagcaagcacatcaagctggaagaggaacggagaagcgaggacgcccagagcaaggccgccctgaccgactggctgcgggctaaggccagcttcgtgatcgagggcctgaaggaggccgacaaggacgagttctgcagatgcgagctgaagctgcagaagtggtacggggacctgcggggaaagcccttcgccatcgaagccgagaacagcatcctggacatcagcggcttcagcaagcagtacaactgtgccttcatctggcagaaggacggcgtgaagaagctgaacctgtacctgatcatcaactacttcaagggcggcaagctgcggttcaagaagatcaaacctgaagccttcgaagccaacagattctacaccgtgatcaacaaaaagagcggcgagatcgtgcccatggaggtgaacttcaacttcgacgaccccaacctgatcatcctgcctctggcctttggcaagagacagggcagagaattcatctggaacgacctgctgtccctggaaaccggcagcctgaagctggccaacggaagagtgatcgagaagacactgtacaacagaagaacccggcaggatgagcctgccctgttcgtggccctgaccttcgagcggcgggaggtcctggactcctccaatatcaaaccaatgaacctgatcggcgtggcaagaggcgaaaacatccccgccgtgatcgccctgaccgaccccgagggctgcccactgagccggtttaaggatagcctgggaaacccaacccacatcctgagaatcggcgagagctataaggagaagcagcggaccatccaggccaagaaggaggtggagcagcggagagccggcggctacagccggaagtacgccagcaaagccaagaatctggcagacgatatggtgagaaacaccgctagagatctgctgtactacgccgtgacccaggatgccatgctgatcttcgccaacctgagccggggcttcggccggcagggcaagcggaccttcatggccgagagacagtacacacggatggaggactggctgaccgccaagctggcctacgagggcctgagcaagacctacctgtccaagacactggcccagtacacctccaagacatgcagcaactgtgggtttaccatcaccagcgccgactacgacagggtgctggagaagctgaagaagacagcaacaggctggatgaccacaattaacggcaaggagctgaaggtggagggccagattacctactacaacagatacaagagacagaacgtagtcaaggacctgtccgtcgagctggatagactgagcgaagaatctgtgaacaacgacatctcctcctggacaaagggcagaagcggagaagctctgagcctcctgaagaaaagattctcccatagacccgtgcaggagaagttcgtgtgcctgaactgcggcttcgagacacacgcagccgagcaagccgccctgaacatcgccagatcctggctgttcctgcggagccaggagtacaagaaataccagacaaacaagacaaccggcaacaccgataagagagccttcgtcgagacctggcagtccttttaccggaagaagcttaaggaggtgtggaaacctgccgtgcggtctggcggatctggcggaggctccaccagccccaagaaaaagagaaaagtctaagctgccttctgcggggcttgccttctggccatgcccttcttctctcccttgcacctgtacctcttggtctttgaataaagcctgagtaggaaggctagcaaaaaaaaaaaaaaaaaaaaaaaaaaaaaaaaaaaaaaaaaaaaaaaaaaaaaaaaaaaaaaaaaaaaaaaaaaaaaaaa

SEQ ID NO: 13091 - RNA, 5785 nt, synthetic construct
  source 1..5785: mol_type = other RNA
aggaaataagagagaaaagaagagtaagaagaaatataagagccaccatggcccctaagaagaagcgtaaagtgagccggatggaacgcctcgtctacgaggtgcggcagaagtgcagaaacatcgaggacatctgcatctcctgcggatctctgaacgtgaccctggagcacccactgttcatcggcggcatgtgccagaactgtaaaaactgttttctggagtgtgcctatcaatacgacgatgacggctaccagagctactgcaccatctgttgcggcggaagagaggtgctgatgtgtggaaataacaactgctgccggtgcttctgcgtggaatgcgtggacctgctggtgggccccggcgccgcccaggccgctattaaggaagatccttggaactgctacatgtgcggccacaagggcacatacggcctgctgagacggagagaggactggcctagcagactgcagatgttcttcgccaataaccacgaccaggagttcgacccccctaaggtgtaccctcccgtccccgccgagaagagaaagcccatccgggtcctgagcctgttcgatggcatcgccaccggtctgctggtgctgaaggacctgggcatccaggtggataggtacattgcctccgaggtgtgcgaggactccatcaccgtgggaatggtgcgtcatcagggcaagatcatgtacgtgggcgacgtgcggagcgtgacacagaagcatatccaggagtggggccctttcgacctggtgatcggcggcagcccttgcaatgacctgagcatcgtgaacccagcccggaagggcctgtacgagggaaccggcagactgttcttcgagttttacagactgctgcacgacgcccggcctaaggaaggcgacgaccggcccttcttttggctgttcgagaatgtggtggccatgggagtcagcgacaagcgggatattagccggttcctggagagcaaccccgtgatgatcgatgccaaggaagtgagcgccgcccaccgggccagatacttctggggcaatctgcctggcatgaacagacccctggccagcaccgtgaacgacaagctggagctgcaggagtgcctggagcacggccggatcgccaagttcagcaaggtgagaaccatcaccacccgaagcaacagcatcaaacaaggcaaggaccagcactttcctgtgttcatgaacgagaaggaggacatcctgtggtgtaccgagatggagagagtgttcgggttcccagtccactacacagatgtcagcaacatgtctagactggccagacagagactgctgggaagaagctggtccgtccctgtgatcagacacctgttcgcccctctgaaggagtacttcgcctgcgtgagcagcggcaacagcaacgccaacagccggggccccagcttctctagcggcctggtgccactgtccctgagagggagccacatgggccccatggagatctacaaaaccgtgagcgcctggaagcggcagcctgtgcgcgtgctgagcctgtttcggaatatcgataaagtcctgaaaagcctgggattcctggagagcggctctggctccggcggtggcaccctgaagtacgtggaggatgtgacaaacgtggtcagacgggatgtggagaagtggggccccttcgatctggtgtacggcagcacccaacccctgggcagctcttgtgaccggtgccctggctggtacatgtttcagttccaccggatcctgcagtacgccctgccgagacaggagtcccagcggccattcttttggattttcatggacaacttgctgctgaccgaggatgaccaggaaactaccactcggttcctgcagaccgaagccgtgaccctgcaggacgtgagaggccgggactaccagaacgccatgcgggtgtggtccaacatccctggactgaaaagcaagcacgcacctctgacccctaaagaagaggagtacctgcaggcccaggtgcggagcagaagcaagctggacgcccctaaggtggatctgctggtgaagaattgcctcctgcccctgagagagtacttcaagtatttcagccagaatagtctgcccctgggaggcagcggcggcggcagccaggagagcctgaccttcaaggacgtggccgtggacttcacccaggaggagtggggcaagctggacagcggccagaggtacctgtacagggacgtgatgctggagaactacaggaacctggtgagcctgggccaccagggcagcaagccctacgtgatcagccagctggagcagggccaggagccctggatcgtggagagggagatcagcaggggcaactgcaaggactggggcaccaggggcggcccaagcagcggcgcccctcctcccagcggcggcagcccagccggctccccaacctctaccgaggagggcacctctgagtccgccacccccgagagcggccctggcacctccaccgagcccagcgagggcagcgcacccggcagccctgccggcagccccacctccacagaggagggaaccagcaccgagcccagcgaaggcagcgccccaggcaccagcaccgagcctagtgagcaggagattaaacggatcaacaagatcagaagaagacttgtgaaagacagcaacaccaagaaggccggcaagacaggccccatgaaaaccctgctggttagagtgatgacacccgatctgagagagcggctggaaaacctgagaaagaagcctgaaaatatcccccagcccatcagcaatacatctagagccaacctgaataagctgctgaccgattacaccgaaatgaagaaggcgatcctgcatgtgtactgggaagagttccagaaggaccctgtgggcctgatgagccgggtggcccagcctgccagcaagaagatcgatcagaacaagctgaaacctgagatggacgagaagggcaacctgaccaccgccggctttgcctgctctcagtgtggccagcccctgttcgtgtacaagctggagcaggtgtctgagaagggcaaggcttacaccaactacttcggacggtgcaatgtggccgagcacgaaaagctgatcctgctggcccagctgaagcccgagaaggatagcgacgaagccgtgacatatagcctgggaaagtttgggcagagggccctggatttctacagcattcatgtgaccaaggagtccacccaccccgtgaagcccctggcccagatcgccggaaacagatacgcctccggacctgtgggaaaggccctgagcgacgcatgtatgggcacaatcgcctccttcctgtctaagtaccaggacatcatcatcgaacaccagaaggtggtgaagggcaaccagaagagactggagagcctgcgggagctggccggcaaggaaaacctggaataccctagcgtgaccctgccacctcagcctcacaccaaggagggcgttgatgcctacaacgaagtgatcgcccgggtgcgaatgtgggtgaacctgaacctgtggcagaagctgaagctaagcagagatgatgccaagcctctgctgagactgaagggattcccttcctttcctctggtcgagagacaggccaacgaagtggactggtgggacatggtgtgtaacgtgaagaagctgatcaacgagaaaaaggaggatggcaaggtgttttggcagaatctggctggctacaagagacaggaagccctgagaccatacctgagcagcgaggaagatcggaagaagggaaagaaattcgctcggtaccagctgggcgacctgctgctgcacctggaaaagaagcacggcgaggactggggaaaggtgtacgacgaggcctgggagcggattgacaagaaagtggaaggcctgagcaagcacatcaagctggaagaggaacggagaagcgaggacgcccagagcaaggccgccctgaccgactggctgcgggctaaggccagcttcgtgatcgagggcctgaaggaggccgacaaggacgagttctgcagatgcgagctgaagctgcagaagtggtacggggacctgcggggaaagcccttcgccatcgaagccgagaacagcatcctggacatcagcggcttcagcaagcagtacaactgtgccttcatctggcagaaggacggcgtgaagaagctgaacctgtacctgatcatcaactacttcaagggcggcaagctgcggttcaagaagatcaaacctgaagccttcgaagccaacagattctacaccgtgatcaacaaaaagagcggcgagatcgtgcccatggaggtgaacttcaacttcgacgaccccaacctgatcatcctgcctctggcctttggcaagagacagggcagagaattcatctggaacgacctgctgtccctggaaaccggcagcctgaagctggccaacggaagagtgatcgagaagacactgtacaacagaagaacccggcaggatgagcctgccctgttcgtggccctgaccttcgagcggcgggaggtcctggactcctccaatatcaaaccaatgaacctgatcggcgtggcaagaggcgaaaacatccccgccgtgatcgccctgaccgaccccgagggctgcccactgagccggtttaaggatagcctgggaaacccaacccacatcctgagaatcggcgagagctataaggagaagcagcggaccatccaggccaagaaggaggtggagcagcggagagccggcggctacagccggaagtacgccagcaaagccaagaatctggcagacgatatggtgagaaacaccgctagagatctgctgtactacgccgtgacccaggatgccatgctgatcttcgccaacctgagccggggcttcggccggcagggcaagcggaccttcatggccgagagacagtacacacggatggaggactggctgaccgccaagctggcctacgagggcctgagcaagacctacctgtccaagacactggcccagtacacctccaagacatgcagcaactgtgggtttaccatcaccagcgccgactacgacagggtgctggagaagctgaagaagacagcaacaggctggatgaccacaattaacggcaaggagctgaaggtggagggccagattacctactacaacagatacaagagacagaacgtagtcaaggacctgtccgtcgagctggatagactgagcgaagaatctgtgaacaacgacatctcctcctggacaaagggcagaagcggagaagctctgagcctcctgaagaaaagattctcccatagacccgtgcaggagaagttcgtgtgcctgaactgcggcttcgagacacacgcagccgagcaagccgccctgaacatcgccagatcctggctgttcctgcggagccaggagtacaagaaataccagacaaacaagacaaccggcaacaccgataagagagccttcgtcgagacctggcagtccttttaccggaagaagcttaaggaggtgtggaaacctgccgtgcggtctggcggatctggcggaggctccaccagccccaagaaaaagagaaaagtctaagctgccttctgcggggcttgccttctggccatgcccttcttctctcccttgcacctgtacctcttggtctttgaataaagcctgagtaggaaggctagcaaaaaaaaaaaaaaaaaaaaaaaaaaaaaaaaaaaaaaaaaaaaaaaaaaaaaaaaaaaaaaaaaaaaaaaaaaaaaaaa

SEQ ID NO: 13092 - RNA, 5785 nt, synthetic construct
  source 1..5785: mol_type = other RNA
aggaaataagagagaaaagaagagtaagaagaaatataagagccaccatggcccctaagaagaagcgtaaagtgagccggatggaacgcctcgtctacgaggtgcggcagaagtgcagaaacatcgaggacatctgcatctcctgcggatctctgaacgtgaccctggagcacccactgttcatcggcggcatgtgccagaactgtaaaaactgttttctggagtgtgcctatcaatacgacgatgacggctaccagagctactgcaccatctgttgcggcggaagagaggtgctgatgtgtggaaataacaactgctgccggtgcttctgcgtggaatgcgtggacctgctggtgggccccggcgccgcccaggccgctattaaggaagatccttggaactgctacatgtgcggccacaagggcacatacggcctgctgagacggagagaggactggcctagcagactgcagatgttcttcgccaataaccacgaccaggagttcgacccccctaaggtgtaccctcccgtccccgccgagaagagaaagcccatccgggtcctgagcctgttcgatggcatcgccaccggtctgctggtgctgaaggacctgggcatccaggtggataggtacattgcctccgaggtgtgcgaggactccatcaccgtgggaatggtgcgtcatcagggcaagatcatgtacgtgggcgacgtgcggagcgtgacacagaagcatatccaggagtggggccctttcgacctggtgatcggcggcagcccttgcaatgacctgagcatcgtgaacccagcccggaagggcctgtacgagggaaccggcagactgttcttcgagttttacagactgctgcacgacgcccggcctaaggaaggcgacgaccggcccttcttttggctgttcgagaatgtggtggccatgggagtcagcgacaagcgggatattagccggttcctggagagcaaccccgtgatgatcgatgccaaggaagtgagcgccgcccaccgggccagatacttctggggcaatctgcctggcatgaacagacccctggccagcaccgtgaacgacaagctggagctgcaggagtgcctggagcacggccggatcgccaagttcagcaaggtgagaaccatcaccacccgaagcaacagcatcaaacaaggcaaggaccagcactttcctgtgttcatgaacgagaaggaggacatcctgtggtgtaccgagatggagagagtgttcgggttcccagtccactacacagatgtcagcaacatgtctagactggccagacagagactgctgggaagaagctggtccgtccctgtgatcagacacctgttcgcccctctgaaggagtacttcgcctgcgtgagcagcggcaacagcaacgccaacagccggggccccagcttctctagcggcctggtgccactgtccctgagagggagccacatgggccccatggagatctacaaaaccgtgagcgcctggaagcggcagcctgtgcgcgtgctgagcctgtttcggaatatcgataaagtcctgaaaagcctgggattcctggagagcggctctggctccggcggtggcaccctgaagtacgtggaggatgtgacaaacgtggtcagacgggatgtggagaagtggggccccttcgatctggtgtacggcagcacccaacccctgggcagctcttgtgaccggtgccctggctggtacatgtttcagttccaccggatcctgcagtacgccctgccgagacaggagtcccagcggccattcttttggattttcatggacaacttgctgctgaccgaggatgaccaggaaactaccactcggttcctgcagaccgaagccgtgaccctgcaggacgtgagaggccgggactaccagaacgccatgcgggtgtggtccaacatccctggactgaaaagcaagcacgcacctctgacccctaaagaagaggagtacctgcaggcccaggtgcggagcagaagcaagctggacgcccctaaggtggatctgctggtgaagaattgcctcctgcccctgagagagtacttcaagtatttcagccagaatagtctgcccctgggaggcagcggcggcggcctgcagggcctgctgaccttcagggacgtggccatcgagttcagccaggacgagtggggctgcctgaaccagagccagagggagctgtacagggacgtgatgctggagacctacggccacctgctgttcctgggcctgatcgtgagcaagccccacctggtgatcttcctggagcagaagagggagctgtgggacgtgaagaggaagaagaccgtgaggacccagaagggcgagaacaccagcggcggcccaagcagcggcgcccctcctcccagcggcggcagcccagccggctccccaacctctaccgaggagggcacctctgagtccgccacccccgagagcggccctggcacctccaccgagcccagcgagggcagcgcacccggcagccctgccggcagccccacctccacagaggagggaaccagcaccgagcccagcgaaggcagcgccccaggcaccagcaccgagcctagtgagcaggagattaaacggatcaacaagatcagaagaagacttgtgaaagacagcaacaccaagaaggccggcaagacaggccccatgaaaaccctgctggttagagtgatgacacccgatctgagagagcggctggaaaacctgagaaagaagcctgaaaatatcccccagcccatcagcaatacatctagagccaacctgaataagctgctgaccgattacaccgaaatgaagaaggcgatcctgcatgtgtactgggaagagttccagaaggaccctgtgggcctgatgagccgggtggcccagcctgccagcaagaagatcgatcagaacaagctgaaacctgagatggacgagaagggcaacctgaccaccgccggctttgcctgctctcagtgtggccagcccctgttcgtgtacaagctggagcaggtgtctgagaagggcaaggcttacaccaactacttcggacggtgcaatgtggccgagcacgaaaagctgatcctgctggcccagctgaagcccgagaaggatagcgacgaagccgtgacatatagcctgggaaagtttgggcagagggccctggatttctacagcattcatgtgaccaaggagtccacccaccccgtgaagcccctggcccagatcgccggaaacagatacgcctccggacctgtgggaaaggccctgagcgacgcatgtatgggcacaatcgcctccttcctgtctaagtaccaggacatcatcatcgaacaccagaaggtggtgaagggcaaccagaagagactggagagcctgcgggagctggccggcaaggaaaacctggaataccctagcgtgaccctgccacctcagcctcacaccaaggagggcgttgatgcctacaacgaagtgatcgcccgggtgcgaatgtgggtgaacctgaacctgtggcagaagctgaagctaagcagagatgatgccaagcctctgctgagactgaagggattcccttcctttcctctggtcgagagacaggccaacgaagtggactggtgggacatggtgtgtaacgtgaagaagctgatcaacgagaaaaaggaggatggcaaggtgttttggcagaatctggctggctacaagagacaggaagccctgagaccatacctgagcagcgaggaagatcggaagaagggaaagaaattcgctcggtaccagctgggcgacctgctgctgcacctggaaaagaagcacggcgaggactggggaaaggtgtacgacgaggcctgggagcggattgacaagaaagtggaaggcctgagcaagcacatcaagctggaagaggaacggagaagcgaggacgcccagagcaaggccgccctgaccgactggctgcgggctaaggccagcttcgtgatcgagggcctgaaggaggccgacaaggacgagttctgcagatgcgagctgaagctgcagaagtggtacggggacctgcggggaaagcccttcgccatcgaagccgagaacagcatcctggacatcagcggcttcagcaagcagtacaactgtgccttcatctggcagaaggacggcgtgaagaagctgaacctgtacctgatcatcaactacttcaagggcggcaagctgcggttcaagaagatcaaacctgaagccttcgaagccaacagattctacaccgtgatcaacaaaaagagcggcgagatcgtgcccatggaggtgaacttcaacttcgacgaccccaacctgatcatcctgcctctggcctttggcaagagacagggcagagaattcatctggaacgacctgctgtccctggaaaccggcagcctgaagctggccaacggaagagtgatcgagaagacactgtacaacagaagaacccggcaggatgagcctgccctgttcgtggccctgaccttcgagcggcgggaggtcctggactcctccaatatcaaaccaatgaacctgatcggcgtggcaagaggcgaaaacatccccgccgtgatcgccctgaccgaccccgagggctgcccactgagccggtttaaggatagcctgggaaacccaacccacatcctgagaatcggcgagagctataaggagaagcagcggaccatccaggccaagaaggaggtggagcagcggagagccggcggctacagccggaagtacgccagcaaagccaagaatctggcagacgatatggtgagaaacaccgctagagatctgctgtactacgccgtgacccaggatgccatgctgatcttcgccaacctgagccggggcttcggccggcagggcaagcggaccttcatggccgagagacagtacacacggatggaggactggctgaccgccaagctggcctacgagggcctgagcaagacctacctgtccaagacactggcccagtacacctccaagacatgcagcaactgtgggtttaccatcaccagcgccgactacgacagggtgctggagaagctgaagaagacagcaacaggctggatgaccacaattaacggcaaggagctgaaggtggagggccagattacctactacaacagatacaagagacagaacgtagtcaaggacctgtccgtcgagctggatagactgagcgaagaatctgtgaacaacgacatctcctcctggacaaagggcagaagcggagaagctctgagcctcctgaagaaaagattctcccatagacccgtgcaggagaagttcgtgtgcctgaactgcggcttcgagacacacgcagccgagcaagccgccctgaacatcgccagatcctggctgttcctgcggagccaggagtacaagaaataccagacaaacaagacaaccggcaacaccgataagagagccttcgtcgagacctggcagtccttttaccggaagaagcttaaggaggtgtggaaacctgccgtgcggtctggcggatctggcggaggctccaccagccccaagaaaaagagaaaagtctaagctgccttctgcggggcttgccttctggccatgcccttcttctctcccttgcacctgtacctcttggtctttgaataaagcctgagtaggaaggctagcaaaaaaaaaaaaaaaaaaaaaaaaaaaaaaaaaaaaaaaaaaaaaaaaaaaaaaaaaaaaaaaaaaaaaaaaaaaaaaaa

SEQ ID NO: 13093 - RNA, 5785 nt, synthetic construct
  source 1..5785: mol_type = other RNA
aggaaataagagagaaaagaagagtaagaagaaatataagagccaccatggcccctaagaagaagcgtaaagtgagccggatggaacgcctcgtctacgaggtgcggcagaagtgcagaaacatcgaggacatctgcatctcctgcggatctctgaacgtgaccctggagcacccactgttcatcggcggcatgtgccagaactgtaaaaactgttttctggagtgtgcctatcaatacgacgatgacggctaccagagctactgcaccatctgttgcggcggaagagaggtgctgatgtgtggaaataacaactgctgccggtgcttctgcgtggaatgcgtggacctgctggtgggccccggcgccgcccaggccgctattaaggaagatccttggaactgctacatgtgcggccacaagggcacatacggcctgctgagacggagagaggactggcctagcagactgcagatgttcttcgccaataaccacgaccaggagttcgacccccctaaggtgtaccctcccgtccccgccgagaagagaaagcccatccgggtcctgagcctgttcgatggcatcgccaccggtctgctggtgctgaaggacctgggcatccaggtggataggtacattgcctccgaggtgtgcgaggactccatcaccgtgggaatggtgcgtcatcagggcaagatcatgtacgtgggcgacgtgcggagcgtgacacagaagcatatccaggagtggggccctttcgacctggtgatcggcggcagcccttgcaatgacctgagcatcgtgaacccagcccggaagggcctgtacgagggaaccggcagactgttcttcgagttttacagactgctgcacgacgcccggcctaaggaaggcgacgaccggcccttcttttggctgttcgagaatgtggtggccatgggagtcagcgacaagcgggatattagccggttcctggagagcaaccccgtgatgatcgatgccaaggaagtgagcgccgcccaccgggccagatacttctggggcaatctgcctggcatgaacagacccctggccagcaccgtgaacgacaagctggagctgcaggagtgcctggagcacggccggatcgccaagttcagcaaggtgagaaccatcaccacccgaagcaacagcatcaaacaaggcaaggaccagcactttcctgtgttcatgaacgagaaggaggacatcctgtggtgtaccgagatggagagagtgttcgggttcccagtccactacacagatgtcagcaacatgtctagactggccagacagagactgctgggaagaagctggtccgtccctgtgatcagacacctgttcgcccctctgaaggagtacttcgcctgcgtgagcagcggcaacagcaacgccaacagccggggccccagcttctctagcggcctggtgccactgtccctgagagggagccacatgggccccatggagatctacaaaaccgtgagcgcctggaagcggcagcctgtgcgcgtgctgagcctgtttcggaatatcgataaagtcctgaaaagcctgggattcctggagagcggctctggctccggcggtggcaccctgaagtacgtggaggatgtgacaaacgtggtcagacgggatgtggagaagtggggccccttcgatctggtgtacggcagcacccaacccctgggcagctcttgtgaccggtgccctggctggtacatgtttcagttccaccggatcctgcagtacgccctgccgagacaggagtcccagcggccattcttttggattttcatggacaacttgctgctgaccgaggatgaccaggaaactaccactcggttcctgcagaccgaagccgtgaccctgcaggacgtgagaggccgggactaccagaacgccatgcgggtgtggtccaacatccctggactgaaaagcaagcacgcacctctgacccctaaagaagaggagtacctgcaggcccaggtgcggagcagaagcaagctggacgcccctaaggtggatctgctggtgaagaattgcctcctgcccctgagagagtacttcaagtatttcagccagaatagtctgcccctgggaggcagcggcggcggcgccctggagagcgtgaccttccaggacgtggccgtgaacttcacccacgaggagtggggccacctgaagcccgcccagaaggacctgtacagggaggtgatgatggagaactaccagaacttcgtgagcctgggcctgcccttcagcaagccccacgtgatcagccagctggagaagggcgaggccccctggatcaccgagaaggccagcctggtgcccagggtgagctgccaggacttcttcggcggcccaagcagcggcgcccctcctcccagcggcggcagcccagccggctccccaacctctaccgaggagggcacctctgagtccgccacccccgagagcggccctggcacctccaccgagcccagcgagggcagcgcacccggcagccctgccggcagccccacctccacagaggagggaaccagcaccgagcccagcgaaggcagcgccccaggcaccagcaccgagcctagtgagcaggagattaaacggatcaacaagatcagaagaagacttgtgaaagacagcaacaccaagaaggccggcaagacaggccccatgaaaaccctgctggttagagtgatgacacccgatctgagagagcggctggaaaacctgagaaagaagcctgaaaatatcccccagcccatcagcaatacatctagagccaacctgaataagctgctgaccgattacaccgaaatgaagaaggcgatcctgcatgtgtactgggaagagttccagaaggaccctgtgggcctgatgagccgggtggcccagcctgccagcaagaagatcgatcagaacaagctgaaacctgagatggacgagaagggcaacctgaccaccgccggctttgcctgctctcagtgtggccagcccctgttcgtgtacaagctggagcaggtgtctgagaagggcaaggcttacaccaactacttcggacggtgcaatgtggccgagcacgaaaagctgatcctgctggcccagctgaagcccgagaaggatagcgacgaagccgtgacatatagcctgggaaagtttgggcagagggccctggatttctacagcattcatgtgaccaaggagtccacccaccccgtgaagcccctggcccagatcgccggaaacagatacgcctccggacctgtgggaaaggccctgagcgacgcatgtatgggcacaatcgcctccttcctgtctaagtaccaggacatcatcatcgaacaccagaaggtggtgaagggcaaccagaagagactggagagcctgcgggagctggccggcaaggaaaacctggaataccctagcgtgaccctgccacctcagcctcacaccaaggagggcgttgatgcctacaacgaagtgatcgcccgggtgcgaatgtgggtgaacctgaacctgtggcagaagctgaagctaagcagagatgatgccaagcctctgctgagactgaagggattcccttcctttcctctggtcgagagacaggccaacgaagtggactggtgggacatggtgtgtaacgtgaagaagctgatcaacgagaaaaaggaggatggcaaggtgttttggcagaatctggctggctacaagagacaggaagccctgagaccatacctgagcagcgaggaagatcggaagaagggaaagaaattcgctcggtaccagctgggcgacctgctgctgcacctggaaaagaagcacggcgaggactggggaaaggtgtacgacgaggcctgggagcggattgacaagaaagtggaaggcctgagcaagcacatcaagctggaagaggaacggagaagcgaggacgcccagagcaaggccgccctgaccgactggctgcgggctaaggccagcttcgtgatcgagggcctgaaggaggccgacaaggacgagttctgcagatgcgagctgaagctgcagaagtggtacggggacctgcggggaaagcccttcgccatcgaagccgagaacagcatcctggacatcagcggcttcagcaagcagtacaactgtgccttcatctggcagaaggacggcgtgaagaagctgaacctgtacctgatcatcaactacttcaagggcggcaagctgcggttcaagaagatcaaacctgaagccttcgaagccaacagattctacaccgtgatcaacaaaaagagcggcgagatcgtgcccatggaggtgaacttcaacttcgacgaccccaacctgatcatcctgcctctggcctttggcaagagacagggcagagaattcatctggaacgacctgctgtccctggaaaccggcagcctgaagctggccaacggaagagtgatcgagaagacactgtacaacagaagaacccggcaggatgagcctgccctgttcgtggccctgaccttcgagcggcgggaggtcctggactcctccaatatcaaaccaatgaacctgatcggcgtggcaagaggcgaaaacatccccgccgtgatcgccctgaccgaccccgagggctgcccactgagccggtttaaggatagcctgggaaacccaacccacatcctgagaatcggcgagagctataaggagaagcagcggaccatccaggccaagaaggaggtggagcagcggagagccggcggctacagccggaagtacgccagcaaagccaagaatctggcagacgatatggtgagaaacaccgctagagatctgctgtactacgccgtgacccaggatgccatgctgatcttcgccaacctgagccggggcttcggccggcagggcaagcggaccttcatggccgagagacagtacacacggatggaggactggctgaccgccaagctggcctacgagggcctgagcaagacctacctgtccaagacactggcccagtacacctccaagacatgcagcaactgtgggtttaccatcaccagcgccgactacgacagggtgctggagaagctgaagaagacagcaacaggctggatgaccacaattaacggcaaggagctgaaggtggagggccagattacctactacaacagatacaagagacagaacgtagtcaaggacctgtccgtcgagctggatagactgagcgaagaatctgtgaacaacgacatctcctcctggacaaagggcagaagcggagaagctctgagcctcctgaagaaaagattctcccatagacccgtgcaggagaagttcgtgtgcctgaactgcggcttcgagacacacgcagccgagcaagccgccctgaacatcgccagatcctggctgttcctgcggagccaggagtacaagaaataccagacaaacaagacaaccggcaacaccgataagagagccttcgtcgagacctggcagtccttttaccggaagaagcttaaggaggtgtggaaacctgccgtgcggtctggcggatctggcggaggctccaccagccccaagaaaaagagaaaagtctaagctgccttctgcggggcttgccttctggccatgcccttcttctctcccttgcacctgtacctcttggtctttgaataaagcctgagtaggaaggctagcaaaaaaaaaaaaaaaaaaaaaaaaaaaaaaaaaaaaaaaaaaaaaaaaaaaaaaaaaaaaaaaaaaaaaaaaaaaaaaaa

SEQ ID NO: 13094 - RNA, 5785 nt, synthetic construct
  source 1..5785: mol_type = other RNA
aggaaataagagagaaaagaagagtaagaagaaatataagagccaccatggcccctaagaagaagcgtaaagtgagccggatggaacgcctcgtctacgaggtgcggcagaagtgcagaaacatcgaggacatctgcatctcctgcggatctctgaacgtgaccctggagcacccactgttcatcggcggcatgtgccagaactgtaaaaactgttttctggagtgtgcctatcaatacgacgatgacggctaccagagctactgcaccatctgttgcggcggaagagaggtgctgatgtgtggaaataacaactgctgccggtgcttctgcgtggaatgcgtggacctgctggtgggccccggcgccgcccaggccgctattaaggaagatccttggaactgctacatgtgcggccacaagggcacatacggcctgctgagacggagagaggactggcctagcagactgcagatgttcttcgccaataaccacgaccaggagttcgacccccctaaggtgtaccctcccgtccccgccgagaagagaaagcccatccgggtcctgagcctgttcgatggcatcgccaccggtctgctggtgctgaaggacctgggcatccaggtggataggtacattgcctccgaggtgtgcgaggactccatcaccgtgggaatggtgcgtcatcagggcaagatcatgtacgtgggcgacgtgcggagcgtgacacagaagcatatccaggagtggggccctttcgacctggtgatcggcggcagcccttgcaatgacctgagcatcgtgaacccagcccggaagggcctgtacgagggaaccggcagactgttcttcgagttttacagactgctgcacgacgcccggcctaaggaaggcgacgaccggcccttcttttggctgttcgagaatgtggtggccatgggagtcagcgacaagcgggatattagccggttcctggagagcaaccccgtgatgatcgatgccaaggaagtgagcgccgcccaccgggccagatacttctggggcaatctgcctggcatgaacagacccctggccagcaccgtgaacgacaagctggagctgcaggagtgcctggagcacggccggatcgccaagttcagcaaggtgagaaccatcaccacccgaagcaacagcatcaaacaaggcaaggaccagcactttcctgtgttcatgaacgagaaggaggacatcctgtggtgtaccgagatggagagagtgttcgggttcccagtccactacacagatgtcagcaacatgtctagactggccagacagagactgctgggaagaagctggtccgtccctgtgatcagacacctgttcgcccctctgaaggagtacttcgcctgcgtgagcagcggcaacagcaacgccaacagccggggccccagcttctctagcggcctggtgccactgtccctgagagggagccacatgggccccatggagatctacaaaaccgtgagcgcctggaagcggcagcctgtgcgcgtgctgagcctgtttcggaatatcgataaagtcctgaaaagcctgggattcctggagagcggctctggctccggcggtggcaccctgaagtacgtggaggatgtgacaaacgtggtcagacgggatgtggagaagtggggccccttcgatctggtgtacggcagcacccaacccctgggcagctcttgtgaccggtgccctggctggtacatgtttcagttccaccggatcctgcagtacgccctgccgagacaggagtcccagcggccattcttttggattttcatggacaacttgctgctgaccgaggatgaccaggaaactaccactcggttcctgcagaccgaagccgtgaccctgcaggacgtgagaggccgggactaccagaacgccatgcgggtgtggtccaacatccctggactgaaaagcaagcacgcacctctgacccctaaagaagaggagtacctgcaggcccaggtgcggagcagaagcaagctggacgcccctaaggtggatctgctggtgaagaattgcctcctgcccctgagagagtacttcaagtatttcagccagaatagtctgcccctgggaggcagcggcggcggcaggaccggccccctgaccttcggcgacgtggccgtggagttcagcggcgaggagtgggcctggctggacagcgcccagaggagcctgcacaggagcgtgatgctggagaactacaggaacctggccagcctgggcctgtgcatgagcaagcccgagatgatcagcagcctggagcagagcaaggagccctgggccgtgaaggccaagagcaccaggggcaggtgccccgacctgaacctgtgcggcggcccaagcagcggcgcccctcctcccagcggcggcagcccagccggctccccaacctctaccgaggagggcacctctgagtccgccacccccgagagcggccctggcacctccaccgagcccagcgagggcagcgcacccggcagccctgccggcagccccacctccacagaggagggaaccagcaccgagcccagcgaaggcagcgccccaggcaccagcaccgagcctagtgagcaggagattaaacggatcaacaagatcagaagaagacttgtgaaagacagcaacaccaagaaggccggcaagacaggccccatgaaaaccctgctggttagagtgatgacacccgatctgagagagcggctggaaaacctgagaaagaagcctgaaaatatcccccagcccatcagcaatacatctagagccaacctgaataagctgctgaccgattacaccgaaatgaagaaggcgatcctgcatgtgtactgggaagagttccagaaggaccctgtgggcctgatgagccgggtggcccagcctgccagcaagaagatcgatcagaacaagctgaaacctgagatggacgagaagggcaacctgaccaccgccggctttgcctgctctcagtgtggccagcccctgttcgtgtacaagctggagcaggtgtctgagaagggcaaggcttacaccaactacttcggacggtgcaatgtggccgagcacgaaaagctgatcctgctggcccagctgaagcccgagaaggatagcgacgaagccgtgacatatagcctgggaaagtttgggcagagggccctggatttctacagcattcatgtgaccaaggagtccacccaccccgtgaagcccctggcccagatcgccggaaacagatacgcctccggacctgtgggaaaggccctgagcgacgcatgtatgggcacaatcgcctccttcctgtctaagtaccaggacatcatcatcgaacaccagaaggtggtgaagggcaaccagaagagactggagagcctgcgggagctggccggcaaggaaaacctggaataccctagcgtgaccctgccacctcagcctcacaccaaggagggcgttgatgcctacaacgaagtgatcgcccgggtgcgaatgtgggtgaacctgaacctgtggcagaagctgaagctaagcagagatgatgccaagcctctgctgagactgaagggattcccttcctttcctctggtcgagagacaggccaacgaagtggactggtgggacatggtgtgtaacgtgaagaagctgatcaacgagaaaaaggaggatggcaaggtgttttggcagaatctggctggctacaagagacaggaagccctgagaccatacctgagcagcgaggaagatcggaagaagggaaagaaattcgctcggtaccagctgggcgacctgctgctgcacctggaaaagaagcacggcgaggactggggaaaggtgtacgacgaggcctgggagcggattgacaagaaagtggaaggcctgagcaagcacatcaagctggaagaggaacggagaagcgaggacgcccagagcaaggccgccctgaccgactggctgcgggctaaggccagcttcgtgatcgagggcctgaaggaggccgacaaggacgagttctgcagatgcgagctgaagctgcagaagtggtacggggacctgcggggaaagcccttcgccatcgaagccgagaacagcatcctggacatcagcggcttcagcaagcagtacaactgtgccttcatctggcagaaggacggcgtgaagaagctgaacctgtacctgatcatcaactacttcaagggcggcaagctgcggttcaagaagatcaaacctgaagccttcgaagccaacagattctacaccgtgatcaacaaaaagagcggcgagatcgtgcccatggaggtgaacttcaacttcgacgaccccaacctgatcatcctgcctctggcctttggcaagagacagggcagagaattcatctggaacgacctgctgtccctggaaaccggcagcctgaagctggccaacggaagagtgatcgagaagacactgtacaacagaagaacccggcaggatgagcctgccctgttcgtggccctgaccttcgagcggcgggaggtcctggactcctccaatatcaaaccaatgaacctgatcggcgtggcaagaggcgaaaacatccccgccgtgatcgccctgaccgaccccgagggctgcccactgagccggtttaaggatagcctgggaaacccaacccacatcctgagaatcggcgagagctataaggagaagcagcggaccatccaggccaagaaggaggtggagcagcggagagccggcggctacagccggaagtacgccagcaaagccaagaatctggcagacgatatggtgagaaacaccgctagagatctgctgtactacgccgtgacccaggatgccatgctgatcttcgccaacctgagccggggcttcggccggcagggcaagcggaccttcatggccgagagacagtacacacggatggaggactggctgaccgccaagctggcctacgagggcctgagcaagacctacctgtccaagacactggcccagtacacctccaagacatgcagcaactgtgggtttaccatcaccagcgccgactacgacagggtgctggagaagctgaagaagacagcaacaggctggatgaccacaattaacggcaaggagctgaaggtggagggccagattacctactacaacagatacaagagacagaacgtagtcaaggacctgtccgtcgagctggatagactgagcgaagaatctgtgaacaacgacatctcctcctggacaaagggcagaagcggagaagctctgagcctcctgaagaaaagattctcccatagacccgtgcaggagaagttcgtgtgcctgaactgcggcttcgagacacacgcagccgagcaagccgccctgaacatcgccagatcctggctgttcctgcggagccaggagtacaagaaataccagacaaacaagacaaccggcaacaccgataagagagccttcgtcgagacctggcagtccttttaccggaagaagcttaaggaggtgtggaaacctgccgtgcggtctggcggatctggcggaggctccaccagccccaagaaaaagagaaaagtctaagctgccttctgcggggcttgccttctggccatgcccttcttctctcccttgcacctgtacctcttggtctttgaataaagcctgagtaggaaggctagcaaaaaaaaaaaaaaaaaaaaaaaaaaaaaaaaaaaaaaaaaaaaaaaaaaaaaaaaaaaaaaaaaaaaaaaaaaaaaaaa

SEQ ID NO: 13095 - RNA, 5785 nt, synthetic construct
  source 1..5785: mol_type = other RNA
aggaaataagagagaaaagaagagtaagaagaaatataagagccaccatggcccctaagaagaagcgtaaagtgagccggatggaacgcctcgtctacgaggtgcggcagaagtgcagaaacatcgaggacatctgcatctcctgcggatctctgaacgtgaccctggagcacccactgttcatcggcggcatgtgccagaactgtaaaaactgttttctggagtgtgcctatcaatacgacgatgacggctaccagagctactgcaccatctgttgcggcggaagagaggtgctgatgtgtggaaataacaactgctgccggtgcttctgcgtggaatgcgtggacctgctggtgggccccggcgccgcccaggccgctattaaggaagatccttggaactgctacatgtgcggccacaagggcacatacggcctgctgagacggagagaggactggcctagcagactgcagatgttcttcgccaataaccacgaccaggagttcgacccccctaaggtgtaccctcccgtccccgccgagaagagaaagcccatccgggtcctgagcctgttcgatggcatcgccaccggtctgctggtgctgaaggacctgggcatccaggtggataggtacattgcctccgaggtgtgcgaggactccatcaccgtgggaatggtgcgtcatcagggcaagatcatgtacgtgggcgacgtgcggagcgtgacacagaagcatatccaggagtggggccctttcgacctggtgatcggcggcagcccttgcaatgacctgagcatcgtgaacccagcccggaagggcctgtacgagggaaccggcagactgttcttcgagttttacagactgctgcacgacgcccggcctaaggaaggcgacgaccggcccttcttttggctgttcgagaatgtggtggccatgggagtcagcgacaagcgggatattagccggttcctggagagcaaccccgtgatgatcgatgccaaggaagtgagcgccgcccaccgggccagatacttctggggcaatctgcctggcatgaacagacccctggccagcaccgtgaacgacaagctggagctgcaggagtgcctggagcacggccggatcgccaagttcagcaaggtgagaaccatcaccacccgaagcaacagcatcaaacaaggcaaggaccagcactttcctgtgttcatgaacgagaaggaggacatcctgtggtgtaccgagatggagagagtgttcgggttcccagtccactacacagatgtcagcaacatgtctagactggccagacagagactgctgggaagaagctggtccgtccctgtgatcagacacctgttcgcccctctgaaggagtacttcgcctgcgtgagcagcggcaacagcaacgccaacagccggggccccagcttctctagcggcctggtgccactgtccctgagagggagccacatgggccccatggagatctacaaaaccgtgagcgcctggaagcggcagcctgtgcgcgtgctgagcctgtttcggaatatcgataaagtcctgaaaagcctgggattcctggagagcggctctggctccggcggtggcaccctgaagtacgtggaggatgtgacaaacgtggtcagacgggatgtggagaagtggggccccttcgatctggtgtacggcagcacccaacccctgggcagctcttgtgaccggtgccctggctggtacatgtttcagttccaccggatcctgcagtacgccctgccgagacaggagtcccagcggccattcttttggattttcatggacaacttgctgctgaccgaggatgaccaggaaactaccactcggttcctgcagaccgaagccgtgaccctgcaggacgtgagaggccgggactaccagaacgccatgcgggtgtggtccaacatccctggactgaaaagcaagcacgcacctctgacccctaaagaagaggagtacctgcaggcccaggtgcggagcagaagcaagctggacgcccctaaggtggatctgctggtgaagaattgcctcctgcccctgagagagtacttcaagtatttcagccagaatagtctgcccctgggaggcagcggcggcggcatgggccccctgcagttcaaggacgtggccatcgagttcagcctggaggagtggcactgcctggacaccgcccagaggaacctgtacagggacgtgatgctggagaactacaggaacctggtgttcctgggcatcgtggtgagcaagcccgacctgatcgccaggctggagcagggcaagaagcccctgaccatgaagaggcacgagatggtggccaaccccagcggccccggcgtggtggtgggcggcccaagcagcggcgcccctcctcccagcggcggcagcccagccggctccccaacctctaccgaggagggcacctctgagtccgccacccccgagagcggccctggcacctccaccgagcccagcgagggcagcgcacccggcagccctgccggcagccccacctccacagaggagggaaccagcaccgagcccagcgaaggcagcgccccaggcaccagcaccgagcctagtgagcaggagattaaacggatcaacaagatcagaagaagacttgtgaaagacagcaacaccaagaaggccggcaagacaggccccatgaaaaccctgctggttagagtgatgacacccgatctgagagagcggctggaaaacctgagaaagaagcctgaaaatatcccccagcccatcagcaatacatctagagccaacctgaataagctgctgaccgattacaccgaaatgaagaaggcgatcctgcatgtgtactgggaagagttccagaaggaccctgtgggcctgatgagccgggtggcccagcctgccagcaagaagatcgatcagaacaagctgaaacctgagatggacgagaagggcaacctgaccaccgccggctttgcctgctctcagtgtggccagcccctgttcgtgtacaagctggagcaggtgtctgagaagggcaaggcttacaccaactacttcggacggtgcaatgtggccgagcacgaaaagctgatcctgctggcccagctgaagcccgagaaggatagcgacgaagccgtgacatatagcctgggaaagtttgggcagagggccctggatttctacagcattcatgtgaccaaggagtccacccaccccgtgaagcccctggcccagatcgccggaaacagatacgcctccggacctgtgggaaaggccctgagcgacgcatgtatgggcacaatcgcctccttcctgtctaagtaccaggacatcatcatcgaacaccagaaggtggtgaagggcaaccagaagagactggagagcctgcgggagctggccggcaaggaaaacctggaataccctagcgtgaccctgccacctcagcctcacaccaaggagggcgttgatgcctacaacgaagtgatcgcccgggtgcgaatgtgggtgaacctgaacctgtggcagaagctgaagctaagcagagatgatgccaagcctctgctgagactgaagggattcccttcctttcctctggtcgagagacaggccaacgaagtggactggtgggacatggtgtgtaacgtgaagaagctgatcaacgagaaaaaggaggatggcaaggtgttttggcagaatctggctggctacaagagacaggaagccctgagaccatacctgagcagcgaggaagatcggaagaagggaaagaaattcgctcggtaccagctgggcgacctgctgctgcacctggaaaagaagcacggcgaggactggggaaaggtgtacgacgaggcctgggagcggattgacaagaaagtggaaggcctgagcaagcacatcaagctggaagaggaacggagaagcgaggacgcccagagcaaggccgccctgaccgactggctgcgggctaaggccagcttcgtgatcgagggcctgaaggaggccgacaaggacgagttctgcagatgcgagctgaagctgcagaagtggtacggggacctgcggggaaagcccttcgccatcgaagccgagaacagcatcctggacatcagcggcttcagcaagcagtacaactgtgccttcatctggcagaaggacggcgtgaagaagctgaacctgtacctgatcatcaactacttcaagggcggcaagctgcggttcaagaagatcaaacctgaagccttcgaagccaacagattctacaccgtgatcaacaaaaagagcggcgagatcgtgcccatggaggtgaacttcaacttcgacgaccccaacctgatcatcctgcctctggcctttggcaagagacagggcagagaattcatctggaacgacctgctgtccctggaaaccggcagcctgaagctggccaacggaagagtgatcgagaagacactgtacaacagaagaacccggcaggatgagcctgccctgttcgtggccctgaccttcgagcggcgggaggtcctggactcctccaatatcaaaccaatgaacctgatcggcgtggcaagaggcgaaaacatccccgccgtgatcgccctgaccgaccccgagggctgcccactgagccggtttaaggatagcctgggaaacccaacccacatcctgagaatcggcgagagctataaggagaagcagcggaccatccaggccaagaaggaggtggagcagcggagagccggcggctacagccggaagtacgccagcaaagccaagaatctggcagacgatatggtgagaaacaccgctagagatctgctgtactacgccgtgacccaggatgccatgctgatcttcgccaacctgagccggggcttcggccggcagggcaagcggaccttcatggccgagagacagtacacacggatggaggactggctgaccgccaagctggcctacgagggcctgagcaagacctacctgtccaagacactggcccagtacacctccaagacatgcagcaactgtgggtttaccatcaccagcgccgactacgacagggtgctggagaagctgaagaagacagcaacaggctggatgaccacaattaacggcaaggagctgaaggtggagggccagattacctactacaacagatacaagagacagaacgtagtcaaggacctgtccgtcgagctggatagactgagcgaagaatctgtgaacaacgacatctcctcctggacaaagggcagaagcggagaagctctgagcctcctgaagaaaagattctcccatagacccgtgcaggagaagttcgtgtgcctgaactgcggcttcgagacacacgcagccgagcaagccgccctgaacatcgccagatcctggctgttcctgcggagccaggagtacaagaaataccagacaaacaagacaaccggcaacaccgataagagagccttcgtcgagacctggcagtccttttaccggaagaagcttaaggaggtgtggaaacctgccgtgcggtctggcggatctggcggaggctccaccagccccaagaaaaagagaaaagtctaagctgccttctgcggggcttgccttctggccatgcccttcttctctcccttgcacctgtacctcttggtctttgaataaagcctgagtaggaaggctagcaaaaaaaaaaaaaaaaaaaaaaaaaaaaaaaaaaaaaaaaaaaaaaaaaaaaaaaaaaaaaaaaaaaaaaaaaaaaaaaa

SEQ ID NO: 13096 - RNA, 5785 nt, synthetic construct
  source 1..5785: mol_type = other RNA
aggaaataagagagaaaagaagagtaagaagaaatataagagccaccatggcccctaagaagaagcgtaaagtgagccggatggaacgcctcgtctacgaggtgcggcagaagtgcagaaacatcgaggacatctgcatctcctgcggatctctgaacgtgaccctggagcacccactgttcatcggcggcatgtgccagaactgtaaaaactgttttctggagtgtgcctatcaatacgacgatgacggctaccagagctactgcaccatctgttgcggcggaagagaggtgctgatgtgtggaaataacaactgctgccggtgcttctgcgtggaatgcgtggacctgctggtgggccccggcgccgcccaggccgctattaaggaagatccttggaactgctacatgtgcggccacaagggcacatacggcctgctgagacggagagaggactggcctagcagactgcagatgttcttcgccaataaccacgaccaggagttcgacccccctaaggtgtaccctcccgtccccgccgagaagagaaagcccatccgggtcctgagcctgttcgatggcatcgccaccggtctgctggtgctgaaggacctgggcatccaggtggataggtacattgcctccgaggtgtgcgaggactccatcaccgtgggaatggtgcgtcatcagggcaagatcatgtacgtgggcgacgtgcggagcgtgacacagaagcatatccaggagtggggccctttcgacctggtgatcggcggcagcccttgcaatgacctgagcatcgtgaacccagcccggaagggcctgtacgagggaaccggcagactgttcttcgagttttacagactgctgcacgacgcccggcctaaggaaggcgacgaccggcccttcttttggctgttcgagaatgtggtggccatgggagtcagcgacaagcgggatattagccggttcctggagagcaaccccgtgatgatcgatgccaaggaagtgagcgccgcccaccgggccagatacttctggggcaatctgcctggcatgaacagacccctggccagcaccgtgaacgacaagctggagctgcaggagtgcctggagcacggccggatcgccaagttcagcaaggtgagaaccatcaccacccgaagcaacagcatcaaacaaggcaaggaccagcactttcctgtgttcatgaacgagaaggaggacatcctgtggtgtaccgagatggagagagtgttcgggttcccagtccactacacagatgtcagcaacatgtctagactggccagacagagactgctgggaagaagctggtccgtccctgtgatcagacacctgttcgcccctctgaaggagtacttcgcctgcgtgagcagcggcaacagcaacgccaacagccggggccccagcttctctagcggcctggtgccactgtccctgagagggagccacatgggccccatggagatctacaaaaccgtgagcgcctggaagcggcagcctgtgcgcgtgctgagcctgtttcggaatatcgataaagtcctgaaaagcctgggattcctggagagcggctctggctccggcggtggcaccctgaagtacgtggaggatgtgacaaacgtggtcagacgggatgtggagaagtggggccccttcgatctggtgtacggcagcacccaacccctgggcagctcttgtgaccggtgccctggctggtacatgtttcagttccaccggatcctgcagtacgccctgccgagacaggagtcccagcggccattcttttggattttcatggacaacttgctgctgaccgaggatgaccaggaaactaccactcggttcctgcagaccgaagccgtgaccctgcaggacgtgagaggccgggactaccagaacgccatgcgggtgtggtccaacatccctggactgaaaagcaagcacgcacctctgacccctaaagaagaggagtacctgcaggcccaggtgcggagcagaagcaagctggacgcccctaaggtggatctgctggtgaagaattgcctcctgcccctgagagagtacttcaagtatttcagccagaatagtctgcccctgggaggcagcggcggcggcgcccacatgagcctgagcttcagggacgtggccatcgacctgagccaggaggagtgggagtgcctggaccccgtgcagagggccctgtacagggacgtgatgctggagaactacagcaacctggtgagcctgggctgcagcagccccaagcccgacgtgatcaccctgctggagcaggagagggagccctggaccgtgatgagggagggcaccaggagctggtacaccgacctggagagcaagggcggcccaagcagcggcgcccctcctcccagcggcggcagcccagccggctccccaacctctaccgaggagggcacctctgagtccgccacccccgagagcggccctggcacctccaccgagcccagcgagggcagcgcacccggcagccctgccggcagccccacctccacagaggagggaaccagcaccgagcccagcgaaggcagcgccccaggcaccagcaccgagcctagtgagcaggagattaaacggatcaacaagatcagaagaagacttgtgaaagacagcaacaccaagaaggccggcaagacaggccccatgaaaaccctgctggttagagtgatgacacccgatctgagagagcggctggaaaacctgagaaagaagcctgaaaatatcccccagcccatcagcaatacatctagagccaacctgaataagctgctgaccgattacaccgaaatgaagaaggcgatcctgcatgtgtactgggaagagttccagaaggaccctgtgggcctgatgagccgggtggcccagcctgccagcaagaagatcgatcagaacaagctgaaacctgagatggacgagaagggcaacctgaccaccgccggctttgcctgctctcagtgtggccagcccctgttcgtgtacaagctggagcaggtgtctgagaagggcaaggcttacaccaactacttcggacggtgcaatgtggccgagcacgaaaagctgatcctgctggcccagctgaagcccgagaaggatagcgacgaagccgtgacatatagcctgggaaagtttgggcagagggccctggatttctacagcattcatgtgaccaaggagtccacccaccccgtgaagcccctggcccagatcgccggaaacagatacgcctccggacctgtgggaaaggccctgagcgacgcatgtatgggcacaatcgcctccttcctgtctaagtaccaggacatcatcatcgaacaccagaaggtggtgaagggcaaccagaagagactggagagcctgcgggagctggccggcaaggaaaacctggaataccctagcgtgaccctgccacctcagcctcacaccaaggagggcgttgatgcctacaacgaagtgatcgcccgggtgcgaatgtgggtgaacctgaacctgtggcagaagctgaagctaagcagagatgatgccaagcctctgctgagactgaagggattcccttcctttcctctggtcgagagacaggccaacgaagtggactggtgggacatggtgtgtaacgtgaagaagctgatcaacgagaaaaaggaggatggcaaggtgttttggcagaatctggctggctacaagagacaggaagccctgagaccatacctgagcagcgaggaagatcggaagaagggaaagaaattcgctcggtaccagctgggcgacctgctgctgcacctggaaaagaagcacggcgaggactggggaaaggtgtacgacgaggcctgggagcggattgacaagaaagtggaaggcctgagcaagcacatcaagctggaagaggaacggagaagcgaggacgcccagagcaaggccgccctgaccgactggctgcgggctaaggccagcttcgtgatcgagggcctgaaggaggccgacaaggacgagttctgcagatgcgagctgaagctgcagaagtggtacggggacctgcggggaaagcccttcgccatcgaagccgagaacagcatcctggacatcagcggcttcagcaagcagtacaactgtgccttcatctggcagaaggacggcgtgaagaagctgaacctgtacctgatcatcaactacttcaagggcggcaagctgcggttcaagaagatcaaacctgaagccttcgaagccaacagattctacaccgtgatcaacaaaaagagcggcgagatcgtgcccatggaggtgaacttcaacttcgacgaccccaacctgatcatcctgcctctggcctttggcaagagacagggcagagaattcatctggaacgacctgctgtccctggaaaccggcagcctgaagctggccaacggaagagtgatcgagaagacactgtacaacagaagaacccggcaggatgagcctgccctgttcgtggccctgaccttcgagcggcgggaggtcctggactcctccaatatcaaaccaatgaacctgatcggcgtggcaagaggcgaaaacatccccgccgtgatcgccctgaccgaccccgagggctgcccactgagccggtttaaggatagcctgggaaacccaacccacatcctgagaatcggcgagagctataaggagaagcagcggaccatccaggccaagaaggaggtggagcagcggagagccggcggctacagccggaagtacgccagcaaagccaagaatctggcagacgatatggtgagaaacaccgctagagatctgctgtactacgccgtgacccaggatgccatgctgatcttcgccaacctgagccggggcttcggccggcagggcaagcggaccttcatggccgagagacagtacacacggatggaggactggctgaccgccaagctggcctacgagggcctgagcaagacctacctgtccaagacactggcccagtacacctccaagacatgcagcaactgtgggtttaccatcaccagcgccgactacgacagggtgctggagaagctgaagaagacagcaacaggctggatgaccacaattaacggcaaggagctgaaggtggagggccagattacctactacaacagatacaagagacagaacgtagtcaaggacctgtccgtcgagctggatagactgagcgaagaatctgtgaacaacgacatctcctcctggacaaagggcagaagcggagaagctctgagcctcctgaagaaaagattctcccatagacccgtgcaggagaagttcgtgtgcctgaactgcggcttcgagacacacgcagccgagcaagccgccctgaacatcgccagatcctggctgttcctgcggagccaggagtacaagaaataccagacaaacaagacaaccggcaacaccgataagagagccttcgtcgagacctggcagtccttttaccggaagaagcttaaggaggtgtggaaacctgccgtgcggtctggcggatctggcggaggctccaccagccccaagaaaaagagaaaagtctaagctgccttctgcggggcttgccttctggccatgcccttcttctctcccttgcacctgtacctcttggtctttgaataaagcctgagtaggaaggctagcaaaaaaaaaaaaaaaaaaaaaaaaaaaaaaaaaaaaaaaaaaaaaaaaaaaaaaaaaaaaaaaaaaaaaaaaaaaaaaaa

SEQ ID NO: 13097 - RNA, 5785 nt, synthetic construct
  source 1..5785: mol_type = other RNA
aggaaataagagagaaaagaagagtaagaagaaatataagagccaccatggcccctaagaagaagcgtaaagtgagccggatggaacgcctcgtctacgaggtgcggcagaagtgcagaaacatcgaggacatctgcatctcctgcggatctctgaacgtgaccctggagcacccactgttcatcggcggcatgtgccagaactgtaaaaactgttttctggagtgtgcctatcaatacgacgatgacggctaccagagctactgcaccatctgttgcggcggaagagaggtgctgatgtgtggaaataacaactgctgccggtgcttctgcgtggaatgcgtggacctgctggtgggccccggcgccgcccaggccgctattaaggaagatccttggaactgctacatgtgcggccacaagggcacatacggcctgctgagacggagagaggactggcctagcagactgcagatgttcttcgccaataaccacgaccaggagttcgacccccctaaggtgtaccctcccgtccccgccgagaagagaaagcccatccgggtcctgagcctgttcgatggcatcgccaccggtctgctggtgctgaaggacctgggcatccaggtggataggtacattgcctccgaggtgtgcgaggactccatcaccgtgggaatggtgcgtcatcagggcaagatcatgtacgtgggcgacgtgcggagcgtgacacagaagcatatccaggagtggggccctttcgacctggtgatcggcggcagcccttgcaatgacctgagcatcgtgaacccagcccggaagggcctgtacgagggaaccggcagactgttcttcgagttttacagactgctgcacgacgcccggcctaaggaaggcgacgaccggcccttcttttggctgttcgagaatgtggtggccatgggagtcagcgacaagcgggatattagccggttcctggagagcaaccccgtgatgatcgatgccaaggaagtgagcgccgcccaccgggccagatacttctggggcaatctgcctggcatgaacagacccctggccagcaccgtgaacgacaagctggagctgcaggagtgcctggagcacggccggatcgccaagttcagcaaggtgagaaccatcaccacccgaagcaacagcatcaaacaaggcaaggaccagcactttcctgtgttcatgaacgagaaggaggacatcctgtggtgtaccgagatggagagagtgttcgggttcccagtccactacacagatgtcagcaacatgtctagactggccagacagagactgctgggaagaagctggtccgtccctgtgatcagacacctgttcgcccctctgaaggagtacttcgcctgcgtgagcagcggcaacagcaacgccaacagccggggccccagcttctctagcggcctggtgccactgtccctgagagggagccacatgggccccatggagatctacaaaaccgtgagcgcctggaagcggcagcctgtgcgcgtgctgagcctgtttcggaatatcgataaagtcctgaaaagcctgggattcctggagagcggctctggctccggcggtggcaccctgaagtacgtggaggatgtgacaaacgtggtcagacgggatgtggagaagtggggccccttcgatctggtgtacggcagcacccaacccctgggcagctcttgtgaccggtgccctggctggtacatgtttcagttccaccggatcctgcagtacgccctgccgagacaggagtcccagcggccattcttttggattttcatggacaacttgctgctgaccgaggatgaccaggaaactaccactcggttcctgcagaccgaagccgtgaccctgcaggacgtgagaggccgggactaccagaacgccatgcgggtgtggtccaacatccctggactgaaaagcaagcacgcacctctgacccctaaagaagaggagtacctgcaggcccaggtgcggagcagaagcaagctggacgcccctaaggtggatctgctggtgaagaattgcctcctgcccctgagagagtacttcaagtatttcagccagaatagtctgcccctgggaggcagcggcggcggccaccaggaggtggtgaccttcgaggacgtggccgtgtacttcacccagaccgagtgggccggcctgagccccgcccagagggccctgtacaggagcgtgatgctggagatctacggcaacctgaccagcctgggctaccccgtgcccaagcccgccctggtgagcctgctggagaggggcgacctgccctggggcctggagaccagggacgacccccccgcccagggcaccaaggacatctgcggcggcccaagcagcggcgcccctcctcccagcggcggcagcccagccggctccccaacctctaccgaggagggcacctctgagtccgccacccccgagagcggccctggcacctccaccgagcccagcgagggcagcgcacccggcagccctgccggcagccccacctccacagaggagggaaccagcaccgagcccagcgaaggcagcgccccaggcaccagcaccgagcctagtgagcaggagattaaacggatcaacaagatcagaagaagacttgtgaaagacagcaacaccaagaaggccggcaagacaggccccatgaaaaccctgctggttagagtgatgacacccgatctgagagagcggctggaaaacctgagaaagaagcctgaaaatatcccccagcccatcagcaatacatctagagccaacctgaataagctgctgaccgattacaccgaaatgaagaaggcgatcctgcatgtgtactgggaagagttccagaaggaccctgtgggcctgatgagccgggtggcccagcctgccagcaagaagatcgatcagaacaagctgaaacctgagatggacgagaagggcaacctgaccaccgccggctttgcctgctctcagtgtggccagcccctgttcgtgtacaagctggagcaggtgtctgagaagggcaaggcttacaccaactacttcggacggtgcaatgtggccgagcacgaaaagctgatcctgctggcccagctgaagcccgagaaggatagcgacgaagccgtgacatatagcctgggaaagtttgggcagagggccctggatttctacagcattcatgtgaccaaggagtccacccaccccgtgaagcccctggcccagatcgccggaaacagatacgcctccggacctgtgggaaaggccctgagcgacgcatgtatgggcacaatcgcctccttcctgtctaagtaccaggacatcatcatcgaacaccagaaggtggtgaagggcaaccagaagagactggagagcctgcgggagctggccggcaaggaaaacctggaataccctagcgtgaccctgccacctcagcctcacaccaaggagggcgttgatgcctacaacgaagtgatcgcccgggtgcgaatgtgggtgaacctgaacctgtggcagaagctgaagctaagcagagatgatgccaagcctctgctgagactgaagggattcccttcctttcctctggtcgagagacaggccaacgaagtggactggtgggacatggtgtgtaacgtgaagaagctgatcaacgagaaaaaggaggatggcaaggtgttttggcagaatctggctggctacaagagacaggaagccctgagaccatacctgagcagcgaggaagatcggaagaagggaaagaaattcgctcggtaccagctgggcgacctgctgctgcacctggaaaagaagcacggcgaggactggggaaaggtgtacgacgaggcctgggagcggattgacaagaaagtggaaggcctgagcaagcacatcaagctggaagaggaacggagaagcgaggacgcccagagcaaggccgccctgaccgactggctgcgggctaaggccagcttcgtgatcgagggcctgaaggaggccgacaaggacgagttctgcagatgcgagctgaagctgcagaagtggtacggggacctgcggggaaagcccttcgccatcgaagccgagaacagcatcctggacatcagcggcttcagcaagcagtacaactgtgccttcatctggcagaaggacggcgtgaagaagctgaacctgtacctgatcatcaactacttcaagggcggcaagctgcggttcaagaagatcaaacctgaagccttcgaagccaacagattctacaccgtgatcaacaaaaagagcggcgagatcgtgcccatggaggtgaacttcaacttcgacgaccccaacctgatcatcctgcctctggcctttggcaagagacagggcagagaattcatctggaacgacctgctgtccctggaaaccggcagcctgaagctggccaacggaagagtgatcgagaagacactgtacaacagaagaacccggcaggatgagcctgccctgttcgtggccctgaccttcgagcggcgggaggtcctggactcctccaatatcaaaccaatgaacctgatcggcgtggcaagaggcgaaaacatccccgccgtgatcgccctgaccgaccccgagggctgcccactgagccggtttaaggatagcctgggaaacccaacccacatcctgagaatcggcgagagctataaggagaagcagcggaccatccaggccaagaaggaggtggagcagcggagagccggcggctacagccggaagtacgccagcaaagccaagaatctggcagacgatatggtgagaaacaccgctagagatctgctgtactacgccgtgacccaggatgccatgctgatcttcgccaacctgagccggggcttcggccggcagggcaagcggaccttcatggccgagagacagtacacacggatggaggactggctgaccgccaagctggcctacgagggcctgagcaagacctacctgtccaagacactggcccagtacacctccaagacatgcagcaactgtgggtttaccatcaccagcgccgactacgacagggtgctggagaagctgaagaagacagcaacaggctggatgaccacaattaacggcaaggagctgaaggtggagggccagattacctactacaacagatacaagagacagaacgtagtcaaggacctgtccgtcgagctggatagactgagcgaagaatctgtgaacaacgacatctcctcctggacaaagggcagaagcggagaagctctgagcctcctgaagaaaagattctcccatagacccgtgcaggagaagttcgtgtgcctgaactgcggcttcgagacacacgcagccgagcaagccgccctgaacatcgccagatcctggctgttcctgcggagccaggagtacaagaaataccagacaaacaagacaaccggcaacaccgataagagagccttcgtcgagacctggcagtccttttaccggaagaagcttaaggaggtgtggaaacctgccgtgcggtctggcggatctggcggaggctccaccagccccaagaaaaagagaaaagtctaagctgccttctgcggggcttgccttctggccatgcccttcttctctcccttgcacctgtacctcttggtctttgaataaagcctgagtaggaaggctagcaaaaaaaaaaaaaaaaaaaaaaaaaaaaaaaaaaaaaaaaaaaaaaaaaaaaaaaaaaaaaaaaaaaaaaaaaaaaaaaa

SEQ ID NO: 13098 - RNA, 5785 nt, synthetic construct
  source 1..5785: mol_type = other RNA
aggaaataagagagaaaagaagagtaagaagaaatataagagccaccatggcccctaagaagaagcgtaaagtgagccggatggaacgcctcgtctacgaggtgcggcagaagtgcagaaacatcgaggacatctgcatctcctgcggatctctgaacgtgaccctggagcacccactgttcatcggcggcatgtgccagaactgtaaaaactgttttctggagtgtgcctatcaatacgacgatgacggctaccagagctactgcaccatctgttgcggcggaagagaggtgctgatgtgtggaaataacaactgctgccggtgcttctgcgtggaatgcgtggacctgctggtgggccccggcgccgcccaggccgctattaaggaagatccttggaactgctacatgtgcggccacaagggcacatacggcctgctgagacggagagaggactggcctagcagactgcagatgttcttcgccaataaccacgaccaggagttcgacccccctaaggtgtaccctcccgtccccgccgagaagagaaagcccatccgggtcctgagcctgttcgatggcatcgccaccggtctgctggtgctgaaggacctgggcatccaggtggataggtacattgcctccgaggtgtgcgaggactccatcaccgtgggaatggtgcgtcatcagggcaagatcatgtacgtgggcgacgtgcggagcgtgacacagaagcatatccaggagtggggccctttcgacctggtgatcggcggcagcccttgcaatgacctgagcatcgtgaacccagcccggaagggcctgtacgagggaaccggcagactgttcttcgagttttacagactgctgcacgacgcccggcctaaggaaggcgacgaccggcccttcttttggctgttcgagaatgtggtggccatgggagtcagcgacaagcgggatattagccggttcctggagagcaaccccgtgatgatcgatgccaaggaagtgagcgccgcccaccgggccagatacttctggggcaatctgcctggcatgaacagacccctggccagcaccgtgaacgacaagctggagctgcaggagtgcctggagcacggccggatcgccaagttcagcaaggtgagaaccatcaccacccgaagcaacagcatcaaacaaggcaaggaccagcactttcctgtgttcatgaacgagaaggaggacatcctgtggtgtaccgagatggagagagtgttcgggttcccagtccactacacagatgtcagcaacatgtctagactggccagacagagactgctgggaagaagctggtccgtccctgtgatcagacacctgttcgcccctctgaaggagtacttcgcctgcgtgagcagcggcaacagcaacgccaacagccggggccccagcttctctagcggcctggtgccactgtccctgagagggagccacatgggccccatggagatctacaaaaccgtgagcgcctggaagcggcagcctgtgcgcgtgctgagcctgtttcggaatatcgataaagtcctgaaaagcctgggattcctggagagcggctctggctccggcggtggcaccctgaagtacgtggaggatgtgacaaacgtggtcagacgggatgtggagaagtggggccccttcgatctggtgtacggcagcacccaacccctgggcagctcttgtgaccggtgccctggctggtacatgtttcagttccaccggatcctgcagtacgccctgccgagacaggagtcccagcggccattcttttggattttcatggacaacttgctgctgaccgaggatgaccaggaaactaccactcggttcctgcagaccgaagccgtgaccctgcaggacgtgagaggccgggactaccagaacgccatgcgggtgtggtccaacatccctggactgaaaagcaagcacgcacctctgacccctaaagaagaggagtacctgcaggcccaggtgcggagcagaagcaagctggacgcccctaaggtggatctgctggtgaagaattgcctcctgcccctgagagagtacttcaagtatttcagccagaatagtctgcccctgggaggcagcggcggcggcgagcccggcgccgtgagcttcggcgacgtggccgtgtacttcagcagggaggagtggggctgcctgaggcccgcccagagggccctgtacagggacgtgatgagggagacctacagccacctgggcgccctgggcgtgggcggcagcaagcccgccctgatcagctggatggaggaggaggccgagctgtgggtgcccgccgcccaggaccccgaggtggccaagtgccccaccgaggccgacggcggcccaagcagcggcgcccctcctcccagcggcggcagcccagccggctccccaacctctaccgaggagggcacctctgagtccgccacccccgagagcggccctggcacctccaccgagcccagcgagggcagcgcacccggcagccctgccggcagccccacctccacagaggagggaaccagcaccgagcccagcgaaggcagcgccccaggcaccagcaccgagcctagtgagcaggagattaaacggatcaacaagatcagaagaagacttgtgaaagacagcaacaccaagaaggccggcaagacaggccccatgaaaaccctgctggttagagtgatgacacccgatctgagagagcggctggaaaacctgagaaagaagcctgaaaatatcccccagcccatcagcaatacatctagagccaacctgaataagctgctgaccgattacaccgaaatgaagaaggcgatcctgcatgtgtactgggaagagttccagaaggaccctgtgggcctgatgagccgggtggcccagcctgccagcaagaagatcgatcagaacaagctgaaacctgagatggacgagaagggcaacctgaccaccgccggctttgcctgctctcagtgtggccagcccctgttcgtgtacaagctggagcaggtgtctgagaagggcaaggcttacaccaactacttcggacggtgcaatgtggccgagcacgaaaagctgatcctgctggcccagctgaagcccgagaaggatagcgacgaagccgtgacatatagcctgggaaagtttgggcagagggccctggatttctacagcattcatgtgaccaaggagtccacccaccccgtgaagcccctggcccagatcgccggaaacagatacgcctccggacctgtgggaaaggccctgagcgacgcatgtatgggcacaatcgcctccttcctgtctaagtaccaggacatcatcatcgaacaccagaaggtggtgaagggcaaccagaagagactggagagcctgcgggagctggccggcaaggaaaacctggaataccctagcgtgaccctgccacctcagcctcacaccaaggagggcgttgatgcctacaacgaagtgatcgcccgggtgcgaatgtgggtgaacctgaacctgtggcagaagctgaagctaagcagagatgatgccaagcctctgctgagactgaagggattcccttcctttcctctggtcgagagacaggccaacgaagtggactggtgggacatggtgtgtaacgtgaagaagctgatcaacgagaaaaaggaggatggcaaggtgttttggcagaatctggctggctacaagagacaggaagccctgagaccatacctgagcagcgaggaagatcggaagaagggaaagaaattcgctcggtaccagctgggcgacctgctgctgcacctggaaaagaagcacggcgaggactggggaaaggtgtacgacgaggcctgggagcggattgacaagaaagtggaaggcctgagcaagcacatcaagctggaagaggaacggagaagcgaggacgcccagagcaaggccgccctgaccgactggctgcgggctaaggccagcttcgtgatcgagggcctgaaggaggccgacaaggacgagttctgcagatgcgagctgaagctgcagaagtggtacggggacctgcggggaaagcccttcgccatcgaagccgagaacagcatcctggacatcagcggcttcagcaagcagtacaactgtgccttcatctggcagaaggacggcgtgaagaagctgaacctgtacctgatcatcaactacttcaagggcggcaagctgcggttcaagaagatcaaacctgaagccttcgaagccaacagattctacaccgtgatcaacaaaaagagcggcgagatcgtgcccatggaggtgaacttcaacttcgacgaccccaacctgatcatcctgcctctggcctttggcaagagacagggcagagaattcatctggaacgacctgctgtccctggaaaccggcagcctgaagctggccaacggaagagtgatcgagaagacactgtacaacagaagaacccggcaggatgagcctgccctgttcgtggccctgaccttcgagcggcgggaggtcctggactcctccaatatcaaaccaatgaacctgatcggcgtggcaagaggcgaaaacatccccgccgtgatcgccctgaccgaccccgagggctgcccactgagccggtttaaggatagcctgggaaacccaacccacatcctgagaatcggcgagagctataaggagaagcagcggaccatccaggccaagaaggaggtggagcagcggagagccggcggctacagccggaagtacgccagcaaagccaagaatctggcagacgatatggtgagaaacaccgctagagatctgctgtactacgccgtgacccaggatgccatgctgatcttcgccaacctgagccggggcttcggccggcagggcaagcggaccttcatggccgagagacagtacacacggatggaggactggctgaccgccaagctggcctacgagggcctgagcaagacctacctgtccaagacactggcccagtacacctccaagacatgcagcaactgtgggtttaccatcaccagcgccgactacgacagggtgctggagaagctgaagaagacagcaacaggctggatgaccacaattaacggcaaggagctgaaggtggagggccagattacctactacaacagatacaagagacagaacgtagtcaaggacctgtccgtcgagctggatagactgagcgaagaatctgtgaacaacgacatctcctcctggacaaagggcagaagcggagaagctctgagcctcctgaagaaaagattctcccatagacccgtgcaggagaagttcgtgtgcctgaactgcggcttcgagacacacgcagccgagcaagccgccctgaacatcgccagatcctggctgttcctgcggagccaggagtacaagaaataccagacaaacaagacaaccggcaacaccgataagagagccttcgtcgagacctggcagtccttttaccggaagaagcttaaggaggtgtggaaacctgccgtgcggtctggcggatctggcggaggctccaccagccccaagaaaaagagaaaagtctaagctgccttctgcggggcttgccttctggccatgcccttcttctctcccttgcacctgtacctcttggtctttgaataaagcctgagtaggaaggctagcaaaaaaaaaaaaaaaaaaaaaaaaaaaaaaaaaaaaaaaaaaaaaaaaaaaaaaaaaaaaaaaaaaaaaaaaaaaaaaaa

SEQ ID NO: 13099 - RNA, 5785 nt, synthetic construct
  source 1..5785: mol_type = other RNA
aggaaataagagagaaaagaagagtaagaagaaatataagagccaccatggcccctaagaagaagcgtaaagtgagccggatggaacgcctcgtctacgaggtgcggcagaagtgcagaaacatcgaggacatctgcatctcctgcggatctctgaacgtgaccctggagcacccactgttcatcggcggcatgtgccagaactgtaaaaactgttttctggagtgtgcctatcaatacgacgatgacggctaccagagctactgcaccatctgttgcggcggaagagaggtgctgatgtgtggaaataacaactgctgccggtgcttctgcgtggaatgcgtggacctgctggtgggccccggcgccgcccaggccgctattaaggaagatccttggaactgctacatgtgcggccacaagggcacatacggcctgctgagacggagagaggactggcctagcagactgcagatgttcttcgccaataaccacgaccaggagttcgacccccctaaggtgtaccctcccgtccccgccgagaagagaaagcccatccgggtcctgagcctgttcgatggcatcgccaccggtctgctggtgctgaaggacctgggcatccaggtggataggtacattgcctccgaggtgtgcgaggactccatcaccgtgggaatggtgcgtcatcagggcaagatcatgtacgtgggcgacgtgcggagcgtgacacagaagcatatccaggagtggggccctttcgacctggtgatcggcggcagcccttgcaatgacctgagcatcgtgaacccagcccggaagggcctgtacgagggaaccggcagactgttcttcgagttttacagactgctgcacgacgcccggcctaaggaaggcgacgaccggcccttcttttggctgttcgagaatgtggtggccatgggagtcagcgacaagcgggatattagccggttcctggagagcaaccccgtgatgatcgatgccaaggaagtgagcgccgcccaccgggccagatacttctggggcaatctgcctggcatgaacagacccctggccagcaccgtgaacgacaagctggagctgcaggagtgcctggagcacggccggatcgccaagttcagcaaggtgagaaccatcaccacccgaagcaacagcatcaaacaaggcaaggaccagcactttcctgtgttcatgaacgagaaggaggacatcctgtggtgtaccgagatggagagagtgttcgggttcccagtccactacacagatgtcagcaacatgtctagactggccagacagagactgctgggaagaagctggtccgtccctgtgatcagacacctgttcgcccctctgaaggagtacttcgcctgcgtgagcagcggcaacagcaacgccaacagccggggccccagcttctctagcggcctggtgccactgtccctgagagggagccacatgggccccatggagatctacaaaaccgtgagcgcctggaagcggcagcctgtgcgcgtgctgagcctgtttcggaatatcgataaagtcctgaaaagcctgggattcctggagagcggctctggctccggcggtggcaccctgaagtacgtggaggatgtgacaaacgtggtcagacgggatgtggagaagtggggccccttcgatctggtgtacggcagcacccaacccctgggcagctcttgtgaccggtgccctggctggtacatgtttcagttccaccggatcctgcagtacgccctgccgagacaggagtcccagcggccattcttttggattttcatggacaacttgctgctgaccgaggatgaccaggaaactaccactcggttcctgcagaccgaagccgtgaccctgcaggacgtgagaggccgggactaccagaacgccatgcgggtgtggtccaacatccctggactgaaaagcaagcacgcacctctgacccctaaagaagaggagtacctgcaggcccaggtgcggagcagaagcaagctggacgcccctaaggtggatctgctggtgaagaattgcctcctgcccctgagagagtacttcaagtatttcagccagaatagtctgcccctgggaggcagcggcggcggcgcccagggccccgtgaccttcgaggaggtggccgtgtacttcaccagggaggagggcgccctgctggaccccacccagagggccctgtacagggacgtgatgcaggagaactacgagaccgtggtgctgctgggcttccccgtgagcaagcccgacgtgatcagccagctggagcagggcgaggagccctggatccccgacctgcagggcagcgagaaggaggtgctgcccagggccgcctgcggcggcccaagcagcggcgcccctcctcccagcggcggcagcccagccggctccccaacctctaccgaggagggcacctctgagtccgccacccccgagagcggccctggcacctccaccgagcccagcgagggcagcgcacccggcagccctgccggcagccccacctccacagaggagggaaccagcaccgagcccagcgaaggcagcgccccaggcaccagcaccgagcctagtgagcaggagattaaacggatcaacaagatcagaagaagacttgtgaaagacagcaacaccaagaaggccggcaagacaggccccatgaaaaccctgctggttagagtgatgacacccgatctgagagagcggctggaaaacctgagaaagaagcctgaaaatatcccccagcccatcagcaatacatctagagccaacctgaataagctgctgaccgattacaccgaaatgaagaaggcgatcctgcatgtgtactgggaagagttccagaaggaccctgtgggcctgatgagccgggtggcccagcctgccagcaagaagatcgatcagaacaagctgaaacctgagatggacgagaagggcaacctgaccaccgccggctttgcctgctctcagtgtggccagcccctgttcgtgtacaagctggagcaggtgtctgagaagggcaaggcttacaccaactacttcggacggtgcaatgtggccgagcacgaaaagctgatcctgctggcccagctgaagcccgagaaggatagcgacgaagccgtgacatatagcctgggaaagtttgggcagagggccctggatttctacagcattcatgtgaccaaggagtccacccaccccgtgaagcccctggcccagatcgccggaaacagatacgcctccggacctgtgggaaaggccctgagcgacgcatgtatgggcacaatcgcctccttcctgtctaagtaccaggacatcatcatcgaacaccagaaggtggtgaagggcaaccagaagagactggagagcctgcgggagctggccggcaaggaaaacctggaataccctagcgtgaccctgccacctcagcctcacaccaaggagggcgttgatgcctacaacgaagtgatcgcccgggtgcgaatgtgggtgaacctgaacctgtggcagaagctgaagctaagcagagatgatgccaagcctctgctgagactgaagggattcccttcctttcctctggtcgagagacaggccaacgaagtggactggtgggacatggtgtgtaacgtgaagaagctgatcaacgagaaaaaggaggatggcaaggtgttttggcagaatctggctggctacaagagacaggaagccctgagaccatacctgagcagcgaggaagatcggaagaagggaaagaaattcgctcggtaccagctgggcgacctgctgctgcacctggaaaagaagcacggcgaggactggggaaaggtgtacgacgaggcctgggagcggattgacaagaaagtggaaggcctgagcaagcacatcaagctggaagaggaacggagaagcgaggacgcccagagcaaggccgccctgaccgactggctgcgggctaaggccagcttcgtgatcgagggcctgaaggaggccgacaaggacgagttctgcagatgcgagctgaagctgcagaagtggtacggggacctgcggggaaagcccttcgccatcgaagccgagaacagcatcctggacatcagcggcttcagcaagcagtacaactgtgccttcatctggcagaaggacggcgtgaagaagctgaacctgtacctgatcatcaactacttcaagggcggcaagctgcggttcaagaagatcaaacctgaagccttcgaagccaacagattctacaccgtgatcaacaaaaagagcggcgagatcgtgcccatggaggtgaacttcaacttcgacgaccccaacctgatcatcctgcctctggcctttggcaagagacagggcagagaattcatctggaacgacctgctgtccctggaaaccggcagcctgaagctggccaacggaagagtgatcgagaagacactgtacaacagaagaacccggcaggatgagcctgccctgttcgtggccctgaccttcgagcggcgggaggtcctggactcctccaatatcaaaccaatgaacctgatcggcgtggcaagaggcgaaaacatccccgccgtgatcgccctgaccgaccccgagggctgcccactgagccggtttaaggatagcctgggaaacccaacccacatcctgagaatcggcgagagctataaggagaagcagcggaccatccaggccaagaaggaggtggagcagcggagagccggcggctacagccggaagtacgccagcaaagccaagaatctggcagacgatatggtgagaaacaccgctagagatctgctgtactacgccgtgacccaggatgccatgctgatcttcgccaacctgagccggggcttcggccggcagggcaagcggaccttcatggccgagagacagtacacacggatggaggactggctgaccgccaagctggcctacgagggcctgagcaagacctacctgtccaagacactggcccagtacacctccaagacatgcagcaactgtgggtttaccatcaccagcgccgactacgacagggtgctggagaagctgaagaagacagcaacaggctggatgaccacaattaacggcaaggagctgaaggtggagggccagattacctactacaacagatacaagagacagaacgtagtcaaggacctgtccgtcgagctggatagactgagcgaagaatctgtgaacaacgacatctcctcctggacaaagggcagaagcggagaagctctgagcctcctgaagaaaagattctcccatagacccgtgcaggagaagttcgtgtgcctgaactgcggcttcgagacacacgcagccgagcaagccgccctgaacatcgccagatcctggctgttcctgcggagccaggagtacaagaaataccagacaaacaagacaaccggcaacaccgataagagagccttcgtcgagacctggcagtccttttaccggaagaagcttaaggaggtgtggaaacctgccgtgcggtctggcggatctggcggaggctccaccagccccaagaaaaagagaaaagtctaagctgccttctgcggggcttgccttctggccatgcccttcttctctcccttgcacctgtacctcttggtctttgaataaagcctgagtaggaaggctagcaaaaaaaaaaaaaaaaaaaaaaaaaaaaaaaaaaaaaaaaaaaaaaaaaaaaaaaaaaaaaaaaaaaaaaaaaaaaaaaa

SEQ ID NO: 13100 - RNA, 5785 nt, synthetic construct
  source 1..5785: mol_type = other RNA
aggaaataagagagaaaagaagagtaagaagaaatataagagccaccatggcccctaagaagaagcgtaaagtgagccggatggaacgcctcgtctacgaggtgcggcagaagtgcagaaacatcgaggacatctgcatctcctgcggatctctgaacgtgaccctggagcacccactgttcatcggcggcatgtgccagaactgtaaaaactgttttctggagtgtgcctatcaatacgacgatgacggctaccagagctactgcaccatctgttgcggcggaagagaggtgctgatgtgtggaaataacaactgctgccggtgcttctgcgtggaatgcgtggacctgctggtgggccccggcgccgcccaggccgctattaaggaagatccttggaactgctacatgtgcggccacaagggcacatacggcctgctgagacggagagaggactggcctagcagactgcagatgttcttcgccaataaccacgaccaggagttcgacccccctaaggtgtaccctcccgtccccgccgagaagagaaagcccatccgggtcctgagcctgttcgatggcatcgccaccggtctgctggtgctgaaggacctgggcatccaggtggataggtacattgcctccgaggtgtgcgaggactccatcaccgtgggaatggtgcgtcatcagggcaagatcatgtacgtgggcgacgtgcggagcgtgacacagaagcatatccaggagtggggccctttcgacctggtgatcggcggcagcccttgcaatgacctgagcatcgtgaacccagcccggaagggcctgtacgagggaaccggcagactgttcttcgagttttacagactgctgcacgacgcccggcctaaggaaggcgacgaccggcccttcttttggctgttcgagaatgtggtggccatgggagtcagcgacaagcgggatattagccggttcctggagagcaaccccgtgatgatcgatgccaaggaagtgagcgccgcccaccgggccagatacttctggggcaatctgcctggcatgaacagacccctggccagcaccgtgaacgacaagctggagctgcaggagtgcctggagcacggccggatcgccaagttcagcaaggtgagaaccatcaccacccgaagcaacagcatcaaacaaggcaaggaccagcactttcctgtgttcatgaacgagaaggaggacatcctgtggtgtaccgagatggagagagtgttcgggttcccagtccactacacagatgtcagcaacatgtctagactggccagacagagactgctgggaagaagctggtccgtccctgtgatcagacacctgttcgcccctctgaaggagtacttcgcctgcgtgagcagcggcaacagcaacgccaacagccggggccccagcttctctagcggcctggtgccactgtccctgagagggagccacatgggccccatggagatctacaaaaccgtgagcgcctggaagcggcagcctgtgcgcgtgctgagcctgtttcggaatatcgataaagtcctgaaaagcctgggattcctggagagcggctctggctccggcggtggcaccctgaagtacgtggaggatgtgacaaacgtggtcagacgggatgtggagaagtggggccccttcgatctggtgtacggcagcacccaacccctgggcagctcttgtgaccggtgccctggctggtacatgtttcagttccaccggatcctgcagtacgccctgccgagacaggagtcccagcggccattcttttggattttcatggacaacttgctgctgaccgaggatgaccaggaaactaccactcggttcctgcagaccgaagccgtgaccctgcaggacgtgagaggccgggactaccagaacgccatgcgggtgtggtccaacatccctggactgaaaagcaagcacgcacctctgacccctaaagaagaggagtacctgcaggcccaggtgcggagcagaagcaagctggacgcccctaaggtggatctgctggtgaagaattgcctcctgcccctgagagagtacttcaagtatttcagccagaatagtctgcccctgggaggcagcggcggcggcatggccgagggcctgaagttcaaggacgtggccatctacttcagccagaacgagtgggagtgcctgcacagcgcccagaaggacctgtacagggacatcatgctggagaactacaacaacctgatcagcctgggcctgagcgagagcaagcccgacgtgatcagcctgctggagcagaggaaggagccctggatggtggagaggaaggagaccaaggagtggttccccgactgggagagcaggggcggcccaagcagcggcgcccctcctcccagcggcggcagcccagccggctccccaacctctaccgaggagggcacctctgagtccgccacccccgagagcggccctggcacctccaccgagcccagcgagggcagcgcacccggcagccctgccggcagccccacctccacagaggagggaaccagcaccgagcccagcgaaggcagcgccccaggcaccagcaccgagcctagtgagcaggagattaaacggatcaacaagatcagaagaagacttgtgaaagacagcaacaccaagaaggccggcaagacaggccccatgaaaaccctgctggttagagtgatgacacccgatctgagagagcggctggaaaacctgagaaagaagcctgaaaatatcccccagcccatcagcaatacatctagagccaacctgaataagctgctgaccgattacaccgaaatgaagaaggcgatcctgcatgtgtactgggaagagttccagaaggaccctgtgggcctgatgagccgggtggcccagcctgccagcaagaagatcgatcagaacaagctgaaacctgagatggacgagaagggcaacctgaccaccgccggctttgcctgctctcagtgtggccagcccctgttcgtgtacaagctggagcaggtgtctgagaagggcaaggcttacaccaactacttcggacggtgcaatgtggccgagcacgaaaagctgatcctgctggcccagctgaagcccgagaaggatagcgacgaagccgtgacatatagcctgggaaagtttgggcagagggccctggatttctacagcattcatgtgaccaaggagtccacccaccccgtgaagcccctggcccagatcgccggaaacagatacgcctccggacctgtgggaaaggccctgagcgacgcatgtatgggcacaatcgcctccttcctgtctaagtaccaggacatcatcatcgaacaccagaaggtggtgaagggcaaccagaagagactggagagcctgcgggagctggccggcaaggaaaacctggaataccctagcgtgaccctgccacctcagcctcacaccaaggagggcgttgatgcctacaacgaagtgatcgcccgggtgcgaatgtgggtgaacctgaacctgtggcagaagctgaagctaagcagagatgatgccaagcctctgctgagactgaagggattcccttcctttcctctggtcgagagacaggccaacgaagtggactggtgggacatggtgtgtaacgtgaagaagctgatcaacgagaaaaaggaggatggcaaggtgttttggcagaatctggctggctacaagagacaggaagccctgagaccatacctgagcagcgaggaagatcggaagaagggaaagaaattcgctcggtaccagctgggcgacctgctgctgcacctggaaaagaagcacggcgaggactggggaaaggtgtacgacgaggcctgggagcggattgacaagaaagtggaaggcctgagcaagcacatcaagctggaagaggaacggagaagcgaggacgcccagagcaaggccgccctgaccgactggctgcgggctaaggccagcttcgtgatcgagggcctgaaggaggccgacaaggacgagttctgcagatgcgagctgaagctgcagaagtggtacggggacctgcggggaaagcccttcgccatcgaagccgagaacagcatcctggacatcagcggcttcagcaagcagtacaactgtgccttcatctggcagaaggacggcgtgaagaagctgaacctgtacctgatcatcaactacttcaagggcggcaagctgcggttcaagaagatcaaacctgaagccttcgaagccaacagattctacaccgtgatcaacaaaaagagcggcgagatcgtgcccatggaggtgaacttcaacttcgacgaccccaacctgatcatcctgcctctggcctttggcaagagacagggcagagaattcatctggaacgacctgctgtccctggaaaccggcagcctgaagctggccaacggaagagtgatcgagaagacactgtacaacagaagaacccggcaggatgagcctgccctgttcgtggccctgaccttcgagcggcgggaggtcctggactcctccaatatcaaaccaatgaacctgatcggcgtggcaagaggcgaaaacatccccgccgtgatcgccctgaccgaccccgagggctgcccactgagccggtttaaggatagcctgggaaacccaacccacatcctgagaatcggcgagagctataaggagaagcagcggaccatccaggccaagaaggaggtggagcagcggagagccggcggctacagccggaagtacgccagcaaagccaagaatctggcagacgatatggtgagaaacaccgctagagatctgctgtactacgccgtgacccaggatgccatgctgatcttcgccaacctgagccggggcttcggccggcagggcaagcggaccttcatggccgagagacagtacacacggatggaggactggctgaccgccaagctggcctacgagggcctgagcaagacctacctgtccaagacactggcccagtacacctccaagacatgcagcaactgtgggtttaccatcaccagcgccgactacgacagggtgctggagaagctgaagaagacagcaacaggctggatgaccacaattaacggcaaggagctgaaggtggagggccagattacctactacaacagatacaagagacagaacgtagtcaaggacctgtccgtcgagctggatagactgagcgaagaatctgtgaacaacgacatctcctcctggacaaagggcagaagcggagaagctctgagcctcctgaagaaaagattctcccatagacccgtgcaggagaagttcgtgtgcctgaactgcggcttcgagacacacgcagccgagcaagccgccctgaacatcgccagatcctggctgttcctgcggagccaggagtacaagaaataccagacaaacaagacaaccggcaacaccgataagagagccttcgtcgagacctggcagtccttttaccggaagaagcttaaggaggtgtggaaacctgccgtgcggtctggcggatctggcggaggctccaccagccccaagaaaaagagaaaagtctaagctgccttctgcggggcttgccttctggccatgcccttcttctctcccttgcacctgtacctcttggtctttgaataaagcctgagtaggaaggctagcaaaaaaaaaaaaaaaaaaaaaaaaaaaaaaaaaaaaaaaaaaaaaaaaaaaaaaaaaaaaaaaaaaaaaaaaaaaaaaaa

SEQ ID NO: 13101 - RNA, 5785 nt, synthetic construct
  source 1..5785: mol_type = other RNA
aggaaataagagagaaaagaagagtaagaagaaatataagagccaccatggcccctaagaagaagcgtaaagtgagccggatggaacgcctcgtctacgaggtgcggcagaagtgcagaaacatcgaggacatctgcatctcctgcggatctctgaacgtgaccctggagcacccactgttcatcggcggcatgtgccagaactgtaaaaactgttttctggagtgtgcctatcaatacgacgatgacggctaccagagctactgcaccatctgttgcggcggaagagaggtgctgatgtgtggaaataacaactgctgccggtgcttctgcgtggaatgcgtggacctgctggtgggccccggcgccgcccaggccgctattaaggaagatccttggaactgctacatgtgcggccacaagggcacatacggcctgctgagacggagagaggactggcctagcagactgcagatgttcttcgccaataaccacgaccaggagttcgacccccctaaggtgtaccctcccgtccccgccgagaagagaaagcccatccgggtcctgagcctgttcgatggcatcgccaccggtctgctggtgctgaaggacctgggcatccaggtggataggtacattgcctccgaggtgtgcgaggactccatcaccgtgggaatggtgcgtcatcagggcaagatcatgtacgtgggcgacgtgcggagcgtgacacagaagcatatccaggagtggggccctttcgacctggtgatcggcggcagcccttgcaatgacctgagcatcgtgaacccagcccggaagggcctgtacgagggaaccggcagactgttcttcgagttttacagactgctgcacgacgcccggcctaaggaaggcgacgaccggcccttcttttggctgttcgagaatgtggtggccatgggagtcagcgacaagcgggatattagccggttcctggagagcaaccccgtgatgatcgatgccaaggaagtgagcgccgcccaccgggccagatacttctggggcaatctgcctggcatgaacagacccctggccagcaccgtgaacgacaagctggagctgcaggagtgcctggagcacggccggatcgccaagttcagcaaggtgagaaccatcaccacccgaagcaacagcatcaaacaaggcaaggaccagcactttcctgtgttcatgaacgagaaggaggacatcctgtggtgtaccgagatggagagagtgttcgggttcccagtccactacacagatgtcagcaacatgtctagactggccagacagagactgctgggaagaagctggtccgtccctgtgatcagacacctgttcgcccctctgaaggagtacttcgcctgcgtgagcagcggcaacagcaacgccaacagccggggccccagcttctctagcggcctggtgccactgtccctgagagggagccacatgggccccatggagatctacaaaaccgtgagcgcctggaagcggcagcctgtgcgcgtgctgagcctgtttcggaatatcgataaagtcctgaaaagcctgggattcctggagagcggctctggctccggcggtggcaccctgaagtacgtggaggatgtgacaaacgtggtcagacgggatgtggagaagtggggccccttcgatctggtgtacggcagcacccaacccctgggcagctcttgtgaccggtgccctggctggtacatgtttcagttccaccggatcctgcagtacgccctgccgagacaggagtcccagcggccattcttttggattttcatggacaacttgctgctgaccgaggatgaccaggaaactaccactcggttcctgcagaccgaagccgtgaccctgcaggacgtgagaggccgggactaccagaacgccatgcgggtgtggtccaacatccctggactgaaaagcaagcacgcacctctgacccctaaagaagaggagtacctgcaggcccaggtgcggagcagaagcaagctggacgcccctaaggtggatctgctggtgaagaattgcctcctgcccctgagagagtacttcaagtatttcagccagaatagtctgcccctgggaggcagcggcggcggcaagcccggcaccgtgagcttcgccgacgtggccgtgtacttcagcagggaggagtggggctgcctgaggcccgcccagagggccctgtacagggacgtgatgagggagacctacggccacctgggcgccctgggcgtgggcggcagcaagcccgccctgatcagctgggtggaggaggccgccgagctgtgggaccccgccgccagggaccccgaggtgaccaagtgccccaccgagaccgacggcggcccaagcagcggcgcccctcctcccagcggcggcagcccagccggctccccaacctctaccgaggagggcacctctgagtccgccacccccgagagcggccctggcacctccaccgagcccagcgagggcagcgcacccggcagccctgccggcagccccacctccacagaggagggaaccagcaccgagcccagcgaaggcagcgccccaggcaccagcaccgagcctagtgagcaggagattaaacggatcaacaagatcagaagaagacttgtgaaagacagcaacaccaagaaggccggcaagacaggccccatgaaaaccctgctggttagagtgatgacacccgatctgagagagcggctggaaaacctgagaaagaagcctgaaaatatcccccagcccatcagcaatacatctagagccaacctgaataagctgctgaccgattacaccgaaatgaagaaggcgatcctgcatgtgtactgggaagagttccagaaggaccctgtgggcctgatgagccgggtggcccagcctgccagcaagaagatcgatcagaacaagctgaaacctgagatggacgagaagggcaacctgaccaccgccggctttgcctgctctcagtgtggccagcccctgttcgtgtacaagctggagcaggtgtctgagaagggcaaggcttacaccaactacttcggacggtgcaatgtggccgagcacgaaaagctgatcctgctggcccagctgaagcccgagaaggatagcgacgaagccgtgacatatagcctgggaaagtttgggcagagggccctggatttctacagcattcatgtgaccaaggagtccacccaccccgtgaagcccctggcccagatcgccggaaacagatacgcctccggacctgtgggaaaggccctgagcgacgcatgtatgggcacaatcgcctccttcctgtctaagtaccaggacatcatcatcgaacaccagaaggtggtgaagggcaaccagaagagactggagagcctgcgggagctggccggcaaggaaaacctggaataccctagcgtgaccctgccacctcagcctcacaccaaggagggcgttgatgcctacaacgaagtgatcgcccgggtgcgaatgtgggtgaacctgaacctgtggcagaagctgaagctaagcagagatgatgccaagcctctgctgagactgaagggattcccttcctttcctctggtcgagagacaggccaacgaagtggactggtgggacatggtgtgtaacgtgaagaagctgatcaacgagaaaaaggaggatggcaaggtgttttggcagaatctggctggctacaagagacaggaagccctgagaccatacctgagcagcgaggaagatcggaagaagggaaagaaattcgctcggtaccagctgggcgacctgctgctgcacctggaaaagaagcacggcgaggactggggaaaggtgtacgacgaggcctgggagcggattgacaagaaagtggaaggcctgagcaagcacatcaagctggaagaggaacggagaagcgaggacgcccagagcaaggccgccctgaccgactggctgcgggctaaggccagcttcgtgatcgagggcctgaaggaggccgacaaggacgagttctgcagatgcgagctgaagctgcagaagtggtacggggacctgcggggaaagcccttcgccatcgaagccgagaacagcatcctggacatcagcggcttcagcaagcagtacaactgtgccttcatctggcagaaggacggcgtgaagaagctgaacctgtacctgatcatcaactacttcaagggcggcaagctgcggttcaagaagatcaaacctgaagccttcgaagccaacagattctacaccgtgatcaacaaaaagagcggcgagatcgtgcccatggaggtgaacttcaacttcgacgaccccaacctgatcatcctgcctctggcctttggcaagagacagggcagagaattcatctggaacgacctgctgtccctggaaaccggcagcctgaagctggccaacggaagagtgatcgagaagacactgtacaacagaagaacccggcaggatgagcctgccctgttcgtggccctgaccttcgagcggcgggaggtcctggactcctccaatatcaaaccaatgaacctgatcggcgtggcaagaggcgaaaacatccccgccgtgatcgccctgaccgaccccgagggctgcccactgagccggtttaaggatagcctgggaaacccaacccacatcctgagaatcggcgagagctataaggagaagcagcggaccatccaggccaagaaggaggtggagcagcggagagccggcggctacagccggaagtacgccagcaaagccaagaatctggcagacgatatggtgagaaacaccgctagagatctgctgtactacgccgtgacccaggatgccatgctgatcttcgccaacctgagccggggcttcggccggcagggcaagcggaccttcatggccgagagacagtacacacggatggaggactggctgaccgccaagctggcctacgagggcctgagcaagacctacctgtccaagacactggcccagtacacctccaagacatgcagcaactgtgggtttaccatcaccagcgccgactacgacagggtgctggagaagctgaagaagacagcaacaggctggatgaccacaattaacggcaaggagctgaaggtggagggccagattacctactacaacagatacaagagacagaacgtagtcaaggacctgtccgtcgagctggatagactgagcgaagaatctgtgaacaacgacatctcctcctggacaaagggcagaagcggagaagctctgagcctcctgaagaaaagattctcccatagacccgtgcaggagaagttcgtgtgcctgaactgcggcttcgagacacacgcagccgagcaagccgccctgaacatcgccagatcctggctgttcctgcggagccaggagtacaagaaataccagacaaacaagacaaccggcaacaccgataagagagccttcgtcgagacctggcagtccttttaccggaagaagcttaaggaggtgtggaaacctgccgtgcggtctggcggatctggcggaggctccaccagccccaagaaaaagagaaaagtctaagctgccttctgcggggcttgccttctggccatgcccttcttctctcccttgcacctgtacctcttggtctttgaataaagcctgagtaggaaggctagcaaaaaaaaaaaaaaaaaaaaaaaaaaaaaaaaaaaaaaaaaaaaaaaaaaaaaaaaaaaaaaaaaaaaaaaaaaaaaaaa

SEQ ID NO: 13102 - RNA, 5785 nt, synthetic construct
  source 1..5785: mol_type = other RNA
aggaaataagagagaaaagaagagtaagaagaaatataagagccaccatggcccctaagaagaagcgtaaagtgagccggatggaacgcctcgtctacgaggtgcggcagaagtgcagaaacatcgaggacatctgcatctcctgcggatctctgaacgtgaccctggagcacccactgttcatcggcggcatgtgccagaactgtaaaaactgttttctggagtgtgcctatcaatacgacgatgacggctaccagagctactgcaccatctgttgcggcggaagagaggtgctgatgtgtggaaataacaactgctgccggtgcttctgcgtggaatgcgtggacctgctggtgggccccggcgccgcccaggccgctattaaggaagatccttggaactgctacatgtgcggccacaagggcacatacggcctgctgagacggagagaggactggcctagcagactgcagatgttcttcgccaataaccacgaccaggagttcgacccccctaaggtgtaccctcccgtccccgccgagaagagaaagcccatccgggtcctgagcctgttcgatggcatcgccaccggtctgctggtgctgaaggacctgggcatccaggtggataggtacattgcctccgaggtgtgcgaggactccatcaccgtgggaatggtgcgtcatcagggcaagatcatgtacgtgggcgacgtgcggagcgtgacacagaagcatatccaggagtggggccctttcgacctggtgatcggcggcagcccttgcaatgacctgagcatcgtgaacccagcccggaagggcctgtacgagggaaccggcagactgttcttcgagttttacagactgctgcacgacgcccggcctaaggaaggcgacgaccggcccttcttttggctgttcgagaatgtggtggccatgggagtcagcgacaagcgggatattagccggttcctggagagcaaccccgtgatgatcgatgccaaggaagtgagcgccgcccaccgggccagatacttctggggcaatctgcctggcatgaacagacccctggccagcaccgtgaacgacaagctggagctgcaggagtgcctggagcacggccggatcgccaagttcagcaaggtgagaaccatcaccacccgaagcaacagcatcaaacaaggcaaggaccagcactttcctgtgttcatgaacgagaaggaggacatcctgtggtgtaccgagatggagagagtgttcgggttcccagtccactacacagatgtcagcaacatgtctagactggccagacagagactgctgggaagaagctggtccgtccctgtgatcagacacctgttcgcccctctgaaggagtacttcgcctgcgtgagcagcggcaacagcaacgccaacagccggggccccagcttctctagcggcctggtgccactgtccctgagagggagccacatgggccccatggagatctacaaaaccgtgagcgcctggaagcggcagcctgtgcgcgtgctgagcctgtttcggaatatcgataaagtcctgaaaagcctgggattcctggagagcggctctggctccggcggtggcaccctgaagtacgtggaggatgtgacaaacgtggtcagacgggatgtggagaagtggggccccttcgatctggtgtacggcagcacccaacccctgggcagctcttgtgaccggtgccctggctggtacatgtttcagttccaccggatcctgcagtacgccctgccgagacaggagtcccagcggccattcttttggattttcatggacaacttgctgctgaccgaggatgaccaggaaactaccactcggttcctgcagaccgaagccgtgaccctgcaggacgtgagaggccgggactaccagaacgccatgcgggtgtggtccaacatccctggactgaaaagcaagcacgcacctctgacccctaaagaagaggagtacctgcaggcccaggtgcggagcagaagcaagctggacgcccctaaggtggatctgctggtgaagaattgcctcctgcccctgagagagtacttcaagtatttcagccagaatagtctgcccctgggaggcagcggcggcggcttccaggagctggtggtgttcagggacgtggccgtggagttctgcaaggacgagtgggagtgcctgggccccgaccagaggagcctgtacagggacgtgatgctggagacctacagcaacttcgtgagcctgggcctggccgtgagcaagcccagcgtgatcagcctgctggagcagggcaaggagccctggatggtggagcaggccggctggtaccccgacctgctgagcgtgaacgagaccggcggcccaagcagcggcgcccctcctcccagcggcggcagcccagccggctccccaacctctaccgaggagggcacctctgagtccgccacccccgagagcggccctggcacctccaccgagcccagcgagggcagcgcacccggcagccctgccggcagccccacctccacagaggagggaaccagcaccgagcccagcgaaggcagcgccccaggcaccagcaccgagcctagtgagcaggagattaaacggatcaacaagatcagaagaagacttgtgaaagacagcaacaccaagaaggccggcaagacaggccccatgaaaaccctgctggttagagtgatgacacccgatctgagagagcggctggaaaacctgagaaagaagcctgaaaatatcccccagcccatcagcaatacatctagagccaacctgaataagctgctgaccgattacaccgaaatgaagaaggcgatcctgcatgtgtactgggaagagttccagaaggaccctgtgggcctgatgagccgggtggcccagcctgccagcaagaagatcgatcagaacaagctgaaacctgagatggacgagaagggcaacctgaccaccgccggctttgcctgctctcagtgtggccagcccctgttcgtgtacaagctggagcaggtgtctgagaagggcaaggcttacaccaactacttcggacggtgcaatgtggccgagcacgaaaagctgatcctgctggcccagctgaagcccgagaaggatagcgacgaagccgtgacatatagcctgggaaagtttgggcagagggccctggatttctacagcattcatgtgaccaaggagtccacccaccccgtgaagcccctggcccagatcgccggaaacagatacgcctccggacctgtgggaaaggccctgagcgacgcatgtatgggcacaatcgcctccttcctgtctaagtaccaggacatcatcatcgaacaccagaaggtggtgaagggcaaccagaagagactggagagcctgcgggagctggccggcaaggaaaacctggaataccctagcgtgaccctgccacctcagcctcacaccaaggagggcgttgatgcctacaacgaagtgatcgcccgggtgcgaatgtgggtgaacctgaacctgtggcagaagctgaagctaagcagagatgatgccaagcctctgctgagactgaagggattcccttcctttcctctggtcgagagacaggccaacgaagtggactggtgggacatggtgtgtaacgtgaagaagctgatcaacgagaaaaaggaggatggcaaggtgttttggcagaatctggctggctacaagagacaggaagccctgagaccatacctgagcagcgaggaagatcggaagaagggaaagaaattcgctcggtaccagctgggcgacctgctgctgcacctggaaaagaagcacggcgaggactggggaaaggtgtacgacgaggcctgggagcggattgacaagaaagtggaaggcctgagcaagcacatcaagctggaagaggaacggagaagcgaggacgcccagagcaaggccgccctgaccgactggctgcgggctaaggccagcttcgtgatcgagggcctgaaggaggccgacaaggacgagttctgcagatgcgagctgaagctgcagaagtggtacggggacctgcggggaaagcccttcgccatcgaagccgagaacagcatcctggacatcagcggcttcagcaagcagtacaactgtgccttcatctggcagaaggacggcgtgaagaagctgaacctgtacctgatcatcaactacttcaagggcggcaagctgcggttcaagaagatcaaacctgaagccttcgaagccaacagattctacaccgtgatcaacaaaaagagcggcgagatcgtgcccatggaggtgaacttcaacttcgacgaccccaacctgatcatcctgcctctggcctttggcaagagacagggcagagaattcatctggaacgacctgctgtccctggaaaccggcagcctgaagctggccaacggaagagtgatcgagaagacactgtacaacagaagaacccggcaggatgagcctgccctgttcgtggccctgaccttcgagcggcgggaggtcctggactcctccaatatcaaaccaatgaacctgatcggcgtggcaagaggcgaaaacatccccgccgtgatcgccctgaccgaccccgagggctgcccactgagccggtttaaggatagcctgggaaacccaacccacatcctgagaatcggcgagagctataaggagaagcagcggaccatccaggccaagaaggaggtggagcagcggagagccggcggctacagccggaagtacgccagcaaagccaagaatctggcagacgatatggtgagaaacaccgctagagatctgctgtactacgccgtgacccaggatgccatgctgatcttcgccaacctgagccggggcttcggccggcagggcaagcggaccttcatggccgagagacagtacacacggatggaggactggctgaccgccaagctggcctacgagggcctgagcaagacctacctgtccaagacactggcccagtacacctccaagacatgcagcaactgtgggtttaccatcaccagcgccgactacgacagggtgctggagaagctgaagaagacagcaacaggctggatgaccacaattaacggcaaggagctgaaggtggagggccagattacctactacaacagatacaagagacagaacgtagtcaaggacctgtccgtcgagctggatagactgagcgaagaatctgtgaacaacgacatctcctcctggacaaagggcagaagcggagaagctctgagcctcctgaagaaaagattctcccatagacccgtgcaggagaagttcgtgtgcctgaactgcggcttcgagacacacgcagccgagcaagccgccctgaacatcgccagatcctggctgttcctgcggagccaggagtacaagaaataccagacaaacaagacaaccggcaacaccgataagagagccttcgtcgagacctggcagtccttttaccggaagaagcttaaggaggtgtggaaacctgccgtgcggtctggcggatctggcggaggctccaccagccccaagaaaaagagaaaagtctaagctgccttctgcggggcttgccttctggccatgcccttcttctctcccttgcacctgtacctcttggtctttgaataaagcctgagtaggaaggctagcaaaaaaaaaaaaaaaaaaaaaaaaaaaaaaaaaaaaaaaaaaaaaaaaaaaaaaaaaaaaaaaaaaaaaaaaaaaaaaaa

SEQ ID NO: 13103 - RNA, 5785 nt, synthetic construct
  source 1..5785: mol_type = other RNA
aggaaataagagagaaaagaagagtaagaagaaatataagagccaccatggcccctaagaagaagcgtaaagtgagccggatggaacgcctcgtctacgaggtgcggcagaagtgcagaaacatcgaggacatctgcatctcctgcggatctctgaacgtgaccctggagcacccactgttcatcggcggcatgtgccagaactgtaaaaactgttttctggagtgtgcctatcaatacgacgatgacggctaccagagctactgcaccatctgttgcggcggaagagaggtgctgatgtgtggaaataacaactgctgccggtgcttctgcgtggaatgcgtggacctgctggtgggccccggcgccgcccaggccgctattaaggaagatccttggaactgctacatgtgcggccacaagggcacatacggcctgctgagacggagagaggactggcctagcagactgcagatgttcttcgccaataaccacgaccaggagttcgacccccctaaggtgtaccctcccgtccccgccgagaagagaaagcccatccgggtcctgagcctgttcgatggcatcgccaccggtctgctggtgctgaaggacctgggcatccaggtggataggtacattgcctccgaggtgtgcgaggactccatcaccgtgggaatggtgcgtcatcagggcaagatcatgtacgtgggcgacgtgcggagcgtgacacagaagcatatccaggagtggggccctttcgacctggtgatcggcggcagcccttgcaatgacctgagcatcgtgaacccagcccggaagggcctgtacgagggaaccggcagactgttcttcgagttttacagactgctgcacgacgcccggcctaaggaaggcgacgaccggcccttcttttggctgttcgagaatgtggtggccatgggagtcagcgacaagcgggatattagccggttcctggagagcaaccccgtgatgatcgatgccaaggaagtgagcgccgcccaccgggccagatacttctggggcaatctgcctggcatgaacagacccctggccagcaccgtgaacgacaagctggagctgcaggagtgcctggagcacggccggatcgccaagttcagcaaggtgagaaccatcaccacccgaagcaacagcatcaaacaaggcaaggaccagcactttcctgtgttcatgaacgagaaggaggacatcctgtggtgtaccgagatggagagagtgttcgggttcccagtccactacacagatgtcagcaacatgtctagactggccagacagagactgctgggaagaagctggtccgtccctgtgatcagacacctgttcgcccctctgaaggagtacttcgcctgcgtgagcagcggcaacagcaacgccaacagccggggccccagcttctctagcggcctggtgccactgtccctgagagggagccacatgggccccatggagatctacaaaaccgtgagcgcctggaagcggcagcctgtgcgcgtgctgagcctgtttcggaatatcgataaagtcctgaaaagcctgggattcctggagagcggctctggctccggcggtggcaccctgaagtacgtggaggatgtgacaaacgtggtcagacgggatgtggagaagtggggccccttcgatctggtgtacggcagcacccaacccctgggcagctcttgtgaccggtgccctggctggtacatgtttcagttccaccggatcctgcagtacgccctgccgagacaggagtcccagcggccattcttttggattttcatggacaacttgctgctgaccgaggatgaccaggaaactaccactcggttcctgcagaccgaagccgtgaccctgcaggacgtgagaggccgggactaccagaacgccatgcgggtgtggtccaacatccctggactgaaaagcaagcacgcacctctgacccctaaagaagaggagtacctgcaggcccaggtgcggagcagaagcaagctggacgcccctaaggtggatctgctggtgaagaattgcctcctgcccctgagagagtacttcaagtatttcagccagaatagtctgcccctgggaggcagcggcggcggcttccaggagcccgtgaccttcgaggacgtggtggtgtacttcacccagaacgagtggaccagcctgcagcccagccagagggccctgtacagggaggtgatgctggagaactacgccaccgtgaccagcctgagcgccttccccttcagcaagcccgacctgatcttcaggctggagcagggcgaggccgcctggggcagcgacccctggaccctggccggcgaggaggcccccaggggcctgggcggcccaagcagcggcgcccctcctcccagcggcggcagcccagccggctccccaacctctaccgaggagggcacctctgagtccgccacccccgagagcggccctggcacctccaccgagcccagcgagggcagcgcacccggcagccctgccggcagccccacctccacagaggagggaaccagcaccgagcccagcgaaggcagcgccccaggcaccagcaccgagcctagtgagcaggagattaaacggatcaacaagatcagaagaagacttgtgaaagacagcaacaccaagaaggccggcaagacaggccccatgaaaaccctgctggttagagtgatgacacccgatctgagagagcggctggaaaacctgagaaagaagcctgaaaatatcccccagcccatcagcaatacatctagagccaacctgaataagctgctgaccgattacaccgaaatgaagaaggcgatcctgcatgtgtactgggaagagttccagaaggaccctgtgggcctgatgagccgggtggcccagcctgccagcaagaagatcgatcagaacaagctgaaacctgagatggacgagaagggcaacctgaccaccgccggctttgcctgctctcagtgtggccagcccctgttcgtgtacaagctggagcaggtgtctgagaagggcaaggcttacaccaactacttcggacggtgcaatgtggccgagcacgaaaagctgatcctgctggcccagctgaagcccgagaaggatagcgacgaagccgtgacatatagcctgggaaagtttgggcagagggccctggatttctacagcattcatgtgaccaaggagtccacccaccccgtgaagcccctggcccagatcgccggaaacagatacgcctccggacctgtgggaaaggccctgagcgacgcatgtatgggcacaatcgcctccttcctgtctaagtaccaggacatcatcatcgaacaccagaaggtggtgaagggcaaccagaagagactggagagcctgcgggagctggccggcaaggaaaacctggaataccctagcgtgaccctgccacctcagcctcacaccaaggagggcgttgatgcctacaacgaagtgatcgcccgggtgcgaatgtgggtgaacctgaacctgtggcagaagctgaagctaagcagagatgatgccaagcctctgctgagactgaagggattcccttcctttcctctggtcgagagacaggccaacgaagtggactggtgggacatggtgtgtaacgtgaagaagctgatcaacgagaaaaaggaggatggcaaggtgttttggcagaatctggctggctacaagagacaggaagccctgagaccatacctgagcagcgaggaagatcggaagaagggaaagaaattcgctcggtaccagctgggcgacctgctgctgcacctggaaaagaagcacggcgaggactggggaaaggtgtacgacgaggcctgggagcggattgacaagaaagtggaaggcctgagcaagcacatcaagctggaagaggaacggagaagcgaggacgcccagagcaaggccgccctgaccgactggctgcgggctaaggccagcttcgtgatcgagggcctgaaggaggccgacaaggacgagttctgcagatgcgagctgaagctgcagaagtggtacggggacctgcggggaaagcccttcgccatcgaagccgagaacagcatcctggacatcagcggcttcagcaagcagtacaactgtgccttcatctggcagaaggacggcgtgaagaagctgaacctgtacctgatcatcaactacttcaagggcggcaagctgcggttcaagaagatcaaacctgaagccttcgaagccaacagattctacaccgtgatcaacaaaaagagcggcgagatcgtgcccatggaggtgaacttcaacttcgacgaccccaacctgatcatcctgcctctggcctttggcaagagacagggcagagaattcatctggaacgacctgctgtccctggaaaccggcagcctgaagctggccaacggaagagtgatcgagaagacactgtacaacagaagaacccggcaggatgagcctgccctgttcgtggccctgaccttcgagcggcgggaggtcctggactcctccaatatcaaaccaatgaacctgatcggcgtggcaagaggcgaaaacatccccgccgtgatcgccctgaccgaccccgagggctgcccactgagccggtttaaggatagcctgggaaacccaacccacatcctgagaatcggcgagagctataaggagaagcagcggaccatccaggccaagaaggaggtggagcagcggagagccggcggctacagccggaagtacgccagcaaagccaagaatctggcagacgatatggtgagaaacaccgctagagatctgctgtactacgccgtgacccaggatgccatgctgatcttcgccaacctgagccggggcttcggccggcagggcaagcggaccttcatggccgagagacagtacacacggatggaggactggctgaccgccaagctggcctacgagggcctgagcaagacctacctgtccaagacactggcccagtacacctccaagacatgcagcaactgtgggtttaccatcaccagcgccgactacgacagggtgctggagaagctgaagaagacagcaacaggctggatgaccacaattaacggcaaggagctgaaggtggagggccagattacctactacaacagatacaagagacagaacgtagtcaaggacctgtccgtcgagctggatagactgagcgaagaatctgtgaacaacgacatctcctcctggacaaagggcagaagcggagaagctctgagcctcctgaagaaaagattctcccatagacccgtgcaggagaagttcgtgtgcctgaactgcggcttcgagacacacgcagccgagcaagccgccctgaacatcgccagatcctggctgttcctgcggagccaggagtacaagaaataccagacaaacaagacaaccggcaacaccgataagagagccttcgtcgagacctggcagtccttttaccggaagaagcttaaggaggtgtggaaacctgccgtgcggtctggcggatctggcggaggctccaccagccccaagaaaaagagaaaagtctaagctgccttctgcggggcttgccttctggccatgcccttcttctctcccttgcacctgtacctcttggtctttgaataaagcctgagtaggaaggctagcaaaaaaaaaaaaaaaaaaaaaaaaaaaaaaaaaaaaaaaaaaaaaaaaaaaaaaaaaaaaaaaaaaaaaaaaaaaaaaaa

SEQ ID NO: 13104 - RNA, 5785 nt, synthetic construct
  source 1..5785: mol_type = other RNA
aggaaataagagagaaaagaagagtaagaagaaatataagagccaccatggcccctaagaagaagcgtaaagtgagccggatggaacgcctcgtctacgaggtgcggcagaagtgcagaaacatcgaggacatctgcatctcctgcggatctctgaacgtgaccctggagcacccactgttcatcggcggcatgtgccagaactgtaaaaactgttttctggagtgtgcctatcaatacgacgatgacggctaccagagctactgcaccatctgttgcggcggaagagaggtgctgatgtgtggaaataacaactgctgccggtgcttctgcgtggaatgcgtggacctgctggtgggccccggcgccgcccaggccgctattaaggaagatccttggaactgctacatgtgcggccacaagggcacatacggcctgctgagacggagagaggactggcctagcagactgcagatgttcttcgccaataaccacgaccaggagttcgacccccctaaggtgtaccctcccgtccccgccgagaagagaaagcccatccgggtcctgagcctgttcgatggcatcgccaccggtctgctggtgctgaaggacctgggcatccaggtggataggtacattgcctccgaggtgtgcgaggactccatcaccgtgggaatggtgcgtcatcagggcaagatcatgtacgtgggcgacgtgcggagcgtgacacagaagcatatccaggagtggggccctttcgacctggtgatcggcggcagcccttgcaatgacctgagcatcgtgaacccagcccggaagggcctgtacgagggaaccggcagactgttcttcgagttttacagactgctgcacgacgcccggcctaaggaaggcgacgaccggcccttcttttggctgttcgagaatgtggtggccatgggagtcagcgacaagcgggatattagccggttcctggagagcaaccccgtgatgatcgatgccaaggaagtgagcgccgcccaccgggccagatacttctggggcaatctgcctggcatgaacagacccctggccagcaccgtgaacgacaagctggagctgcaggagtgcctggagcacggccggatcgccaagttcagcaaggtgagaaccatcaccacccgaagcaacagcatcaaacaaggcaaggaccagcactttcctgtgttcatgaacgagaaggaggacatcctgtggtgtaccgagatggagagagtgttcgggttcccagtccactacacagatgtcagcaacatgtctagactggccagacagagactgctgggaagaagctggtccgtccctgtgatcagacacctgttcgcccctctgaaggagtacttcgcctgcgtgagcagcggcaacagcaacgccaacagccggggccccagcttctctagcggcctggtgccactgtccctgagagggagccacatgggccccatggagatctacaaaaccgtgagcgcctggaagcggcagcctgtgcgcgtgctgagcctgtttcggaatatcgataaagtcctgaaaagcctgggattcctggagagcggctctggctccggcggtggcaccctgaagtacgtggaggatgtgacaaacgtggtcagacgggatgtggagaagtggggccccttcgatctggtgtacggcagcacccaacccctgggcagctcttgtgaccggtgccctggctggtacatgtttcagttccaccggatcctgcagtacgccctgccgagacaggagtcccagcggccattcttttggattttcatggacaacttgctgctgaccgaggatgaccaggaaactaccactcggttcctgcagaccgaagccgtgaccctgcaggacgtgagaggccgggactaccagaacgccatgcgggtgtggtccaacatccctggactgaaaagcaagcacgcacctctgacccctaaagaagaggagtacctgcaggcccaggtgcggagcagaagcaagctggacgcccctaaggtggatctgctggtgaagaattgcctcctgcccctgagagagtacttcaagtatttcagccagaatagtctgcccctgggaggcagcggcggcggcatggccgccatccccctgaaggcccagtgccaggagaccgtgaccttcgaggacgtggccgtgcacttcaccaagaccgagtggaccggcctgagccccgcccagagggccctgtacaggagcgtgatgctggagaactacggcaacctgaccgccatgggctacctggtgcccaagcccgccctgatcagcctgctggagggcggcgacatggcctggggcctggaggcccaggacgaccccggcggcccaagcagcggcgcccctcctcccagcggcggcagcccagccggctccccaacctctaccgaggagggcacctctgagtccgccacccccgagagcggccctggcacctccaccgagcccagcgagggcagcgcacccggcagccctgccggcagccccacctccacagaggagggaaccagcaccgagcccagcgaaggcagcgccccaggcaccagcaccgagcctagtgagcaggagattaaacggatcaacaagatcagaagaagacttgtgaaagacagcaacaccaagaaggccggcaagacaggccccatgaaaaccctgctggttagagtgatgacacccgatctgagagagcggctggaaaacctgagaaagaagcctgaaaatatcccccagcccatcagcaatacatctagagccaacctgaataagctgctgaccgattacaccgaaatgaagaaggcgatcctgcatgtgtactgggaagagttccagaaggaccctgtgggcctgatgagccgggtggcccagcctgccagcaagaagatcgatcagaacaagctgaaacctgagatggacgagaagggcaacctgaccaccgccggctttgcctgctctcagtgtggccagcccctgttcgtgtacaagctggagcaggtgtctgagaagggcaaggcttacaccaactacttcggacggtgcaatgtggccgagcacgaaaagctgatcctgctggcccagctgaagcccgagaaggatagcgacgaagccgtgacatatagcctgggaaagtttgggcagagggccctggatttctacagcattcatgtgaccaaggagtccacccaccccgtgaagcccctggcccagatcgccggaaacagatacgcctccggacctgtgggaaaggccctgagcgacgcatgtatgggcacaatcgcctccttcctgtctaagtaccaggacatcatcatcgaacaccagaaggtggtgaagggcaaccagaagagactggagagcctgcgggagctggccggcaaggaaaacctggaataccctagcgtgaccctgccacctcagcctcacaccaaggagggcgttgatgcctacaacgaagtgatcgcccgggtgcgaatgtgggtgaacctgaacctgtggcagaagctgaagctaagcagagatgatgccaagcctctgctgagactgaagggattcccttcctttcctctggtcgagagacaggccaacgaagtggactggtgggacatggtgtgtaacgtgaagaagctgatcaacgagaaaaaggaggatggcaaggtgttttggcagaatctggctggctacaagagacaggaagccctgagaccatacctgagcagcgaggaagatcggaagaagggaaagaaattcgctcggtaccagctgggcgacctgctgctgcacctggaaaagaagcacggcgaggactggggaaaggtgtacgacgaggcctgggagcggattgacaagaaagtggaaggcctgagcaagcacatcaagctggaagaggaacggagaagcgaggacgcccagagcaaggccgccctgaccgactggctgcgggctaaggccagcttcgtgatcgagggcctgaaggaggccgacaaggacgagttctgcagatgcgagctgaagctgcagaagtggtacggggacctgcggggaaagcccttcgccatcgaagccgagaacagcatcctggacatcagcggcttcagcaagcagtacaactgtgccttcatctggcagaaggacggcgtgaagaagctgaacctgtacctgatcatcaactacttcaagggcggcaagctgcggttcaagaagatcaaacctgaagccttcgaagccaacagattctacaccgtgatcaacaaaaagagcggcgagatcgtgcccatggaggtgaacttcaacttcgacgaccccaacctgatcatcctgcctctggcctttggcaagagacagggcagagaattcatctggaacgacctgctgtccctggaaaccggcagcctgaagctggccaacggaagagtgatcgagaagacactgtacaacagaagaacccggcaggatgagcctgccctgttcgtggccctgaccttcgagcggcgggaggtcctggactcctccaatatcaaaccaatgaacctgatcggcgtggcaagaggcgaaaacatccccgccgtgatcgccctgaccgaccccgagggctgcccactgagccggtttaaggatagcctgggaaacccaacccacatcctgagaatcggcgagagctataaggagaagcagcggaccatccaggccaagaaggaggtggagcagcggagagccggcggctacagccggaagtacgccagcaaagccaagaatctggcagacgatatggtgagaaacaccgctagagatctgctgtactacgccgtgacccaggatgccatgctgatcttcgccaacctgagccggggcttcggccggcagggcaagcggaccttcatggccgagagacagtacacacggatggaggactggctgaccgccaagctggcctacgagggcctgagcaagacctacctgtccaagacactggcccagtacacctccaagacatgcagcaactgtgggtttaccatcaccagcgccgactacgacagggtgctggagaagctgaagaagacagcaacaggctggatgaccacaattaacggcaaggagctgaaggtggagggccagattacctactacaacagatacaagagacagaacgtagtcaaggacctgtccgtcgagctggatagactgagcgaagaatctgtgaacaacgacatctcctcctggacaaagggcagaagcggagaagctctgagcctcctgaagaaaagattctcccatagacccgtgcaggagaagttcgtgtgcctgaactgcggcttcgagacacacgcagccgagcaagccgccctgaacatcgccagatcctggctgttcctgcggagccaggagtacaagaaataccagacaaacaagacaaccggcaacaccgataagagagccttcgtcgagacctggcagtccttttaccggaagaagcttaaggaggtgtggaaacctgccgtgcggtctggcggatctggcggaggctccaccagccccaagaaaaagagaaaagtctaagctgccttctgcggggcttgccttctggccatgcccttcttctctcccttgcacctgtacctcttggtctttgaataaagcctgagtaggaaggctagcaaaaaaaaaaaaaaaaaaaaaaaaaaaaaaaaaaaaaaaaaaaaaaaaaaaaaaaaaaaaaaaaaaaaaaaaaaaaaaaa

SEQ ID NO: 13105 - RNA, 5785 nt, synthetic construct
  source 1..5785: mol_type = other RNA
aggaaataagagagaaaagaagagtaagaagaaatataagagccaccatggcccctaagaagaagcgtaaagtgagccggatggaacgcctcgtctacgaggtgcggcagaagtgcagaaacatcgaggacatctgcatctcctgcggatctctgaacgtgaccctggagcacccactgttcatcggcggcatgtgccagaactgtaaaaactgttttctggagtgtgcctatcaatacgacgatgacggctaccagagctactgcaccatctgttgcggcggaagagaggtgctgatgtgtggaaataacaactgctgccggtgcttctgcgtggaatgcgtggacctgctggtgggccccggcgccgcccaggccgctattaaggaagatccttggaactgctacatgtgcggccacaagggcacatacggcctgctgagacggagagaggactggcctagcagactgcagatgttcttcgccaataaccacgaccaggagttcgacccccctaaggtgtaccctcccgtccccgccgagaagagaaagcccatccgggtcctgagcctgttcgatggcatcgccaccggtctgctggtgctgaaggacctgggcatccaggtggataggtacattgcctccgaggtgtgcgaggactccatcaccgtgggaatggtgcgtcatcagggcaagatcatgtacgtgggcgacgtgcggagcgtgacacagaagcatatccaggagtggggccctttcgacctggtgatcggcggcagcccttgcaatgacctgagcatcgtgaacccagcccggaagggcctgtacgagggaaccggcagactgttcttcgagttttacagactgctgcacgacgcccggcctaaggaaggcgacgaccggcccttcttttggctgttcgagaatgtggtggccatgggagtcagcgacaagcgggatattagccggttcctggagagcaaccccgtgatgatcgatgccaaggaagtgagcgccgcccaccgggccagatacttctggggcaatctgcctggcatgaacagacccctggccagcaccgtgaacgacaagctggagctgcaggagtgcctggagcacggccggatcgccaagttcagcaaggtgagaaccatcaccacccgaagcaacagcatcaaacaaggcaaggaccagcactttcctgtgttcatgaacgagaaggaggacatcctgtggtgtaccgagatggagagagtgttcgggttcccagtccactacacagatgtcagcaacatgtctagactggccagacagagactgctgggaagaagctggtccgtccctgtgatcagacacctgttcgcccctctgaaggagtacttcgcctgcgtgagcagcggcaacagcaacgccaacagccggggccccagcttctctagcggcctggtgccactgtccctgagagggagccacatgggccccatggagatctacaaaaccgtgagcgcctggaagcggcagcctgtgcgcgtgctgagcctgtttcggaatatcgataaagtcctgaaaagcctgggattcctggagagcggctctggctccggcggtggcaccctgaagtacgtggaggatgtgacaaacgtggtcagacgggatgtggagaagtggggccccttcgatctggtgtacggcagcacccaacccctgggcagctcttgtgaccggtgccctggctggtacatgtttcagttccaccggatcctgcagtacgccctgccgagacaggagtcccagcggccattcttttggattttcatggacaacttgctgctgaccgaggatgaccaggaaactaccactcggttcctgcagaccgaagccgtgaccctgcaggacgtgagaggccgggactaccagaacgccatgcgggtgtggtccaacatccctggactgaaaagcaagcacgcacctctgacccctaaagaagaggagtacctgcaggcccaggtgcggagcagaagcaagctggacgcccctaaggtggatctgctggtgaagaattgcctcctgcccctgagagagtacttcaagtatttcagccagaatagtctgcccctgggaggcagcggcggcggcgtgcagggcagcgtgagcttcgaggacgtggccgtgggcttcagccaggaggagtggcagatcctgggccccagccagaaggccctgtactgggacgtgatgctggagaactactgcaacctggtgagcgtgggctaccaggcccccacccccaacagcctgttccagctggagcagggcggccccccctggaccgtggagggcgccgccctgagcagcacctgcagcggctaccaggccaccggcggcccaagcagcggcgcccctcctcccagcggcggcagcccagccggctccccaacctctaccgaggagggcacctctgagtccgccacccccgagagcggccctggcacctccaccgagcccagcgagggcagcgcacccggcagccctgccggcagccccacctccacagaggagggaaccagcaccgagcccagcgaaggcagcgccccaggcaccagcaccgagcctagtgagcaggagattaaacggatcaacaagatcagaagaagacttgtgaaagacagcaacaccaagaaggccggcaagacaggccccatgaaaaccctgctggttagagtgatgacacccgatctgagagagcggctggaaaacctgagaaagaagcctgaaaatatcccccagcccatcagcaatacatctagagccaacctgaataagctgctgaccgattacaccgaaatgaagaaggcgatcctgcatgtgtactgggaagagttccagaaggaccctgtgggcctgatgagccgggtggcccagcctgccagcaagaagatcgatcagaacaagctgaaacctgagatggacgagaagggcaacctgaccaccgccggctttgcctgctctcagtgtggccagcccctgttcgtgtacaagctggagcaggtgtctgagaagggcaaggcttacaccaactacttcggacggtgcaatgtggccgagcacgaaaagctgatcctgctggcccagctgaagcccgagaaggatagcgacgaagccgtgacatatagcctgggaaagtttgggcagagggccctggatttctacagcattcatgtgaccaaggagtccacccaccccgtgaagcccctggcccagatcgccggaaacagatacgcctccggacctgtgggaaaggccctgagcgacgcatgtatgggcacaatcgcctccttcctgtctaagtaccaggacatcatcatcgaacaccagaaggtggtgaagggcaaccagaagagactggagagcctgcgggagctggccggcaaggaaaacctggaataccctagcgtgaccctgccacctcagcctcacaccaaggagggcgttgatgcctacaacgaagtgatcgcccgggtgcgaatgtgggtgaacctgaacctgtggcagaagctgaagctaagcagagatgatgccaagcctctgctgagactgaagggattcccttcctttcctctggtcgagagacaggccaacgaagtggactggtgggacatggtgtgtaacgtgaagaagctgatcaacgagaaaaaggaggatggcaaggtgttttggcagaatctggctggctacaagagacaggaagccctgagaccatacctgagcagcgaggaagatcggaagaagggaaagaaattcgctcggtaccagctgggcgacctgctgctgcacctggaaaagaagcacggcgaggactggggaaaggtgtacgacgaggcctgggagcggattgacaagaaagtggaaggcctgagcaagcacatcaagctggaagaggaacggagaagcgaggacgcccagagcaaggccgccctgaccgactggctgcgggctaaggccagcttcgtgatcgagggcctgaaggaggccgacaaggacgagttctgcagatgcgagctgaagctgcagaagtggtacggggacctgcggggaaagcccttcgccatcgaagccgagaacagcatcctggacatcagcggcttcagcaagcagtacaactgtgccttcatctggcagaaggacggcgtgaagaagctgaacctgtacctgatcatcaactacttcaagggcggcaagctgcggttcaagaagatcaaacctgaagccttcgaagccaacagattctacaccgtgatcaacaaaaagagcggcgagatcgtgcccatggaggtgaacttcaacttcgacgaccccaacctgatcatcctgcctctggcctttggcaagagacagggcagagaattcatctggaacgacctgctgtccctggaaaccggcagcctgaagctggccaacggaagagtgatcgagaagacactgtacaacagaagaacccggcaggatgagcctgccctgttcgtggccctgaccttcgagcggcgggaggtcctggactcctccaatatcaaaccaatgaacctgatcggcgtggcaagaggcgaaaacatccccgccgtgatcgccctgaccgaccccgagggctgcccactgagccggtttaaggatagcctgggaaacccaacccacatcctgagaatcggcgagagctataaggagaagcagcggaccatccaggccaagaaggaggtggagcagcggagagccggcggctacagccggaagtacgccagcaaagccaagaatctggcagacgatatggtgagaaacaccgctagagatctgctgtactacgccgtgacccaggatgccatgctgatcttcgccaacctgagccggggcttcggccggcagggcaagcggaccttcatggccgagagacagtacacacggatggaggactggctgaccgccaagctggcctacgagggcctgagcaagacctacctgtccaagacactggcccagtacacctccaagacatgcagcaactgtgggtttaccatcaccagcgccgactacgacagggtgctggagaagctgaagaagacagcaacaggctggatgaccacaattaacggcaaggagctgaaggtggagggccagattacctactacaacagatacaagagacagaacgtagtcaaggacctgtccgtcgagctggatagactgagcgaagaatctgtgaacaacgacatctcctcctggacaaagggcagaagcggagaagctctgagcctcctgaagaaaagattctcccatagacccgtgcaggagaagttcgtgtgcctgaactgcggcttcgagacacacgcagccgagcaagccgccctgaacatcgccagatcctggctgttcctgcggagccaggagtacaagaaataccagacaaacaagacaaccggcaacaccgataagagagccttcgtcgagacctggcagtccttttaccggaagaagcttaaggaggtgtggaaacctgccgtgcggtctggcggatctggcggaggctccaccagccccaagaaaaagagaaaagtctaagctgccttctgcggggcttgccttctggccatgcccttcttctctcccttgcacctgtacctcttggtctttgaataaagcctgagtaggaaggctagcaaaaaaaaaaaaaaaaaaaaaaaaaaaaaaaaaaaaaaaaaaaaaaaaaaaaaaaaaaaaaaaaaaaaaaaaaaaaaaaa

SEQ ID NO: 13106 - RNA, 5785 nt, synthetic construct
  source 1..5785: mol_type = other RNA
aggaaataagagagaaaagaagagtaagaagaaatataagagccaccatggcccctaagaagaagcgtaaagtgagccggatggaacgcctcgtctacgaggtgcggcagaagtgcagaaacatcgaggacatctgcatctcctgcggatctctgaacgtgaccctggagcacccactgttcatcggcggcatgtgccagaactgtaaaaactgttttctggagtgtgcctatcaatacgacgatgacggctaccagagctactgcaccatctgttgcggcggaagagaggtgctgatgtgtggaaataacaactgctgccggtgcttctgcgtggaatgcgtggacctgctggtgggccccggcgccgcccaggccgctattaaggaagatccttggaactgctacatgtgcggccacaagggcacatacggcctgctgagacggagagaggactggcctagcagactgcagatgttcttcgccaataaccacgaccaggagttcgacccccctaaggtgtaccctcccgtccccgccgagaagagaaagcccatccgggtcctgagcctgttcgatggcatcgccaccggtctgctggtgctgaaggacctgggcatccaggtggataggtacattgcctccgaggtgtgcgaggactccatcaccgtgggaatggtgcgtcatcagggcaagatcatgtacgtgggcgacgtgcggagcgtgacacagaagcatatccaggagtggggccctttcgacctggtgatcggcggcagcccttgcaatgacctgagcatcgtgaacccagcccggaagggcctgtacgagggaaccggcagactgttcttcgagttttacagactgctgcacgacgcccggcctaaggaaggcgacgaccggcccttcttttggctgttcgagaatgtggtggccatgggagtcagcgacaagcgggatattagccggttcctggagagcaaccccgtgatgatcgatgccaaggaagtgagcgccgcccaccgggccagatacttctggggcaatctgcctggcatgaacagacccctggccagcaccgtgaacgacaagctggagctgcaggagtgcctggagcacggccggatcgccaagttcagcaaggtgagaaccatcaccacccgaagcaacagcatcaaacaaggcaaggaccagcactttcctgtgttcatgaacgagaaggaggacatcctgtggtgtaccgagatggagagagtgttcgggttcccagtccactacacagatgtcagcaacatgtctagactggccagacagagactgctgggaagaagctggtccgtccctgtgatcagacacctgttcgcccctctgaaggagtacttcgcctgcgtgagcagcggcaacagcaacgccaacagccggggccccagcttctctagcggcctggtgccactgtccctgagagggagccacatgggccccatggagatctacaaaaccgtgagcgcctggaagcggcagcctgtgcgcgtgctgagcctgtttcggaatatcgataaagtcctgaaaagcctgggattcctggagagcggctctggctccggcggtggcaccctgaagtacgtggaggatgtgacaaacgtggtcagacgggatgtggagaagtggggccccttcgatctggtgtacggcagcacccaacccctgggcagctcttgtgaccggtgccctggctggtacatgtttcagttccaccggatcctgcagtacgccctgccgagacaggagtcccagcggccattcttttggattttcatggacaacttgctgctgaccgaggatgaccaggaaactaccactcggttcctgcagaccgaagccgtgaccctgcaggacgtgagaggccgggactaccagaacgccatgcgggtgtggtccaacatccctggactgaaaagcaagcacgcacctctgacccctaaagaagaggagtacctgcaggcccaggtgcggagcagaagcaagctggacgcccctaaggtggatctgctggtgaagaattgcctcctgcccctgagagagtacttcaagtatttcagccagaatagtctgcccctgggaggcagcggcggcggcagctacggcagcctgagcttcgaggacgtgaccgtgggcttcagccaggaggagtggcagcacctggaccccgcccagaggaccctgtacagggacgtgatgctggagaactacagccacctggtggccgtgggctgctgcgtgcccaagcccgacgtgatcttcaggctggagcagggccagcagccctggatcgtggaggaggagagcctggaccagagctgccccgaggtgtgcaaggtgggcggcccaagcagcggcgcccctcctcccagcggcggcagcccagccggctccccaacctctaccgaggagggcacctctgagtccgccacccccgagagcggccctggcacctccaccgagcccagcgagggcagcgcacccggcagccctgccggcagccccacctccacagaggagggaaccagcaccgagcccagcgaaggcagcgccccaggcaccagcaccgagcctagtgagcaggagattaaacggatcaacaagatcagaagaagacttgtgaaagacagcaacaccaagaaggccggcaagacaggccccatgaaaaccctgctggttagagtgatgacacccgatctgagagagcggctggaaaacctgagaaagaagcctgaaaatatcccccagcccatcagcaatacatctagagccaacctgaataagctgctgaccgattacaccgaaatgaagaaggcgatcctgcatgtgtactgggaagagttccagaaggaccctgtgggcctgatgagccgggtggcccagcctgccagcaagaagatcgatcagaacaagctgaaacctgagatggacgagaagggcaacctgaccaccgccggctttgcctgctctcagtgtggccagcccctgttcgtgtacaagctggagcaggtgtctgagaagggcaaggcttacaccaactacttcggacggtgcaatgtggccgagcacgaaaagctgatcctgctggcccagctgaagcccgagaaggatagcgacgaagccgtgacatatagcctgggaaagtttgggcagagggccctggatttctacagcattcatgtgaccaaggagtccacccaccccgtgaagcccctggcccagatcgccggaaacagatacgcctccggacctgtgggaaaggccctgagcgacgcatgtatgggcacaatcgcctccttcctgtctaagtaccaggacatcatcatcgaacaccagaaggtggtgaagggcaaccagaagagactggagagcctgcgggagctggccggcaaggaaaacctggaataccctagcgtgaccctgccacctcagcctcacaccaaggagggcgttgatgcctacaacgaagtgatcgcccgggtgcgaatgtgggtgaacctgaacctgtggcagaagctgaagctaagcagagatgatgccaagcctctgctgagactgaagggattcccttcctttcctctggtcgagagacaggccaacgaagtggactggtgggacatggtgtgtaacgtgaagaagctgatcaacgagaaaaaggaggatggcaaggtgttttggcagaatctggctggctacaagagacaggaagccctgagaccatacctgagcagcgaggaagatcggaagaagggaaagaaattcgctcggtaccagctgggcgacctgctgctgcacctggaaaagaagcacggcgaggactggggaaaggtgtacgacgaggcctgggagcggattgacaagaaagtggaaggcctgagcaagcacatcaagctggaagaggaacggagaagcgaggacgcccagagcaaggccgccctgaccgactggctgcgggctaaggccagcttcgtgatcgagggcctgaaggaggccgacaaggacgagttctgcagatgcgagctgaagctgcagaagtggtacggggacctgcggggaaagcccttcgccatcgaagccgagaacagcatcctggacatcagcggcttcagcaagcagtacaactgtgccttcatctggcagaaggacggcgtgaagaagctgaacctgtacctgatcatcaactacttcaagggcggcaagctgcggttcaagaagatcaaacctgaagccttcgaagccaacagattctacaccgtgatcaacaaaaagagcggcgagatcgtgcccatggaggtgaacttcaacttcgacgaccccaacctgatcatcctgcctctggcctttggcaagagacagggcagagaattcatctggaacgacctgctgtccctggaaaccggcagcctgaagctggccaacggaagagtgatcgagaagacactgtacaacagaagaacccggcaggatgagcctgccctgttcgtggccctgaccttcgagcggcgggaggtcctggactcctccaatatcaaaccaatgaacctgatcggcgtggcaagaggcgaaaacatccccgccgtgatcgccctgaccgaccccgagggctgcccactgagccggtttaaggatagcctgggaaacccaacccacatcctgagaatcggcgagagctataaggagaagcagcggaccatccaggccaagaaggaggtggagcagcggagagccggcggctacagccggaagtacgccagcaaagccaagaatctggcagacgatatggtgagaaacaccgctagagatctgctgtactacgccgtgacccaggatgccatgctgatcttcgccaacctgagccggggcttcggccggcagggcaagcggaccttcatggccgagagacagtacacacggatggaggactggctgaccgccaagctggcctacgagggcctgagcaagacctacctgtccaagacactggcccagtacacctccaagacatgcagcaactgtgggtttaccatcaccagcgccgactacgacagggtgctggagaagctgaagaagacagcaacaggctggatgaccacaattaacggcaaggagctgaaggtggagggccagattacctactacaacagatacaagagacagaacgtagtcaaggacctgtccgtcgagctggatagactgagcgaagaatctgtgaacaacgacatctcctcctggacaaagggcagaagcggagaagctctgagcctcctgaagaaaagattctcccatagacccgtgcaggagaagttcgtgtgcctgaactgcggcttcgagacacacgcagccgagcaagccgccctgaacatcgccagatcctggctgttcctgcggagccaggagtacaagaaataccagacaaacaagacaaccggcaacaccgataagagagccttcgtcgagacctggcagtccttttaccggaagaagcttaaggaggtgtggaaacctgccgtgcggtctggcggatctggcggaggctccaccagccccaagaaaaagagaaaagtctaagctgccttctgcggggcttgccttctggccatgcccttcttctctcccttgcacctgtacctcttggtctttgaataaagcctgagtaggaaggctagcaaaaaaaaaaaaaaaaaaaaaaaaaaaaaaaaaaaaaaaaaaaaaaaaaaaaaaaaaaaaaaaaaaaaaaaaaaaaaaaa

SEQ ID NO: 13107 - RNA, 5785 nt, synthetic construct
  source 1..5785: mol_type = other RNA
aggaaataagagagaaaagaagagtaagaagaaatataagagccaccatggcccctaagaagaagcgtaaagtgagccggatggaacgcctcgtctacgaggtgcggcagaagtgcagaaacatcgaggacatctgcatctcctgcggatctctgaacgtgaccctggagcacccactgttcatcggcggcatgtgccagaactgtaaaaactgttttctggagtgtgcctatcaatacgacgatgacggctaccagagctactgcaccatctgttgcggcggaagagaggtgctgatgtgtggaaataacaactgctgccggtgcttctgcgtggaatgcgtggacctgctggtgggccccggcgccgcccaggccgctattaaggaagatccttggaactgctacatgtgcggccacaagggcacatacggcctgctgagacggagagaggactggcctagcagactgcagatgttcttcgccaataaccacgaccaggagttcgacccccctaaggtgtaccctcccgtccccgccgagaagagaaagcccatccgggtcctgagcctgttcgatggcatcgccaccggtctgctggtgctgaaggacctgggcatccaggtggataggtacattgcctccgaggtgtgcgaggactccatcaccgtgggaatggtgcgtcatcagggcaagatcatgtacgtgggcgacgtgcggagcgtgacacagaagcatatccaggagtggggccctttcgacctggtgatcggcggcagcccttgcaatgacctgagcatcgtgaacccagcccggaagggcctgtacgagggaaccggcagactgttcttcgagttttacagactgctgcacgacgcccggcctaaggaaggcgacgaccggcccttcttttggctgttcgagaatgtggtggccatgggagtcagcgacaagcgggatattagccggttcctggagagcaaccccgtgatgatcgatgccaaggaagtgagcgccgcccaccgggccagatacttctggggcaatctgcctggcatgaacagacccctggccagcaccgtgaacgacaagctggagctgcaggagtgcctggagcacggccggatcgccaagttcagcaaggtgagaaccatcaccacccgaagcaacagcatcaaacaaggcaaggaccagcactttcctgtgttcatgaacgagaaggaggacatcctgtggtgtaccgagatggagagagtgttcgggttcccagtccactacacagatgtcagcaacatgtctagactggccagacagagactgctgggaagaagctggtccgtccctgtgatcagacacctgttcgcccctctgaaggagtacttcgcctgcgtgagcagcggcaacagcaacgccaacagccggggccccagcttctctagcggcctggtgccactgtccctgagagggagccacatgggccccatggagatctacaaaaccgtgagcgcctggaagcggcagcctgtgcgcgtgctgagcctgtttcggaatatcgataaagtcctgaaaagcctgggattcctggagagcggctctggctccggcggtggcaccctgaagtacgtggaggatgtgacaaacgtggtcagacgggatgtggagaagtggggccccttcgatctggtgtacggcagcacccaacccctgggcagctcttgtgaccggtgccctggctggtacatgtttcagttccaccggatcctgcagtacgccctgccgagacaggagtcccagcggccattcttttggattttcatggacaacttgctgctgaccgaggatgaccaggaaactaccactcggttcctgcagaccgaagccgtgaccctgcaggacgtgagaggccgggactaccagaacgccatgcgggtgtggtccaacatccctggactgaaaagcaagcacgcacctctgacccctaaagaagaggagtacctgcaggcccaggtgcggagcagaagcaagctggacgcccctaaggtggatctgctggtgaagaattgcctcctgcccctgagagagtacttcaagtatttcagccagaatagtctgcccctgggaggcagcggcggcggcgcccacggcagcgtgatgttcagcgacgtgagcatcgacttcagccaggaggagtgggagtacctgaacctggagcagagggacctgtacaggaacgtgatgctggagaactacagcaacctggtgagcctgggctgcttcatcagcaagcccgacgtgatcagcctgctggagcagggcaaggagccctggaaggtggtgaggaagggcaggaggccctacagcggcctggagaccaagaagggcggcccaagcagcggcgcccctcctcccagcggcggcagcccagccggctccccaacctctaccgaggagggcacctctgagtccgccacccccgagagcggccctggcacctccaccgagcccagcgagggcagcgcacccggcagccctgccggcagccccacctccacagaggagggaaccagcaccgagcccagcgaaggcagcgccccaggcaccagcaccgagcctagtgagcaggagattaaacggatcaacaagatcagaagaagacttgtgaaagacagcaacaccaagaaggccggcaagacaggccccatgaaaaccctgctggttagagtgatgacacccgatctgagagagcggctggaaaacctgagaaagaagcctgaaaatatcccccagcccatcagcaatacatctagagccaacctgaataagctgctgaccgattacaccgaaatgaagaaggcgatcctgcatgtgtactgggaagagttccagaaggaccctgtgggcctgatgagccgggtggcccagcctgccagcaagaagatcgatcagaacaagctgaaacctgagatggacgagaagggcaacctgaccaccgccggctttgcctgctctcagtgtggccagcccctgttcgtgtacaagctggagcaggtgtctgagaagggcaaggcttacaccaactacttcggacggtgcaatgtggccgagcacgaaaagctgatcctgctggcccagctgaagcccgagaaggatagcgacgaagccgtgacatatagcctgggaaagtttgggcagagggccctggatttctacagcattcatgtgaccaaggagtccacccaccccgtgaagcccctggcccagatcgccggaaacagatacgcctccggacctgtgggaaaggccctgagcgacgcatgtatgggcacaatcgcctccttcctgtctaagtaccaggacatcatcatcgaacaccagaaggtggtgaagggcaaccagaagagactggagagcctgcgggagctggccggcaaggaaaacctggaataccctagcgtgaccctgccacctcagcctcacaccaaggagggcgttgatgcctacaacgaagtgatcgcccgggtgcgaatgtgggtgaacctgaacctgtggcagaagctgaagctaagcagagatgatgccaagcctctgctgagactgaagggattcccttcctttcctctggtcgagagacaggccaacgaagtggactggtgggacatggtgtgtaacgtgaagaagctgatcaacgagaaaaaggaggatggcaaggtgttttggcagaatctggctggctacaagagacaggaagccctgagaccatacctgagcagcgaggaagatcggaagaagggaaagaaattcgctcggtaccagctgggcgacctgctgctgcacctggaaaagaagcacggcgaggactggggaaaggtgtacgacgaggcctgggagcggattgacaagaaagtggaaggcctgagcaagcacatcaagctggaagaggaacggagaagcgaggacgcccagagcaaggccgccctgaccgactggctgcgggctaaggccagcttcgtgatcgagggcctgaaggaggccgacaaggacgagttctgcagatgcgagctgaagctgcagaagtggtacggggacctgcggggaaagcccttcgccatcgaagccgagaacagcatcctggacatcagcggcttcagcaagcagtacaactgtgccttcatctggcagaaggacggcgtgaagaagctgaacctgtacctgatcatcaactacttcaagggcggcaagctgcggttcaagaagatcaaacctgaagccttcgaagccaacagattctacaccgtgatcaacaaaaagagcggcgagatcgtgcccatggaggtgaacttcaacttcgacgaccccaacctgatcatcctgcctctggcctttggcaagagacagggcagagaattcatctggaacgacctgctgtccctggaaaccggcagcctgaagctggccaacggaagagtgatcgagaagacactgtacaacagaagaacccggcaggatgagcctgccctgttcgtggccctgaccttcgagcggcgggaggtcctggactcctccaatatcaaaccaatgaacctgatcggcgtggcaagaggcgaaaacatccccgccgtgatcgccctgaccgaccccgagggctgcccactgagccggtttaaggatagcctgggaaacccaacccacatcctgagaatcggcgagagctataaggagaagcagcggaccatccaggccaagaaggaggtggagcagcggagagccggcggctacagccggaagtacgccagcaaagccaagaatctggcagacgatatggtgagaaacaccgctagagatctgctgtactacgccgtgacccaggatgccatgctgatcttcgccaacctgagccggggcttcggccggcagggcaagcggaccttcatggccgagagacagtacacacggatggaggactggctgaccgccaagctggcctacgagggcctgagcaagacctacctgtccaagacactggcccagtacacctccaagacatgcagcaactgtgggtttaccatcaccagcgccgactacgacagggtgctggagaagctgaagaagacagcaacaggctggatgaccacaattaacggcaaggagctgaaggtggagggccagattacctactacaacagatacaagagacagaacgtagtcaaggacctgtccgtcgagctggatagactgagcgaagaatctgtgaacaacgacatctcctcctggacaaagggcagaagcggagaagctctgagcctcctgaagaaaagattctcccatagacccgtgcaggagaagttcgtgtgcctgaactgcggcttcgagacacacgcagccgagcaagccgccctgaacatcgccagatcctggctgttcctgcggagccaggagtacaagaaataccagacaaacaagacaaccggcaacaccgataagagagccttcgtcgagacctggcagtccttttaccggaagaagcttaaggaggtgtggaaacctgccgtgcggtctggcggatctggcggaggctccaccagccccaagaaaaagagaaaagtctaagctgccttctgcggggcttgccttctggccatgcccttcttctctcccttgcacctgtacctcttggtctttgaataaagcctgagtaggaaggctagcaaaaaaaaaaaaaaaaaaaaaaaaaaaaaaaaaaaaaaaaaaaaaaaaaaaaaaaaaaaaaaaaaaaaaaaaaaaaaaaa

SEQ ID NO: 13108 - RNA, 5785 nt, synthetic construct
  source 1..5785: mol_type = other RNA
aggaaataagagagaaaagaagagtaagaagaaatataagagccaccatggcccctaagaagaagcgtaaagtgagccggatggaacgcctcgtctacgaggtgcggcagaagtgcagaaacatcgaggacatctgcatctcctgcggatctctgaacgtgaccctggagcacccactgttcatcggcggcatgtgccagaactgtaaaaactgttttctggagtgtgcctatcaatacgacgatgacggctaccagagctactgcaccatctgttgcggcggaagagaggtgctgatgtgtggaaataacaactgctgccggtgcttctgcgtggaatgcgtggacctgctggtgggccccggcgccgcccaggccgctattaaggaagatccttggaactgctacatgtgcggccacaagggcacatacggcctgctgagacggagagaggactggcctagcagactgcagatgttcttcgccaataaccacgaccaggagttcgacccccctaaggtgtaccctcccgtccccgccgagaagagaaagcccatccgggtcctgagcctgttcgatggcatcgccaccggtctgctggtgctgaaggacctgggcatccaggtggataggtacattgcctccgaggtgtgcgaggactccatcaccgtgggaatggtgcgtcatcagggcaagatcatgtacgtgggcgacgtgcggagcgtgacacagaagcatatccaggagtggggccctttcgacctggtgatcggcggcagcccttgcaatgacctgagcatcgtgaacccagcccggaagggcctgtacgagggaaccggcagactgttcttcgagttttacagactgctgcacgacgcccggcctaaggaaggcgacgaccggcccttcttttggctgttcgagaatgtggtggccatgggagtcagcgacaagcgggatattagccggttcctggagagcaaccccgtgatgatcgatgccaaggaagtgagcgccgcccaccgggccagatacttctggggcaatctgcctggcatgaacagacccctggccagcaccgtgaacgacaagctggagctgcaggagtgcctggagcacggccggatcgccaagttcagcaaggtgagaaccatcaccacccgaagcaacagcatcaaacaaggcaaggaccagcactttcctgtgttcatgaacgagaaggaggacatcctgtggtgtaccgagatggagagagtgttcgggttcccagtccactacacagatgtcagcaacatgtctagactggccagacagagactgctgggaagaagctggtccgtccctgtgatcagacacctgttcgcccctctgaaggagtacttcgcctgcgtgagcagcggcaacagcaacgccaacagccggggccccagcttctctagcggcctggtgccactgtccctgagagggagccacatgggccccatggagatctacaaaaccgtgagcgcctggaagcggcagcctgtgcgcgtgctgagcctgtttcggaatatcgataaagtcctgaaaagcctgggattcctggagagcggctctggctccggcggtggcaccctgaagtacgtggaggatgtgacaaacgtggtcagacgggatgtggagaagtggggccccttcgatctggtgtacggcagcacccaacccctgggcagctcttgtgaccggtgccctggctggtacatgtttcagttccaccggatcctgcagtacgccctgccgagacaggagtcccagcggccattcttttggattttcatggacaacttgctgctgaccgaggatgaccaggaaactaccactcggttcctgcagaccgaagccgtgaccctgcaggacgtgagaggccgggactaccagaacgccatgcgggtgtggtccaacatccctggactgaaaagcaagcacgcacctctgacccctaaagaagaggagtacctgcaggcccaggtgcggagcagaagcaagctggacgcccctaaggtggatctgctggtgaagaattgcctcctgcccctgagagagtacttcaagtatttcagccagaatagtctgcccctgggaggcagcggcggcggcgaggagctgcccgtggtgttcgaggacgtggccgtgtacttcaccagggaggagtggggcatgctggacaagaggcagaaggagctgtacagggacgtgatgaggatgaactacgagctgctggccagcctgggccccgccgccgccaagcccgacctgatcagcaagctggagaggagggccgccccctggatcagggaccccaacggccccaagtggggcaagggcaggcccagcggcaacggcggcccaagcagcggcgcccctcctcccagcggcggcagcccagccggctccccaacctctaccgaggagggcacctctgagtccgccacccccgagagcggccctggcacctccaccgagcccagcgagggcagcgcacccggcagccctgccggcagccccacctccacagaggagggaaccagcaccgagcccagcgaaggcagcgccccaggcaccagcaccgagcctagtgagcaggagattaaacggatcaacaagatcagaagaagacttgtgaaagacagcaacaccaagaaggccggcaagacaggccccatgaaaaccctgctggttagagtgatgacacccgatctgagagagcggctggaaaacctgagaaagaagcctgaaaatatcccccagcccatcagcaatacatctagagccaacctgaataagctgctgaccgattacaccgaaatgaagaaggcgatcctgcatgtgtactgggaagagttccagaaggaccctgtgggcctgatgagccgggtggcccagcctgccagcaagaagatcgatcagaacaagctgaaacctgagatggacgagaagggcaacctgaccaccgccggctttgcctgctctcagtgtggccagcccctgttcgtgtacaagctggagcaggtgtctgagaagggcaaggcttacaccaactacttcggacggtgcaatgtggccgagcacgaaaagctgatcctgctggcccagctgaagcccgagaaggatagcgacgaagccgtgacatatagcctgggaaagtttgggcagagggccctggatttctacagcattcatgtgaccaaggagtccacccaccccgtgaagcccctggcccagatcgccggaaacagatacgcctccggacctgtgggaaaggccctgagcgacgcatgtatgggcacaatcgcctccttcctgtctaagtaccaggacatcatcatcgaacaccagaaggtggtgaagggcaaccagaagagactggagagcctgcgggagctggccggcaaggaaaacctggaataccctagcgtgaccctgccacctcagcctcacaccaaggagggcgttgatgcctacaacgaagtgatcgcccgggtgcgaatgtgggtgaacctgaacctgtggcagaagctgaagctaagcagagatgatgccaagcctctgctgagactgaagggattcccttcctttcctctggtcgagagacaggccaacgaagtggactggtgggacatggtgtgtaacgtgaagaagctgatcaacgagaaaaaggaggatggcaaggtgttttggcagaatctggctggctacaagagacaggaagccctgagaccatacctgagcagcgaggaagatcggaagaagggaaagaaattcgctcggtaccagctgggcgacctgctgctgcacctggaaaagaagcacggcgaggactggggaaaggtgtacgacgaggcctgggagcggattgacaagaaagtggaaggcctgagcaagcacatcaagctggaagaggaacggagaagcgaggacgcccagagcaaggccgccctgaccgactggctgcgggctaaggccagcttcgtgatcgagggcctgaaggaggccgacaaggacgagttctgcagatgcgagctgaagctgcagaagtggtacggggacctgcggggaaagcccttcgccatcgaagccgagaacagcatcctggacatcagcggcttcagcaagcagtacaactgtgccttcatctggcagaaggacggcgtgaagaagctgaacctgtacctgatcatcaactacttcaagggcggcaagctgcggttcaagaagatcaaacctgaagccttcgaagccaacagattctacaccgtgatcaacaaaaagagcggcgagatcgtgcccatggaggtgaacttcaacttcgacgaccccaacctgatcatcctgcctctggcctttggcaagagacagggcagagaattcatctggaacgacctgctgtccctggaaaccggcagcctgaagctggccaacggaagagtgatcgagaagacactgtacaacagaagaacccggcaggatgagcctgccctgttcgtggccctgaccttcgagcggcgggaggtcctggactcctccaatatcaaaccaatgaacctgatcggcgtggcaagaggcgaaaacatccccgccgtgatcgccctgaccgaccccgagggctgcccactgagccggtttaaggatagcctgggaaacccaacccacatcctgagaatcggcgagagctataaggagaagcagcggaccatccaggccaagaaggaggtggagcagcggagagccggcggctacagccggaagtacgccagcaaagccaagaatctggcagacgatatggtgagaaacaccgctagagatctgctgtactacgccgtgacccaggatgccatgctgatcttcgccaacctgagccggggcttcggccggcagggcaagcggaccttcatggccgagagacagtacacacggatggaggactggctgaccgccaagctggcctacgagggcctgagcaagacctacctgtccaagacactggcccagtacacctccaagacatgcagcaactgtgggtttaccatcaccagcgccgactacgacagggtgctggagaagctgaagaagacagcaacaggctggatgaccacaattaacggcaaggagctgaaggtggagggccagattacctactacaacagatacaagagacagaacgtagtcaaggacctgtccgtcgagctggatagactgagcgaagaatctgtgaacaacgacatctcctcctggacaaagggcagaagcggagaagctctgagcctcctgaagaaaagattctcccatagacccgtgcaggagaagttcgtgtgcctgaactgcggcttcgagacacacgcagccgagcaagccgccctgaacatcgccagatcctggctgttcctgcggagccaggagtacaagaaataccagacaaacaagacaaccggcaacaccgataagagagccttcgtcgagacctggcagtccttttaccggaagaagcttaaggaggtgtggaaacctgccgtgcggtctggcggatctggcggaggctccaccagccccaagaaaaagagaaaagtctaagctgccttctgcggggcttgccttctggccatgcccttcttctctcccttgcacctgtacctcttggtctttgaataaagcctgagtaggaaggctagcaaaaaaaaaaaaaaaaaaaaaaaaaaaaaaaaaaaaaaaaaaaaaaaaaaaaaaaaaaaaaaaaaaaaaaaaaaaaaaaa

SEQ ID NO: 13109 - RNA, 5785 nt, synthetic construct
  source 1..5785: mol_type = other RNA
aggaaataagagagaaaagaagagtaagaagaaatataagagccaccatggcccctaagaagaagcgtaaagtgagccggatggaacgcctcgtctacgaggtgcggcagaagtgcagaaacatcgaggacatctgcatctcctgcggatctctgaacgtgaccctggagcacccactgttcatcggcggcatgtgccagaactgtaaaaactgttttctggagtgtgcctatcaatacgacgatgacggctaccagagctactgcaccatctgttgcggcggaagagaggtgctgatgtgtggaaataacaactgctgccggtgcttctgcgtggaatgcgtggacctgctggtgggccccggcgccgcccaggccgctattaaggaagatccttggaactgctacatgtgcggccacaagggcacatacggcctgctgagacggagagaggactggcctagcagactgcagatgttcttcgccaataaccacgaccaggagttcgacccccctaaggtgtaccctcccgtccccgccgagaagagaaagcccatccgggtcctgagcctgttcgatggcatcgccaccggtctgctggtgctgaaggacctgggcatccaggtggataggtacattgcctccgaggtgtgcgaggactccatcaccgtgggaatggtgcgtcatcagggcaagatcatgtacgtgggcgacgtgcggagcgtgacacagaagcatatccaggagtggggccctttcgacctggtgatcggcggcagcccttgcaatgacctgagcatcgtgaacccagcccggaagggcctgtacgagggaaccggcagactgttcttcgagttttacagactgctgcacgacgcccggcctaaggaaggcgacgaccggcccttcttttggctgttcgagaatgtggtggccatgggagtcagcgacaagcgggatattagccggttcctggagagcaaccccgtgatgatcgatgccaaggaagtgagcgccgcccaccgggccagatacttctggggcaatctgcctggcatgaacagacccctggccagcaccgtgaacgacaagctggagctgcaggagtgcctggagcacggccggatcgccaagttcagcaaggtgagaaccatcaccacccgaagcaacagcatcaaacaaggcaaggaccagcactttcctgtgttcatgaacgagaaggaggacatcctgtggtgtaccgagatggagagagtgttcgggttcccagtccactacacagatgtcagcaacatgtctagactggccagacagagactgctgggaagaagctggtccgtccctgtgatcagacacctgttcgcccctctgaaggagtacttcgcctgcgtgagcagcggcaacagcaacgccaacagccggggccccagcttctctagcggcctggtgccactgtccctgagagggagccacatgggccccatggagatctacaaaaccgtgagcgcctggaagcggcagcctgtgcgcgtgctgagcctgtttcggaatatcgataaagtcctgaaaagcctgggattcctggagagcggctctggctccggcggtggcaccctgaagtacgtggaggatgtgacaaacgtggtcagacgggatgtggagaagtggggccccttcgatctggtgtacggcagcacccaacccctgggcagctcttgtgaccggtgccctggctggtacatgtttcagttccaccggatcctgcagtacgccctgccgagacaggagtcccagcggccattcttttggattttcatggacaacttgctgctgaccgaggatgaccaggaaactaccactcggttcctgcagaccgaagccgtgaccctgcaggacgtgagaggccgggactaccagaacgccatgcgggtgtggtccaacatccctggactgaaaagcaagcacgcacctctgacccctaaagaagaggagtacctgcaggcccaggtgcggagcagaagcaagctggacgcccctaaggtggatctgctggtgaagaattgcctcctgcccctgagagagtacttcaagtatttcagccagaatagtctgcccctgggaggcagcggcggcggcaaggtgaagcagttcagcttccagagcctgctgaccttcaaggacctggccatcaacttcagcaaggaggagtgggagtacctgaacaccagccagaaggacctgtacaaggacgtgatgctggagaactacagcaacctggtgagcgtgggcctgagcgagagcaagcccgagctggtgacctgcctggagcagaacaaggagccctggatggtgcacatcgtggaggccgagggcctggagggcggcccaagcagcggcgcccctcctcccagcggcggcagcccagccggctccccaacctctaccgaggagggcacctctgagtccgccacccccgagagcggccctggcacctccaccgagcccagcgagggcagcgcacccggcagccctgccggcagccccacctccacagaggagggaaccagcaccgagcccagcgaaggcagcgccccaggcaccagcaccgagcctagtgagcaggagattaaacggatcaacaagatcagaagaagacttgtgaaagacagcaacaccaagaaggccggcaagacaggccccatgaaaaccctgctggttagagtgatgacacccgatctgagagagcggctggaaaacctgagaaagaagcctgaaaatatcccccagcccatcagcaatacatctagagccaacctgaataagctgctgaccgattacaccgaaatgaagaaggcgatcctgcatgtgtactgggaagagttccagaaggaccctgtgggcctgatgagccgggtggcccagcctgccagcaagaagatcgatcagaacaagctgaaacctgagatggacgagaagggcaacctgaccaccgccggctttgcctgctctcagtgtggccagcccctgttcgtgtacaagctggagcaggtgtctgagaagggcaaggcttacaccaactacttcggacggtgcaatgtggccgagcacgaaaagctgatcctgctggcccagctgaagcccgagaaggatagcgacgaagccgtgacatatagcctgggaaagtttgggcagagggccctggatttctacagcattcatgtgaccaaggagtccacccaccccgtgaagcccctggcccagatcgccggaaacagatacgcctccggacctgtgggaaaggccctgagcgacgcatgtatgggcacaatcgcctccttcctgtctaagtaccaggacatcatcatcgaacaccagaaggtggtgaagggcaaccagaagagactggagagcctgcgggagctggccggcaaggaaaacctggaataccctagcgtgaccctgccacctcagcctcacaccaaggagggcgttgatgcctacaacgaagtgatcgcccgggtgcgaatgtgggtgaacctgaacctgtggcagaagctgaagctaagcagagatgatgccaagcctctgctgagactgaagggattcccttcctttcctctggtcgagagacaggccaacgaagtggactggtgggacatggtgtgtaacgtgaagaagctgatcaacgagaaaaaggaggatggcaaggtgttttggcagaatctggctggctacaagagacaggaagccctgagaccatacctgagcagcgaggaagatcggaagaagggaaagaaattcgctcggtaccagctgggcgacctgctgctgcacctggaaaagaagcacggcgaggactggggaaaggtgtacgacgaggcctgggagcggattgacaagaaagtggaaggcctgagcaagcacatcaagctggaagaggaacggagaagcgaggacgcccagagcaaggccgccctgaccgactggctgcgggctaaggccagcttcgtgatcgagggcctgaaggaggccgacaaggacgagttctgcagatgcgagctgaagctgcagaagtggtacggggacctgcggggaaagcccttcgccatcgaagccgagaacagcatcctggacatcagcggcttcagcaagcagtacaactgtgccttcatctggcagaaggacggcgtgaagaagctgaacctgtacctgatcatcaactacttcaagggcggcaagctgcggttcaagaagatcaaacctgaagccttcgaagccaacagattctacaccgtgatcaacaaaaagagcggcgagatcgtgcccatggaggtgaacttcaacttcgacgaccccaacctgatcatcctgcctctggcctttggcaagagacagggcagagaattcatctggaacgacctgctgtccctggaaaccggcagcctgaagctggccaacggaagagtgatcgagaagacactgtacaacagaagaacccggcaggatgagcctgccctgttcgtggccctgaccttcgagcggcgggaggtcctggactcctccaatatcaaaccaatgaacctgatcggcgtggcaagaggcgaaaacatccccgccgtgatcgccctgaccgaccccgagggctgcccactgagccggtttaaggatagcctgggaaacccaacccacatcctgagaatcggcgagagctataaggagaagcagcggaccatccaggccaagaaggaggtggagcagcggagagccggcggctacagccggaagtacgccagcaaagccaagaatctggcagacgatatggtgagaaacaccgctagagatctgctgtactacgccgtgacccaggatgccatgctgatcttcgccaacctgagccggggcttcggccggcagggcaagcggaccttcatggccgagagacagtacacacggatggaggactggctgaccgccaagctggcctacgagggcctgagcaagacctacctgtccaagacactggcccagtacacctccaagacatgcagcaactgtgggtttaccatcaccagcgccgactacgacagggtgctggagaagctgaagaagacagcaacaggctggatgaccacaattaacggcaaggagctgaaggtggagggccagattacctactacaacagatacaagagacagaacgtagtcaaggacctgtccgtcgagctggatagactgagcgaagaatctgtgaacaacgacatctcctcctggacaaagggcagaagcggagaagctctgagcctcctgaagaaaagattctcccatagacccgtgcaggagaagttcgtgtgcctgaactgcggcttcgagacacacgcagccgagcaagccgccctgaacatcgccagatcctggctgttcctgcggagccaggagtacaagaaataccagacaaacaagacaaccggcaacaccgataagagagccttcgtcgagacctggcagtccttttaccggaagaagcttaaggaggtgtggaaacctgccgtgcggtctggcggatctggcggaggctccaccagccccaagaaaaagagaaaagtctaagctgccttctgcggggcttgccttctggccatgcccttcttctctcccttgcacctgtacctcttggtctttgaataaagcctgagtaggaaggctagcaaaaaaaaaaaaaaaaaaaaaaaaaaaaaaaaaaaaaaaaaaaaaaaaaaaaaaaaaaaaaaaaaaaaaaaaaaaaaaaa

SEQ ID NO: 13110 - RNA, 5785 nt, synthetic construct
  source 1..5785: mol_type = other RNA
aggaaataagagagaaaagaagagtaagaagaaatataagagccaccatggcccctaagaagaagcgtaaagtgagccggatggaacgcctcgtctacgaggtgcggcagaagtgcagaaacatcgaggacatctgcatctcctgcggatctctgaacgtgaccctggagcacccactgttcatcggcggcatgtgccagaactgtaaaaactgttttctggagtgtgcctatcaatacgacgatgacggctaccagagctactgcaccatctgttgcggcggaagagaggtgctgatgtgtggaaataacaactgctgccggtgcttctgcgtggaatgcgtggacctgctggtgggccccggcgccgcccaggccgctattaaggaagatccttggaactgctacatgtgcggccacaagggcacatacggcctgctgagacggagagaggactggcctagcagactgcagatgttcttcgccaataaccacgaccaggagttcgacccccctaaggtgtaccctcccgtccccgccgagaagagaaagcccatccgggtcctgagcctgttcgatggcatcgccaccggtctgctggtgctgaaggacctgggcatccaggtggataggtacattgcctccgaggtgtgcgaggactccatcaccgtgggaatggtgcgtcatcagggcaagatcatgtacgtgggcgacgtgcggagcgtgacacagaagcatatccaggagtggggccctttcgacctggtgatcggcggcagcccttgcaatgacctgagcatcgtgaacccagcccggaagggcctgtacgagggaaccggcagactgttcttcgagttttacagactgctgcacgacgcccggcctaaggaaggcgacgaccggcccttcttttggctgttcgagaatgtggtggccatgggagtcagcgacaagcgggatattagccggttcctggagagcaaccccgtgatgatcgatgccaaggaagtgagcgccgcccaccgggccagatacttctggggcaatctgcctggcatgaacagacccctggccagcaccgtgaacgacaagctggagctgcaggagtgcctggagcacggccggatcgccaagttcagcaaggtgagaaccatcaccacccgaagcaacagcatcaaacaaggcaaggaccagcactttcctgtgttcatgaacgagaaggaggacatcctgtggtgtaccgagatggagagagtgttcgggttcccagtccactacacagatgtcagcaacatgtctagactggccagacagagactgctgggaagaagctggtccgtccctgtgatcagacacctgttcgcccctctgaaggagtacttcgcctgcgtgagcagcggcaacagcaacgccaacagccggggccccagcttctctagcggcctggtgccactgtccctgagagggagccacatgggccccatggagatctacaaaaccgtgagcgcctggaagcggcagcctgtgcgcgtgctgagcctgtttcggaatatcgataaagtcctgaaaagcctgggattcctggagagcggctctggctccggcggtggcaccctgaagtacgtggaggatgtgacaaacgtggtcagacgggatgtggagaagtggggccccttcgatctggtgtacggcagcacccaacccctgggcagctcttgtgaccggtgccctggctggtacatgtttcagttccaccggatcctgcagtacgccctgccgagacaggagtcccagcggccattcttttggattttcatggacaacttgctgctgaccgaggatgaccaggaaactaccactcggttcctgcagaccgaagccgtgaccctgcaggacgtgagaggccgggactaccagaacgccatgcgggtgtggtccaacatccctggactgaaaagcaagcacgcacctctgacccctaaagaagaggagtacctgcaggcccaggtgcggagcagaagcaagctggacgcccctaaggtggatctgctggtgaagaattgcctcctgcccctgagagagtacttcaagtatttcagccagaatagtctgcccctgggaggcagcggcggcggcttccaggacagcgtgaccttcgaggacgtggccgtgaggttcagcagcggcgagtggcagtgcctgaccagggcccagaggcacctgtacgccgacgtgatgctggagaactactggaacgtgatcagcgtgggcttcgccgtgcccaagccccccctgatcagccacctggagcagggcgccgagccctgcgtgcaggacctgcaggacggcggcttcctgagctgcagcttccccgtgagcggcggcccaagcagcggcgcccctcctcccagcggcggcagcccagccggctccccaacctctaccgaggagggcacctctgagtccgccacccccgagagcggccctggcacctccaccgagcccagcgagggcagcgcacccggcagccctgccggcagccccacctccacagaggagggaaccagcaccgagcccagcgaaggcagcgccccaggcaccagcaccgagcctagtgagcaggagattaaacggatcaacaagatcagaagaagacttgtgaaagacagcaacaccaagaaggccggcaagacaggccccatgaaaaccctgctggttagagtgatgacacccgatctgagagagcggctggaaaacctgagaaagaagcctgaaaatatcccccagcccatcagcaatacatctagagccaacctgaataagctgctgaccgattacaccgaaatgaagaaggcgatcctgcatgtgtactgggaagagttccagaaggaccctgtgggcctgatgagccgggtggcccagcctgccagcaagaagatcgatcagaacaagctgaaacctgagatggacgagaagggcaacctgaccaccgccggctttgcctgctctcagtgtggccagcccctgttcgtgtacaagctggagcaggtgtctgagaagggcaaggcttacaccaactacttcggacggtgcaatgtggccgagcacgaaaagctgatcctgctggcccagctgaagcccgagaaggatagcgacgaagccgtgacatatagcctgggaaagtttgggcagagggccctggatttctacagcattcatgtgaccaaggagtccacccaccccgtgaagcccctggcccagatcgccggaaacagatacgcctccggacctgtgggaaaggccctgagcgacgcatgtatgggcacaatcgcctccttcctgtctaagtaccaggacatcatcatcgaacaccagaaggtggtgaagggcaaccagaagagactggagagcctgcgggagctggccggcaaggaaaacctggaataccctagcgtgaccctgccacctcagcctcacaccaaggagggcgttgatgcctacaacgaagtgatcgcccgggtgcgaatgtgggtgaacctgaacctgtggcagaagctgaagctaagcagagatgatgccaagcctctgctgagactgaagggattcccttcctttcctctggtcgagagacaggccaacgaagtggactggtgggacatggtgtgtaacgtgaagaagctgatcaacgagaaaaaggaggatggcaaggtgttttggcagaatctggctggctacaagagacaggaagccctgagaccatacctgagcagcgaggaagatcggaagaagggaaagaaattcgctcggtaccagctgggcgacctgctgctgcacctggaaaagaagcacggcgaggactggggaaaggtgtacgacgaggcctgggagcggattgacaagaaagtggaaggcctgagcaagcacatcaagctggaagaggaacggagaagcgaggacgcccagagcaaggccgccctgaccgactggctgcgggctaaggccagcttcgtgatcgagggcctgaaggaggccgacaaggacgagttctgcagatgcgagctgaagctgcagaagtggtacggggacctgcggggaaagcccttcgccatcgaagccgagaacagcatcctggacatcagcggcttcagcaagcagtacaactgtgccttcatctggcagaaggacggcgtgaagaagctgaacctgtacctgatcatcaactacttcaagggcggcaagctgcggttcaagaagatcaaacctgaagccttcgaagccaacagattctacaccgtgatcaacaaaaagagcggcgagatcgtgcccatggaggtgaacttcaacttcgacgaccccaacctgatcatcctgcctctggcctttggcaagagacagggcagagaattcatctggaacgacctgctgtccctggaaaccggcagcctgaagctggccaacggaagagtgatcgagaagacactgtacaacagaagaacccggcaggatgagcctgccctgttcgtggccctgaccttcgagcggcgggaggtcctggactcctccaatatcaaaccaatgaacctgatcggcgtggcaagaggcgaaaacatccccgccgtgatcgccctgaccgaccccgagggctgcccactgagccggtttaaggatagcctgggaaacccaacccacatcctgagaatcggcgagagctataaggagaagcagcggaccatccaggccaagaaggaggtggagcagcggagagccggcggctacagccggaagtacgccagcaaagccaagaatctggcagacgatatggtgagaaacaccgctagagatctgctgtactacgccgtgacccaggatgccatgctgatcttcgccaacctgagccggggcttcggccggcagggcaagcggaccttcatggccgagagacagtacacacggatggaggactggctgaccgccaagctggcctacgagggcctgagcaagacctacctgtccaagacactggcccagtacacctccaagacatgcagcaactgtgggtttaccatcaccagcgccgactacgacagggtgctggagaagctgaagaagacagcaacaggctggatgaccacaattaacggcaaggagctgaaggtggagggccagattacctactacaacagatacaagagacagaacgtagtcaaggacctgtccgtcgagctggatagactgagcgaagaatctgtgaacaacgacatctcctcctggacaaagggcagaagcggagaagctctgagcctcctgaagaaaagattctcccatagacccgtgcaggagaagttcgtgtgcctgaactgcggcttcgagacacacgcagccgagcaagccgccctgaacatcgccagatcctggctgttcctgcggagccaggagtacaagaaataccagacaaacaagacaaccggcaacaccgataagagagccttcgtcgagacctggcagtccttttaccggaagaagcttaaggaggtgtggaaacctgccgtgcggtctggcggatctggcggaggctccaccagccccaagaaaaagagaaaagtctaagctgccttctgcggggcttgccttctggccatgcccttcttctctcccttgcacctgtacctcttggtctttgaataaagcctgagtaggaaggctagcaaaaaaaaaaaaaaaaaaaaaaaaaaaaaaaaaaaaaaaaaaaaaaaaaaaaaaaaaaaaaaaaaaaaaaaaaaaaaaaa

SEQ ID NO: 13111 - RNA, 5785 nt, synthetic construct
  source 1..5785: mol_type = other RNA
aggaaataagagagaaaagaagagtaagaagaaatataagagccaccatggcccctaagaagaagcgtaaagtgagccggatggaacgcctcgtctacgaggtgcggcagaagtgcagaaacatcgaggacatctgcatctcctgcggatctctgaacgtgaccctggagcacccactgttcatcggcggcatgtgccagaactgtaaaaactgttttctggagtgtgcctatcaatacgacgatgacggctaccagagctactgcaccatctgttgcggcggaagagaggtgctgatgtgtggaaataacaactgctgccggtgcttctgcgtggaatgcgtggacctgctggtgggccccggcgccgcccaggccgctattaaggaagatccttggaactgctacatgtgcggccacaagggcacatacggcctgctgagacggagagaggactggcctagcagactgcagatgttcttcgccaataaccacgaccaggagttcgacccccctaaggtgtaccctcccgtccccgccgagaagagaaagcccatccgggtcctgagcctgttcgatggcatcgccaccggtctgctggtgctgaaggacctgggcatccaggtggataggtacattgcctccgaggtgtgcgaggactccatcaccgtgggaatggtgcgtcatcagggcaagatcatgtacgtgggcgacgtgcggagcgtgacacagaagcatatccaggagtggggccctttcgacctggtgatcggcggcagcccttgcaatgacctgagcatcgtgaacccagcccggaagggcctgtacgagggaaccggcagactgttcttcgagttttacagactgctgcacgacgcccggcctaaggaaggcgacgaccggcccttcttttggctgttcgagaatgtggtggccatgggagtcagcgacaagcgggatattagccggttcctggagagcaaccccgtgatgatcgatgccaaggaagtgagcgccgcccaccgggccagatacttctggggcaatctgcctggcatgaacagacccctggccagcaccgtgaacgacaagctggagctgcaggagtgcctggagcacggccggatcgccaagttcagcaaggtgagaaccatcaccacccgaagcaacagcatcaaacaaggcaaggaccagcactttcctgtgttcatgaacgagaaggaggacatcctgtggtgtaccgagatggagagagtgttcgggttcccagtccactacacagatgtcagcaacatgtctagactggccagacagagactgctgggaagaagctggtccgtccctgtgatcagacacctgttcgcccctctgaaggagtacttcgcctgcgtgagcagcggcaacagcaacgccaacagccggggccccagcttctctagcggcctggtgccactgtccctgagagggagccacatgggccccatggagatctacaaaaccgtgagcgcctggaagcggcagcctgtgcgcgtgctgagcctgtttcggaatatcgataaagtcctgaaaagcctgggattcctggagagcggctctggctccggcggtggcaccctgaagtacgtggaggatgtgacaaacgtggtcagacgggatgtggagaagtggggccccttcgatctggtgtacggcagcacccaacccctgggcagctcttgtgaccggtgccctggctggtacatgtttcagttccaccggatcctgcagtacgccctgccgagacaggagtcccagcggccattcttttggattttcatggacaacttgctgctgaccgaggatgaccaggaaactaccactcggttcctgcagaccgaagccgtgaccctgcaggacgtgagaggccgggactaccagaacgccatgcgggtgtggtccaacatccctggactgaaaagcaagcacgcacctctgacccctaaagaagaggagtacctgcaggcccaggtgcggagcagaagcaagctggacgcccctaaggtggatctgctggtgaagaattgcctcctgcccctgagagagtacttcaagtatttcagccagaatagtctgcccctgggaggcagcggcggcggcgcccaggcccccctgagcttcgaggacgtggccgtgggcttcagccccgaggagtggcagctgctggcccccgcccagaaggacctgtacagggacgtgatgctggagaactacaggaacctggtgagcctgggctaccaggccagcaagcccgacagcctgttccagctggagcacggcggccccccctgggccgtgggcggcgccgcccccaggcccccctgcgccgaggagatctgggagggcggcccaagcagcggcgcccctcctcccagcggcggcagcccagccggctccccaacctctaccgaggagggcacctctgagtccgccacccccgagagcggccctggcacctccaccgagcccagcgagggcagcgcacccggcagccctgccggcagccccacctccacagaggagggaaccagcaccgagcccagcgaaggcagcgccccaggcaccagcaccgagcctagtgagcaggagattaaacggatcaacaagatcagaagaagacttgtgaaagacagcaacaccaagaaggccggcaagacaggccccatgaaaaccctgctggttagagtgatgacacccgatctgagagagcggctggaaaacctgagaaagaagcctgaaaatatcccccagcccatcagcaatacatctagagccaacctgaataagctgctgaccgattacaccgaaatgaagaaggcgatcctgcatgtgtactgggaagagttccagaaggaccctgtgggcctgatgagccgggtggcccagcctgccagcaagaagatcgatcagaacaagctgaaacctgagatggacgagaagggcaacctgaccaccgccggctttgcctgctctcagtgtggccagcccctgttcgtgtacaagctggagcaggtgtctgagaagggcaaggcttacaccaactacttcggacggtgcaatgtggccgagcacgaaaagctgatcctgctggcccagctgaagcccgagaaggatagcgacgaagccgtgacatatagcctgggaaagtttgggcagagggccctggatttctacagcattcatgtgaccaaggagtccacccaccccgtgaagcccctggcccagatcgccggaaacagatacgcctccggacctgtgggaaaggccctgagcgacgcatgtatgggcacaatcgcctccttcctgtctaagtaccaggacatcatcatcgaacaccagaaggtggtgaagggcaaccagaagagactggagagcctgcgggagctggccggcaaggaaaacctggaataccctagcgtgaccctgccacctcagcctcacaccaaggagggcgttgatgcctacaacgaagtgatcgcccgggtgcgaatgtgggtgaacctgaacctgtggcagaagctgaagctaagcagagatgatgccaagcctctgctgagactgaagggattcccttcctttcctctggtcgagagacaggccaacgaagtggactggtgggacatggtgtgtaacgtgaagaagctgatcaacgagaaaaaggaggatggcaaggtgttttggcagaatctggctggctacaagagacaggaagccctgagaccatacctgagcagcgaggaagatcggaagaagggaaagaaattcgctcggtaccagctgggcgacctgctgctgcacctggaaaagaagcacggcgaggactggggaaaggtgtacgacgaggcctgggagcggattgacaagaaagtggaaggcctgagcaagcacatcaagctggaagaggaacggagaagcgaggacgcccagagcaaggccgccctgaccgactggctgcgggctaaggccagcttcgtgatcgagggcctgaaggaggccgacaaggacgagttctgcagatgcgagctgaagctgcagaagtggtacggggacctgcggggaaagcccttcgccatcgaagccgagaacagcatcctggacatcagcggcttcagcaagcagtacaactgtgccttcatctggcagaaggacggcgtgaagaagctgaacctgtacctgatcatcaactacttcaagggcggcaagctgcggttcaagaagatcaaacctgaagccttcgaagccaacagattctacaccgtgatcaacaaaaagagcggcgagatcgtgcccatggaggtgaacttcaacttcgacgaccccaacctgatcatcctgcctctggcctttggcaagagacagggcagagaattcatctggaacgacctgctgtccctggaaaccggcagcctgaagctggccaacggaagagtgatcgagaagacactgtacaacagaagaacccggcaggatgagcctgccctgttcgtggccctgaccttcgagcggcgggaggtcctggactcctccaatatcaaaccaatgaacctgatcggcgtggcaagaggcgaaaacatccccgccgtgatcgccctgaccgaccccgagggctgcccactgagccggtttaaggatagcctgggaaacccaacccacatcctgagaatcggcgagagctataaggagaagcagcggaccatccaggccaagaaggaggtggagcagcggagagccggcggctacagccggaagtacgccagcaaagccaagaatctggcagacgatatggtgagaaacaccgctagagatctgctgtactacgccgtgacccaggatgccatgctgatcttcgccaacctgagccggggcttcggccggcagggcaagcggaccttcatggccgagagacagtacacacggatggaggactggctgaccgccaagctggcctacgagggcctgagcaagacctacctgtccaagacactggcccagtacacctccaagacatgcagcaactgtgggtttaccatcaccagcgccgactacgacagggtgctggagaagctgaagaagacagcaacaggctggatgaccacaattaacggcaaggagctgaaggtggagggccagattacctactacaacagatacaagagacagaacgtagtcaaggacctgtccgtcgagctggatagactgagcgaagaatctgtgaacaacgacatctcctcctggacaaagggcagaagcggagaagctctgagcctcctgaagaaaagattctcccatagacccgtgcaggagaagttcgtgtgcctgaactgcggcttcgagacacacgcagccgagcaagccgccctgaacatcgccagatcctggctgttcctgcggagccaggagtacaagaaataccagacaaacaagacaaccggcaacaccgataagagagccttcgtcgagacctggcagtccttttaccggaagaagcttaaggaggtgtggaaacctgccgtgcggtctggcggatctggcggaggctccaccagccccaagaaaaagagaaaagtctaagctgccttctgcggggcttgccttctggccatgcccttcttctctcccttgcacctgtacctcttggtctttgaataaagcctgagtaggaaggctagcaaaaaaaaaaaaaaaaaaaaaaaaaaaaaaaaaaaaaaaaaaaaaaaaaaaaaaaaaaaaaaaaaaaaaaaaaaaaaaaa

SEQ ID NO: 13112 - RNA, 5785 nt, synthetic construct
  source 1..5785: mol_type = other RNA
aggaaataagagagaaaagaagagtaagaagaaatataagagccaccatggcccctaagaagaagcgtaaagtgagccggatggaacgcctcgtctacgaggtgcggcagaagtgcagaaacatcgaggacatctgcatctcctgcggatctctgaacgtgaccctggagcacccactgttcatcggcggcatgtgccagaactgtaaaaactgttttctggagtgtgcctatcaatacgacgatgacggctaccagagctactgcaccatctgttgcggcggaagagaggtgctgatgtgtggaaataacaactgctgccggtgcttctgcgtggaatgcgtggacctgctggtgggccccggcgccgcccaggccgctattaaggaagatccttggaactgctacatgtgcggccacaagggcacatacggcctgctgagacggagagaggactggcctagcagactgcagatgttcttcgccaataaccacgaccaggagttcgacccccctaaggtgtaccctcccgtccccgccgagaagagaaagcccatccgggtcctgagcctgttcgatggcatcgccaccggtctgctggtgctgaaggacctgggcatccaggtggataggtacattgcctccgaggtgtgcgaggactccatcaccgtgggaatggtgcgtcatcagggcaagatcatgtacgtgggcgacgtgcggagcgtgacacagaagcatatccaggagtggggccctttcgacctggtgatcggcggcagcccttgcaatgacctgagcatcgtgaacccagcccggaagggcctgtacgagggaaccggcagactgttcttcgagttttacagactgctgcacgacgcccggcctaaggaaggcgacgaccggcccttcttttggctgttcgagaatgtggtggccatgggagtcagcgacaagcgggatattagccggttcctggagagcaaccccgtgatgatcgatgccaaggaagtgagcgccgcccaccgggccagatacttctggggcaatctgcctggcatgaacagacccctggccagcaccgtgaacgacaagctggagctgcaggagtgcctggagcacggccggatcgccaagttcagcaaggtgagaaccatcaccacccgaagcaacagcatcaaacaaggcaaggaccagcactttcctgtgttcatgaacgagaaggaggacatcctgtggtgtaccgagatggagagagtgttcgggttcccagtccactacacagatgtcagcaacatgtctagactggccagacagagactgctgggaagaagctggtccgtccctgtgatcagacacctgttcgcccctctgaaggagtacttcgcctgcgtgagcagcggcaacagcaacgccaacagccggggccccagcttctctagcggcctggtgccactgtccctgagagggagccacatgggccccatggagatctacaaaaccgtgagcgcctggaagcggcagcctgtgcgcgtgctgagcctgtttcggaatatcgataaagtcctgaaaagcctgggattcctggagagcggctctggctccggcggtggcaccctgaagtacgtggaggatgtgacaaacgtggtcagacgggatgtggagaagtggggccccttcgatctggtgtacggcagcacccaacccctgggcagctcttgtgaccggtgccctggctggtacatgtttcagttccaccggatcctgcagtacgccctgccgagacaggagtcccagcggccattcttttggattttcatggacaacttgctgctgaccgaggatgaccaggaaactaccactcggttcctgcagaccgaagccgtgaccctgcaggacgtgagaggccgggactaccagaacgccatgcgggtgtggtccaacatccctggactgaaaagcaagcacgcacctctgacccctaaagaagaggagtacctgcaggcccaggtgcggagcagaagcaagctggacgcccctaaggtggatctgctggtgaagaattgcctcctgcccctgagagagtacttcaagtatttcagccagaatagtctgcccctgggaggcagcggcggcggcgcccacaggagcctgatgttcagcgacgtgagcatcgtgttcagccaggaggagtgggagtacctggacctggagcagagggacctgtacagggacgtgatgctggagaactacagcaacctggtgagcctgggctgcttcatcagcaagcccgacgtgatcagcctgctggagcagggcaaggagccctggaaggtggtgagaaagggcaggaggaggtacgccgcccccatgagcatcgccggcggcccaagcagcggcgcccctcctcccagcggcggcagcccagccggctccccaacctctaccgaggagggcacctctgagtccgccacccccgagagcggccctggcacctccaccgagcccagcgagggcagcgcacccggcagccctgccggcagccccacctccacagaggagggaaccagcaccgagcccagcgaaggcagcgccccaggcaccagcaccgagcctagtgagcaggagattaaacggatcaacaagatcagaagaagacttgtgaaagacagcaacaccaagaaggccggcaagacaggccccatgaaaaccctgctggttagagtgatgacacccgatctgagagagcggctggaaaacctgagaaagaagcctgaaaatatcccccagcccatcagcaatacatctagagccaacctgaataagctgctgaccgattacaccgaaatgaagaaggcgatcctgcatgtgtactgggaagagttccagaaggaccctgtgggcctgatgagccgggtggcccagcctgccagcaagaagatcgatcagaacaagctgaaacctgagatggacgagaagggcaacctgaccaccgccggctttgcctgctctcagtgtggccagcccctgttcgtgtacaagctggagcaggtgtctgagaagggcaaggcttacaccaactacttcggacggtgcaatgtggccgagcacgaaaagctgatcctgctggcccagctgaagcccgagaaggatagcgacgaagccgtgacatatagcctgggaaagtttgggcagagggccctggatttctacagcattcatgtgaccaaggagtccacccaccccgtgaagcccctggcccagatcgccggaaacagatacgcctccggacctgtgggaaaggccctgagcgacgcatgtatgggcacaatcgcctccttcctgtctaagtaccaggacatcatcatcgaacaccagaaggtggtgaagggcaaccagaagagactggagagcctgcgggagctggccggcaaggaaaacctggaataccctagcgtgaccctgccacctcagcctcacaccaaggagggcgttgatgcctacaacgaagtgatcgcccgggtgcgaatgtgggtgaacctgaacctgtggcagaagctgaagctaagcagagatgatgccaagcctctgctgagactgaagggattcccttcctttcctctggtcgagagacaggccaacgaagtggactggtgggacatggtgtgtaacgtgaagaagctgatcaacgagaaaaaggaggatggcaaggtgttttggcagaatctggctggctacaagagacaggaagccctgagaccatacctgagcagcgaggaagatcggaagaagggaaagaaattcgctcggtaccagctgggcgacctgctgctgcacctggaaaagaagcacggcgaggactggggaaaggtgtacgacgaggcctgggagcggattgacaagaaagtggaaggcctgagcaagcacatcaagctggaagaggaacggagaagcgaggacgcccagagcaaggccgccctgaccgactggctgcgggctaaggccagcttcgtgatcgagggcctgaaggaggccgacaaggacgagttctgcagatgcgagctgaagctgcagaagtggtacggggacctgcggggaaagcccttcgccatcgaagccgagaacagcatcctggacatcagcggcttcagcaagcagtacaactgtgccttcatctggcagaaggacggcgtgaagaagctgaacctgtacctgatcatcaactacttcaagggcggcaagctgcggttcaagaagatcaaacctgaagccttcgaagccaacagattctacaccgtgatcaacaaaaagagcggcgagatcgtgcccatggaggtgaacttcaacttcgacgaccccaacctgatcatcctgcctctggcctttggcaagagacagggcagagaattcatctggaacgacctgctgtccctggaaaccggcagcctgaagctggccaacggaagagtgatcgagaagacactgtacaacagaagaacccggcaggatgagcctgccctgttcgtggccctgaccttcgagcggcgggaggtcctggactcctccaatatcaaaccaatgaacctgatcggcgtggcaagaggcgaaaacatccccgccgtgatcgccctgaccgaccccgagggctgcccactgagccggtttaaggatagcctgggaaacccaacccacatcctgagaatcggcgagagctataaggagaagcagcggaccatccaggccaagaaggaggtggagcagcggagagccggcggctacagccggaagtacgccagcaaagccaagaatctggcagacgatatggtgagaaacaccgctagagatctgctgtactacgccgtgacccaggatgccatgctgatcttcgccaacctgagccggggcttcggccggcagggcaagcggaccttcatggccgagagacagtacacacggatggaggactggctgaccgccaagctggcctacgagggcctgagcaagacctacctgtccaagacactggcccagtacacctccaagacatgcagcaactgtgggtttaccatcaccagcgccgactacgacagggtgctggagaagctgaagaagacagcaacaggctggatgaccacaattaacggcaaggagctgaaggtggagggccagattacctactacaacagatacaagagacagaacgtagtcaaggacctgtccgtcgagctggatagactgagcgaagaatctgtgaacaacgacatctcctcctggacaaagggcagaagcggagaagctctgagcctcctgaagaaaagattctcccatagacccgtgcaggagaagttcgtgtgcctgaactgcggcttcgagacacacgcagccgagcaagccgccctgaacatcgccagatcctggctgttcctgcggagccaggagtacaagaaataccagacaaacaagacaaccggcaacaccgataagagagccttcgtcgagacctggcagtccttttaccggaagaagcttaaggaggtgtggaaacctgccgtgcggtctggcggatctggcggaggctccaccagccccaagaaaaagagaaaagtctaagctgccttctgcggggcttgccttctggccatgcccttcttctctcccttgcacctgtacctcttggtctttgaataaagcctgagtaggaaggctagcaaaaaaaaaaaaaaaaaaaaaaaaaaaaaaaaaaaaaaaaaaaaaaaaaaaaaaaaaaaaaaaaaaaaaaaaaaaaaaaa

SEQ ID NO: 13113 - RNA, 5785 nt, synthetic construct
  source 1..5785: mol_type = other RNA
aggaaataagagagaaaagaagagtaagaagaaatataagagccaccatggcccctaagaagaagcgtaaagtgagccggatggaacgcctcgtctacgaggtgcggcagaagtgcagaaacatcgaggacatctgcatctcctgcggatctctgaacgtgaccctggagcacccactgttcatcggcggcatgtgccagaactgtaaaaactgttttctggagtgtgcctatcaatacgacgatgacggctaccagagctactgcaccatctgttgcggcggaagagaggtgctgatgtgtggaaataacaactgctgccggtgcttctgcgtggaatgcgtggacctgctggtgggccccggcgccgcccaggccgctattaaggaagatccttggaactgctacatgtgcggccacaagggcacatacggcctgctgagacggagagaggactggcctagcagactgcagatgttcttcgccaataaccacgaccaggagttcgacccccctaaggtgtaccctcccgtccccgccgagaagagaaagcccatccgggtcctgagcctgttcgatggcatcgccaccggtctgctggtgctgaaggacctgggcatccaggtggataggtacattgcctccgaggtgtgcgaggactccatcaccgtgggaatggtgcgtcatcagggcaagatcatgtacgtgggcgacgtgcggagcgtgacacagaagcatatccaggagtggggccctttcgacctggtgatcggcggcagcccttgcaatgacctgagcatcgtgaacccagcccggaagggcctgtacgagggaaccggcagactgttcttcgagttttacagactgctgcacgacgcccggcctaaggaaggcgacgaccggcccttcttttggctgttcgagaatgtggtggccatgggagtcagcgacaagcgggatattagccggttcctggagagcaaccccgtgatgatcgatgccaaggaagtgagcgccgcccaccgggccagatacttctggggcaatctgcctggcatgaacagacccctggccagcaccgtgaacgacaagctggagctgcaggagtgcctggagcacggccggatcgccaagttcagcaaggtgagaaccatcaccacccgaagcaacagcatcaaacaaggcaaggaccagcactttcctgtgttcatgaacgagaaggaggacatcctgtggtgtaccgagatggagagagtgttcgggttcccagtccactacacagatgtcagcaacatgtctagactggccagacagagactgctgggaagaagctggtccgtccctgtgatcagacacctgttcgcccctctgaaggagtacttcgcctgcgtgagcagcggcaacagcaacgccaacagccggggccccagcttctctagcggcctggtgccactgtccctgagagggagccacatgggccccatggagatctacaaaaccgtgagcgcctggaagcggcagcctgtgcgcgtgctgagcctgtttcggaatatcgataaagtcctgaaaagcctgggattcctggagagcggctctggctccggcggtggcaccctgaagtacgtggaggatgtgacaaacgtggtcagacgggatgtggagaagtggggccccttcgatctggtgtacggcagcacccaacccctgggcagctcttgtgaccggtgccctggctggtacatgtttcagttccaccggatcctgcagtacgccctgccgagacaggagtcccagcggccattcttttggattttcatggacaacttgctgctgaccgaggatgaccaggaaactaccactcggttcctgcagaccgaagccgtgaccctgcaggacgtgagaggccgggactaccagaacgccatgcgggtgtggtccaacatccctggactgaaaagcaagcacgcacctctgacccctaaagaagaggagtacctgcaggcccaggtgcggagcagaagcaagctggacgcccctaaggtggatctgctggtgaagaattgcctcctgcccctgagagagtacttcaagtatttcagccagaatagtctgcccctgggaggcagcggcggcggcagcctgggccccctgagcttcaaggacgtggccgtggccttcagccaggaggagtggcagcagctggaccccgaggagaggaccacctacagggacgtgatgctggagacctacagcaacctggtgagcgtgggctacgacatcatcaagcccgacgtgatcatcaagctggagcagggcgaggagccctggatcgtggagggcgccttcagcccccagagctaccccgacgagatcaggcacggcggcccaagcagcggcgcccctcctcccagcggcggcagcccagccggctccccaacctctaccgaggagggcacctctgagtccgccacccccgagagcggccctggcacctccaccgagcccagcgagggcagcgcacccggcagccctgccggcagccccacctccacagaggagggaaccagcaccgagcccagcgaaggcagcgccccaggcaccagcaccgagcctagtgagcaggagattaaacggatcaacaagatcagaagaagacttgtgaaagacagcaacaccaagaaggccggcaagacaggccccatgaaaaccctgctggttagagtgatgacacccgatctgagagagcggctggaaaacctgagaaagaagcctgaaaatatcccccagcccatcagcaatacatctagagccaacctgaataagctgctgaccgattacaccgaaatgaagaaggcgatcctgcatgtgtactgggaagagttccagaaggaccctgtgggcctgatgagccgggtggcccagcctgccagcaagaagatcgatcagaacaagctgaaacctgagatggacgagaagggcaacctgaccaccgccggctttgcctgctctcagtgtggccagcccctgttcgtgtacaagctggagcaggtgtctgagaagggcaaggcttacaccaactacttcggacggtgcaatgtggccgagcacgaaaagctgatcctgctggcccagctgaagcccgagaaggatagcgacgaagccgtgacatatagcctgggaaagtttgggcagagggccctggatttctacagcattcatgtgaccaaggagtccacccaccccgtgaagcccctggcccagatcgccggaaacagatacgcctccggacctgtgggaaaggccctgagcgacgcatgtatgggcacaatcgcctccttcctgtctaagtaccaggacatcatcatcgaacaccagaaggtggtgaagggcaaccagaagagactggagagcctgcgggagctggccggcaaggaaaacctggaataccctagcgtgaccctgccacctcagcctcacaccaaggagggcgttgatgcctacaacgaagtgatcgcccgggtgcgaatgtgggtgaacctgaacctgtggcagaagctgaagctaagcagagatgatgccaagcctctgctgagactgaagggattcccttcctttcctctggtcgagagacaggccaacgaagtggactggtgggacatggtgtgtaacgtgaagaagctgatcaacgagaaaaaggaggatggcaaggtgttttggcagaatctggctggctacaagagacaggaagccctgagaccatacctgagcagcgaggaagatcggaagaagggaaagaaattcgctcggtaccagctgggcgacctgctgctgcacctggaaaagaagcacggcgaggactggggaaaggtgtacgacgaggcctgggagcggattgacaagaaagtggaaggcctgagcaagcacatcaagctggaagaggaacggagaagcgaggacgcccagagcaaggccgccctgaccgactggctgcgggctaaggccagcttcgtgatcgagggcctgaaggaggccgacaaggacgagttctgcagatgcgagctgaagctgcagaagtggtacggggacctgcggggaaagcccttcgccatcgaagccgagaacagcatcctggacatcagcggcttcagcaagcagtacaactgtgccttcatctggcagaaggacggcgtgaagaagctgaacctgtacctgatcatcaactacttcaagggcggcaagctgcggttcaagaagatcaaacctgaagccttcgaagccaacagattctacaccgtgatcaacaaaaagagcggcgagatcgtgcccatggaggtgaacttcaacttcgacgaccccaacctgatcatcctgcctctggcctttggcaagagacagggcagagaattcatctggaacgacctgctgtccctggaaaccggcagcctgaagctggccaacggaagagtgatcgagaagacactgtacaacagaagaacccggcaggatgagcctgccctgttcgtggccctgaccttcgagcggcgggaggtcctggactcctccaatatcaaaccaatgaacctgatcggcgtggcaagaggcgaaaacatccccgccgtgatcgccctgaccgaccccgagggctgcccactgagccggtttaaggatagcctgggaaacccaacccacatcctgagaatcggcgagagctataaggagaagcagcggaccatccaggccaagaaggaggtggagcagcggagagccggcggctacagccggaagtacgccagcaaagccaagaatctggcagacgatatggtgagaaacaccgctagagatctgctgtactacgccgtgacccaggatgccatgctgatcttcgccaacctgagccggggcttcggccggcagggcaagcggaccttcatggccgagagacagtacacacggatggaggactggctgaccgccaagctggcctacgagggcctgagcaagacctacctgtccaagacactggcccagtacacctccaagacatgcagcaactgtgggtttaccatcaccagcgccgactacgacagggtgctggagaagctgaagaagacagcaacaggctggatgaccacaattaacggcaaggagctgaaggtggagggccagattacctactacaacagatacaagagacagaacgtagtcaaggacctgtccgtcgagctggatagactgagcgaagaatctgtgaacaacgacatctcctcctggacaaagggcagaagcggagaagctctgagcctcctgaagaaaagattctcccatagacccgtgcaggagaagttcgtgtgcctgaactgcggcttcgagacacacgcagccgagcaagccgccctgaacatcgccagatcctggctgttcctgcggagccaggagtacaagaaataccagacaaacaagacaaccggcaacaccgataagagagccttcgtcgagacctggcagtccttttaccggaagaagcttaaggaggtgtggaaacctgccgtgcggtctggcggatctggcggaggctccaccagccccaagaaaaagagaaaagtctaagctgccttctgcggggcttgccttctggccatgcccttcttctctcccttgcacctgtacctcttggtctttgaataaagcctgagtaggaaggctagcaaaaaaaaaaaaaaaaaaaaaaaaaaaaaaaaaaaaaaaaaaaaaaaaaaaaaaaaaaaaaaaaaaaaaaaaaaaaaaaa

SEQ ID NO: 13114 - RNA, 5785 nt, synthetic construct
  source 1..5785: mol_type = other RNA
aggaaataagagagaaaagaagagtaagaagaaatataagagccaccatggcccctaagaagaagcgtaaagtgagccggatggaacgcctcgtctacgaggtgcggcagaagtgcagaaacatcgaggacatctgcatctcctgcggatctctgaacgtgaccctggagcacccactgttcatcggcggcatgtgccagaactgtaaaaactgttttctggagtgtgcctatcaatacgacgatgacggctaccagagctactgcaccatctgttgcggcggaagagaggtgctgatgtgtggaaataacaactgctgccggtgcttctgcgtggaatgcgtggacctgctggtgggccccggcgccgcccaggccgctattaaggaagatccttggaactgctacatgtgcggccacaagggcacatacggcctgctgagacggagagaggactggcctagcagactgcagatgttcttcgccaataaccacgaccaggagttcgacccccctaaggtgtaccctcccgtccccgccgagaagagaaagcccatccgggtcctgagcctgttcgatggcatcgccaccggtctgctggtgctgaaggacctgggcatccaggtggataggtacattgcctccgaggtgtgcgaggactccatcaccgtgggaatggtgcgtcatcagggcaagatcatgtacgtgggcgacgtgcggagcgtgacacagaagcatatccaggagtggggccctttcgacctggtgatcggcggcagcccttgcaatgacctgagcatcgtgaacccagcccggaagggcctgtacgagggaaccggcagactgttcttcgagttttacagactgctgcacgacgcccggcctaaggaaggcgacgaccggcccttcttttggctgttcgagaatgtggtggccatgggagtcagcgacaagcgggatattagccggttcctggagagcaaccccgtgatgatcgatgccaaggaagtgagcgccgcccaccgggccagatacttctggggcaatctgcctggcatgaacagacccctggccagcaccgtgaacgacaagctggagctgcaggagtgcctggagcacggccggatcgccaagttcagcaaggtgagaaccatcaccacccgaagcaacagcatcaaacaaggcaaggaccagcactttcctgtgttcatgaacgagaaggaggacatcctgtggtgtaccgagatggagagagtgttcgggttcccagtccactacacagatgtcagcaacatgtctagactggccagacagagactgctgggaagaagctggtccgtccctgtgatcagacacctgttcgcccctctgaaggagtacttcgcctgcgtgagcagcggcaacagcaacgccaacagccggggccccagcttctctagcggcctggtgccactgtccctgagagggagccacatgggccccatggagatctacaaaaccgtgagcgcctggaagcggcagcctgtgcgcgtgctgagcctgtttcggaatatcgataaagtcctgaaaagcctgggattcctggagagcggctctggctccggcggtggcaccctgaagtacgtggaggatgtgacaaacgtggtcagacgggatgtggagaagtggggccccttcgatctggtgtacggcagcacccaacccctgggcagctcttgtgaccggtgccctggctggtacatgtttcagttccaccggatcctgcagtacgccctgccgagacaggagtcccagcggccattcttttggattttcatggacaacttgctgctgaccgaggatgaccaggaaactaccactcggttcctgcagaccgaagccgtgaccctgcaggacgtgagaggccgggactaccagaacgccatgcgggtgtggtccaacatccctggactgaaaagcaagcacgcacctctgacccctaaagaagaggagtacctgcaggcccaggtgcggagcagaagcaagctggacgcccctaaggtggatctgctggtgaagaattgcctcctgcccctgagagagtacttcaagtatttcagccagaatagtctgcccctgggaggcagcggcggcggcttccaggccagcgtggtgttcgaggacgtggccgtgaacttcacccccgaggagtgggccctgctgaacaggggccagaggaagctgtacagggacgtgatgctggagacctgcaggaacctgagcgccgtggagaagcagaagttccacagcagcggcgacctgaccaggatgcaggagggcctgctgaggagccccctggtggagagcgtgtgcgagaggatcgagggcgacccctgcggcggcggcccaagcagcggcgcccctcctcccagcggcggcagcccagccggctccccaacctctaccgaggagggcacctctgagtccgccacccccgagagcggccctggcacctccaccgagcccagcgagggcagcgcacccggcagccctgccggcagccccacctccacagaggagggaaccagcaccgagcccagcgaaggcagcgccccaggcaccagcaccgagcctagtgagcaggagattaaacggatcaacaagatcagaagaagacttgtgaaagacagcaacaccaagaaggccggcaagacaggccccatgaaaaccctgctggttagagtgatgacacccgatctgagagagcggctggaaaacctgagaaagaagcctgaaaatatcccccagcccatcagcaatacatctagagccaacctgaataagctgctgaccgattacaccgaaatgaagaaggcgatcctgcatgtgtactgggaagagttccagaaggaccctgtgggcctgatgagccgggtggcccagcctgccagcaagaagatcgatcagaacaagctgaaacctgagatggacgagaagggcaacctgaccaccgccggctttgcctgctctcagtgtggccagcccctgttcgtgtacaagctggagcaggtgtctgagaagggcaaggcttacaccaactacttcggacggtgcaatgtggccgagcacgaaaagctgatcctgctggcccagctgaagcccgagaaggatagcgacgaagccgtgacatatagcctgggaaagtttgggcagagggccctggatttctacagcattcatgtgaccaaggagtccacccaccccgtgaagcccctggcccagatcgccggaaacagatacgcctccggacctgtgggaaaggccctgagcgacgcatgtatgggcacaatcgcctccttcctgtctaagtaccaggacatcatcatcgaacaccagaaggtggtgaagggcaaccagaagagactggagagcctgcgggagctggccggcaaggaaaacctggaataccctagcgtgaccctgccacctcagcctcacaccaaggagggcgttgatgcctacaacgaagtgatcgcccgggtgcgaatgtgggtgaacctgaacctgtggcagaagctgaagctaagcagagatgatgccaagcctctgctgagactgaagggattcccttcctttcctctggtcgagagacaggccaacgaagtggactggtgggacatggtgtgtaacgtgaagaagctgatcaacgagaaaaaggaggatggcaaggtgttttggcagaatctggctggctacaagagacaggaagccctgagaccatacctgagcagcgaggaagatcggaagaagggaaagaaattcgctcggtaccagctgggcgacctgctgctgcacctggaaaagaagcacggcgaggactggggaaaggtgtacgacgaggcctgggagcggattgacaagaaagtggaaggcctgagcaagcacatcaagctggaagaggaacggagaagcgaggacgcccagagcaaggccgccctgaccgactggctgcgggctaaggccagcttcgtgatcgagggcctgaaggaggccgacaaggacgagttctgcagatgcgagctgaagctgcagaagtggtacggggacctgcggggaaagcccttcgccatcgaagccgagaacagcatcctggacatcagcggcttcagcaagcagtacaactgtgccttcatctggcagaaggacggcgtgaagaagctgaacctgtacctgatcatcaactacttcaagggcggcaagctgcggttcaagaagatcaaacctgaagccttcgaagccaacagattctacaccgtgatcaacaaaaagagcggcgagatcgtgcccatggaggtgaacttcaacttcgacgaccccaacctgatcatcctgcctctggcctttggcaagagacagggcagagaattcatctggaacgacctgctgtccctggaaaccggcagcctgaagctggccaacggaagagtgatcgagaagacactgtacaacagaagaacccggcaggatgagcctgccctgttcgtggccctgaccttcgagcggcgggaggtcctggactcctccaatatcaaaccaatgaacctgatcggcgtggcaagaggcgaaaacatccccgccgtgatcgccctgaccgaccccgagggctgcccactgagccggtttaaggatagcctgggaaacccaacccacatcctgagaatcggcgagagctataaggagaagcagcggaccatccaggccaagaaggaggtggagcagcggagagccggcggctacagccggaagtacgccagcaaagccaagaatctggcagacgatatggtgagaaacaccgctagagatctgctgtactacgccgtgacccaggatgccatgctgatcttcgccaacctgagccggggcttcggccggcagggcaagcggaccttcatggccgagagacagtacacacggatggaggactggctgaccgccaagctggcctacgagggcctgagcaagacctacctgtccaagacactggcccagtacacctccaagacatgcagcaactgtgggtttaccatcaccagcgccgactacgacagggtgctggagaagctgaagaagacagcaacaggctggatgaccacaattaacggcaaggagctgaaggtggagggccagattacctactacaacagatacaagagacagaacgtagtcaaggacctgtccgtcgagctggatagactgagcgaagaatctgtgaacaacgacatctcctcctggacaaagggcagaagcggagaagctctgagcctcctgaagaaaagattctcccatagacccgtgcaggagaagttcgtgtgcctgaactgcggcttcgagacacacgcagccgagcaagccgccctgaacatcgccagatcctggctgttcctgcggagccaggagtacaagaaataccagacaaacaagacaaccggcaacaccgataagagagccttcgtcgagacctggcagtccttttaccggaagaagcttaaggaggtgtggaaacctgccgtgcggtctggcggatctggcggaggctccaccagccccaagaaaaagagaaaagtctaagctgccttctgcggggcttgccttctggccatgcccttcttctctcccttgcacctgtacctcttggtctttgaataaagcctgagtaggaaggctagcaaaaaaaaaaaaaaaaaaaaaaaaaaaaaaaaaaaaaaaaaaaaaaaaaaaaaaaaaaaaaaaaaaaaaaaaaaaaaaaa

SEQ ID NO: 13115 - RNA, 5785 nt, synthetic construct
  source 1..5785: mol_type = other RNA
aggaaataagagagaaaagaagagtaagaagaaatataagagccaccatggcccctaagaagaagcgtaaagtgagccggatggaacgcctcgtctacgaggtgcggcagaagtgcagaaacatcgaggacatctgcatctcctgcggatctctgaacgtgaccctggagcacccactgttcatcggcggcatgtgccagaactgtaaaaactgttttctggagtgtgcctatcaatacgacgatgacggctaccagagctactgcaccatctgttgcggcggaagagaggtgctgatgtgtggaaataacaactgctgccggtgcttctgcgtggaatgcgtggacctgctggtgggccccggcgccgcccaggccgctattaaggaagatccttggaactgctacatgtgcggccacaagggcacatacggcctgctgagacggagagaggactggcctagcagactgcagatgttcttcgccaataaccacgaccaggagttcgacccccctaaggtgtaccctcccgtccccgccgagaagagaaagcccatccgggtcctgagcctgttcgatggcatcgccaccggtctgctggtgctgaaggacctgggcatccaggtggataggtacattgcctccgaggtgtgcgaggactccatcaccgtgggaatggtgcgtcatcagggcaagatcatgtacgtgggcgacgtgcggagcgtgacacagaagcatatccaggagtggggccctttcgacctggtgatcggcggcagcccttgcaatgacctgagcatcgtgaacccagcccggaagggcctgtacgagggaaccggcagactgttcttcgagttttacagactgctgcacgacgcccggcctaaggaaggcgacgaccggcccttcttttggctgttcgagaatgtggtggccatgggagtcagcgacaagcgggatattagccggttcctggagagcaaccccgtgatgatcgatgccaaggaagtgagcgccgcccaccgggccagatacttctggggcaatctgcctggcatgaacagacccctggccagcaccgtgaacgacaagctggagctgcaggagtgcctggagcacggccggatcgccaagttcagcaaggtgagaaccatcaccacccgaagcaacagcatcaaacaaggcaaggaccagcactttcctgtgttcatgaacgagaaggaggacatcctgtggtgtaccgagatggagagagtgttcgggttcccagtccactacacagatgtcagcaacatgtctagactggccagacagagactgctgggaagaagctggtccgtccctgtgatcagacacctgttcgcccctctgaaggagtacttcgcctgcgtgagcagcggcaacagcaacgccaacagccggggccccagcttctctagcggcctggtgccactgtccctgagagggagccacatgggccccatggagatctacaaaaccgtgagcgcctggaagcggcagcctgtgcgcgtgctgagcctgtttcggaatatcgataaagtcctgaaaagcctgggattcctggagagcggctctggctccggcggtggcaccctgaagtacgtggaggatgtgacaaacgtggtcagacgggatgtggagaagtggggccccttcgatctggtgtacggcagcacccaacccctgggcagctcttgtgaccggtgccctggctggtacatgtttcagttccaccggatcctgcagtacgccctgccgagacaggagtcccagcggccattcttttggattttcatggacaacttgctgctgaccgaggatgaccaggaaactaccactcggttcctgcagaccgaagccgtgaccctgcaggacgtgagaggccgggactaccagaacgccatgcgggtgtggtccaacatccctggactgaaaagcaagcacgcacctctgacccctaaagaagaggagtacctgcaggcccaggtgcggagcagaagcaagctggacgcccctaaggtggatctgctggtgaagaattgcctcctgcccctgagagagtacttcaagtatttcagccagaatagtctgcccctgggaggcagcggcggcggccaggccgaggtgaccttcgaggacgtggccgtgctgctgagcagggaggagtggggcaggctgggccccgtgcagaagggcctgtacagggacgtgatgctggagacctacaggaacctggtgagcctgggcgccggccccgccggccccaagcccgaggtgatcacccagctggagaggggcgacgagccctgggtgcccgacgtgcagggcagggagaggcccaccatcgacggcagcgccggcggcccaagcagcggcgcccctcctcccagcggcggcagcccagccggctccccaacctctaccgaggagggcacctctgagtccgccacccccgagagcggccctggcacctccaccgagcccagcgagggcagcgcacccggcagccctgccggcagccccacctccacagaggagggaaccagcaccgagcccagcgaaggcagcgccccaggcaccagcaccgagcctagtgagcaggagattaaacggatcaacaagatcagaagaagacttgtgaaagacagcaacaccaagaaggccggcaagacaggccccatgaaaaccctgctggttagagtgatgacacccgatctgagagagcggctggaaaacctgagaaagaagcctgaaaatatcccccagcccatcagcaatacatctagagccaacctgaataagctgctgaccgattacaccgaaatgaagaaggcgatcctgcatgtgtactgggaagagttccagaaggaccctgtgggcctgatgagccgggtggcccagcctgccagcaagaagatcgatcagaacaagctgaaacctgagatggacgagaagggcaacctgaccaccgccggctttgcctgctctcagtgtggccagcccctgttcgtgtacaagctggagcaggtgtctgagaagggcaaggcttacaccaactacttcggacggtgcaatgtggccgagcacgaaaagctgatcctgctggcccagctgaagcccgagaaggatagcgacgaagccgtgacatatagcctgggaaagtttgggcagagggccctggatttctacagcattcatgtgaccaaggagtccacccaccccgtgaagcccctggcccagatcgccggaaacagatacgcctccggacctgtgggaaaggccctgagcgacgcatgtatgggcacaatcgcctccttcctgtctaagtaccaggacatcatcatcgaacaccagaaggtggtgaagggcaaccagaagagactggagagcctgcgggagctggccggcaaggaaaacctggaataccctagcgtgaccctgccacctcagcctcacaccaaggagggcgttgatgcctacaacgaagtgatcgcccgggtgcgaatgtgggtgaacctgaacctgtggcagaagctgaagctaagcagagatgatgccaagcctctgctgagactgaagggattcccttcctttcctctggtcgagagacaggccaacgaagtggactggtgggacatggtgtgtaacgtgaagaagctgatcaacgagaaaaaggaggatggcaaggtgttttggcagaatctggctggctacaagagacaggaagccctgagaccatacctgagcagcgaggaagatcggaagaagggaaagaaattcgctcggtaccagctgggcgacctgctgctgcacctggaaaagaagcacggcgaggactggggaaaggtgtacgacgaggcctgggagcggattgacaagaaagtggaaggcctgagcaagcacatcaagctggaagaggaacggagaagcgaggacgcccagagcaaggccgccctgaccgactggctgcgggctaaggccagcttcgtgatcgagggcctgaaggaggccgacaaggacgagttctgcagatgcgagctgaagctgcagaagtggtacggggacctgcggggaaagcccttcgccatcgaagccgagaacagcatcctggacatcagcggcttcagcaagcagtacaactgtgccttcatctggcagaaggacggcgtgaagaagctgaacctgtacctgatcatcaactacttcaagggcggcaagctgcggttcaagaagatcaaacctgaagccttcgaagccaacagattctacaccgtgatcaacaaaaagagcggcgagatcgtgcccatggaggtgaacttcaacttcgacgaccccaacctgatcatcctgcctctggcctttggcaagagacagggcagagaattcatctggaacgacctgctgtccctggaaaccggcagcctgaagctggccaacggaagagtgatcgagaagacactgtacaacagaagaacccggcaggatgagcctgccctgttcgtggccctgaccttcgagcggcgggaggtcctggactcctccaatatcaaaccaatgaacctgatcggcgtggcaagaggcgaaaacatccccgccgtgatcgccctgaccgaccccgagggctgcccactgagccggtttaaggatagcctgggaaacccaacccacatcctgagaatcggcgagagctataaggagaagcagcggaccatccaggccaagaaggaggtggagcagcggagagccggcggctacagccggaagtacgccagcaaagccaagaatctggcagacgatatggtgagaaacaccgctagagatctgctgtactacgccgtgacccaggatgccatgctgatcttcgccaacctgagccggggcttcggccggcagggcaagcggaccttcatggccgagagacagtacacacggatggaggactggctgaccgccaagctggcctacgagggcctgagcaagacctacctgtccaagacactggcccagtacacctccaagacatgcagcaactgtgggtttaccatcaccagcgccgactacgacagggtgctggagaagctgaagaagacagcaacaggctggatgaccacaattaacggcaaggagctgaaggtggagggccagattacctactacaacagatacaagagacagaacgtagtcaaggacctgtccgtcgagctggatagactgagcgaagaatctgtgaacaacgacatctcctcctggacaaagggcagaagcggagaagctctgagcctcctgaagaaaagattctcccatagacccgtgcaggagaagttcgtgtgcctgaactgcggcttcgagacacacgcagccgagcaagccgccctgaacatcgccagatcctggctgttcctgcggagccaggagtacaagaaataccagacaaacaagacaaccggcaacaccgataagagagccttcgtcgagacctggcagtccttttaccggaagaagcttaaggaggtgtggaaacctgccgtgcggtctggcggatctggcggaggctccaccagccccaagaaaaagagaaaagtctaagctgccttctgcggggcttgccttctggccatgcccttcttctctcccttgcacctgtacctcttggtctttgaataaagcctgagtaggaaggctagcaaaaaaaaaaaaaaaaaaaaaaaaaaaaaaaaaaaaaaaaaaaaaaaaaaaaaaaaaaaaaaaaaaaaaaaaaaaaaaaa

SEQ ID NO: 13116 - RNA, 5785 nt, synthetic construct
  source 1..5785: mol_type = other RNA
aggaaataagagagaaaagaagagtaagaagaaatataagagccaccatggcccctaagaagaagcgtaaagtgagccggatggaacgcctcgtctacgaggtgcggcagaagtgcagaaacatcgaggacatctgcatctcctgcggatctctgaacgtgaccctggagcacccactgttcatcggcggcatgtgccagaactgtaaaaactgttttctggagtgtgcctatcaatacgacgatgacggctaccagagctactgcaccatctgttgcggcggaagagaggtgctgatgtgtggaaataacaactgctgccggtgcttctgcgtggaatgcgtggacctgctggtgggccccggcgccgcccaggccgctattaaggaagatccttggaactgctacatgtgcggccacaagggcacatacggcctgctgagacggagagaggactggcctagcagactgcagatgttcttcgccaataaccacgaccaggagttcgacccccctaaggtgtaccctcccgtccccgccgagaagagaaagcccatccgggtcctgagcctgttcgatggcatcgccaccggtctgctggtgctgaaggacctgggcatccaggtggataggtacattgcctccgaggtgtgcgaggactccatcaccgtgggaatggtgcgtcatcagggcaagatcatgtacgtgggcgacgtgcggagcgtgacacagaagcatatccaggagtggggccctttcgacctggtgatcggcggcagcccttgcaatgacctgagcatcgtgaacccagcccggaagggcctgtacgagggaaccggcagactgttcttcgagttttacagactgctgcacgacgcccggcctaaggaaggcgacgaccggcccttcttttggctgttcgagaatgtggtggccatgggagtcagcgacaagcgggatattagccggttcctggagagcaaccccgtgatgatcgatgccaaggaagtgagcgccgcccaccgggccagatacttctggggcaatctgcctggcatgaacagacccctggccagcaccgtgaacgacaagctggagctgcaggagtgcctggagcacggccggatcgccaagttcagcaaggtgagaaccatcaccacccgaagcaacagcatcaaacaaggcaaggaccagcactttcctgtgttcatgaacgagaaggaggacatcctgtggtgtaccgagatggagagagtgttcgggttcccagtccactacacagatgtcagcaacatgtctagactggccagacagagactgctgggaagaagctggtccgtccctgtgatcagacacctgttcgcccctctgaaggagtacttcgcctgcgtgagcagcggcaacagcaacgccaacagccggggccccagcttctctagcggcctggtgccactgtccctgagagggagccacatgggccccatggagatctacaaaaccgtgagcgcctggaagcggcagcctgtgcgcgtgctgagcctgtttcggaatatcgataaagtcctgaaaagcctgggattcctggagagcggctctggctccggcggtggcaccctgaagtacgtggaggatgtgacaaacgtggtcagacgggatgtggagaagtggggccccttcgatctggtgtacggcagcacccaacccctgggcagctcttgtgaccggtgccctggctggtacatgtttcagttccaccggatcctgcagtacgccctgccgagacaggagtcccagcggccattcttttggattttcatggacaacttgctgctgaccgaggatgaccaggaaactaccactcggttcctgcagaccgaagccgtgaccctgcaggacgtgagaggccgggactaccagaacgccatgcgggtgtggtccaacatccctggactgaaaagcaagcacgcacctctgacccctaaagaagaggagtacctgcaggcccaggtgcggagcagaagcaagctggacgcccctaaggtggatctgctggtgaagaattgcctcctgcccctgagagagtacttcaagtatttcagccagaatagtctgcccctgggaggcagcggcggcggcccccaggtgctggtgagcttcgaggaggtggccgtgctgctgagccaggaggagtggggcaggctgagccccgcccagaagggcctgtacagggacgtgatgatggagacctacggcaacctggtgagcctgggcctgcagggcagcaagcccgacgtgatcagcaagctggagcagggcaaggagccctgggccccccacagccccaggatcgagggcagctggatctggaggaggaggaggggcggcccaagcagcggcgcccctcctcccagcggcggcagcccagccggctccccaacctctaccgaggagggcacctctgagtccgccacccccgagagcggccctggcacctccaccgagcccagcgagggcagcgcacccggcagccctgccggcagccccacctccacagaggagggaaccagcaccgagcccagcgaaggcagcgccccaggcaccagcaccgagcctagtgagcaggagattaaacggatcaacaagatcagaagaagacttgtgaaagacagcaacaccaagaaggccggcaagacaggccccatgaaaaccctgctggttagagtgatgacacccgatctgagagagcggctggaaaacctgagaaagaagcctgaaaatatcccccagcccatcagcaatacatctagagccaacctgaataagctgctgaccgattacaccgaaatgaagaaggcgatcctgcatgtgtactgggaagagttccagaaggaccctgtgggcctgatgagccgggtggcccagcctgccagcaagaagatcgatcagaacaagctgaaacctgagatggacgagaagggcaacctgaccaccgccggctttgcctgctctcagtgtggccagcccctgttcgtgtacaagctggagcaggtgtctgagaagggcaaggcttacaccaactacttcggacggtgcaatgtggccgagcacgaaaagctgatcctgctggcccagctgaagcccgagaaggatagcgacgaagccgtgacatatagcctgggaaagtttgggcagagggccctggatttctacagcattcatgtgaccaaggagtccacccaccccgtgaagcccctggcccagatcgccggaaacagatacgcctccggacctgtgggaaaggccctgagcgacgcatgtatgggcacaatcgcctccttcctgtctaagtaccaggacatcatcatcgaacaccagaaggtggtgaagggcaaccagaagagactggagagcctgcgggagctggccggcaaggaaaacctggaataccctagcgtgaccctgccacctcagcctcacaccaaggagggcgttgatgcctacaacgaagtgatcgcccgggtgcgaatgtgggtgaacctgaacctgtggcagaagctgaagctaagcagagatgatgccaagcctctgctgagactgaagggattcccttcctttcctctggtcgagagacaggccaacgaagtggactggtgggacatggtgtgtaacgtgaagaagctgatcaacgagaaaaaggaggatggcaaggtgttttggcagaatctggctggctacaagagacaggaagccctgagaccatacctgagcagcgaggaagatcggaagaagggaaagaaattcgctcggtaccagctgggcgacctgctgctgcacctggaaaagaagcacggcgaggactggggaaaggtgtacgacgaggcctgggagcggattgacaagaaagtggaaggcctgagcaagcacatcaagctggaagaggaacggagaagcgaggacgcccagagcaaggccgccctgaccgactggctgcgggctaaggccagcttcgtgatcgagggcctgaaggaggccgacaaggacgagttctgcagatgcgagctgaagctgcagaagtggtacggggacctgcggggaaagcccttcgccatcgaagccgagaacagcatcctggacatcagcggcttcagcaagcagtacaactgtgccttcatctggcagaaggacggcgtgaagaagctgaacctgtacctgatcatcaactacttcaagggcggcaagctgcggttcaagaagatcaaacctgaagccttcgaagccaacagattctacaccgtgatcaacaaaaagagcggcgagatcgtgcccatggaggtgaacttcaacttcgacgaccccaacctgatcatcctgcctctggcctttggcaagagacagggcagagaattcatctggaacgacctgctgtccctggaaaccggcagcctgaagctggccaacggaagagtgatcgagaagacactgtacaacagaagaacccggcaggatgagcctgccctgttcgtggccctgaccttcgagcggcgggaggtcctggactcctccaatatcaaaccaatgaacctgatcggcgtggcaagaggcgaaaacatccccgccgtgatcgccctgaccgaccccgagggctgcccactgagccggtttaaggatagcctgggaaacccaacccacatcctgagaatcggcgagagctataaggagaagcagcggaccatccaggccaagaaggaggtggagcagcggagagccggcggctacagccggaagtacgccagcaaagccaagaatctggcagacgatatggtgagaaacaccgctagagatctgctgtactacgccgtgacccaggatgccatgctgatcttcgccaacctgagccggggcttcggccggcagggcaagcggaccttcatggccgagagacagtacacacggatggaggactggctgaccgccaagctggcctacgagggcctgagcaagacctacctgtccaagacactggcccagtacacctccaagacatgcagcaactgtgggtttaccatcaccagcgccgactacgacagggtgctggagaagctgaagaagacagcaacaggctggatgaccacaattaacggcaaggagctgaaggtggagggccagattacctactacaacagatacaagagacagaacgtagtcaaggacctgtccgtcgagctggatagactgagcgaagaatctgtgaacaacgacatctcctcctggacaaagggcagaagcggagaagctctgagcctcctgaagaaaagattctcccatagacccgtgcaggagaagttcgtgtgcctgaactgcggcttcgagacacacgcagccgagcaagccgccctgaacatcgccagatcctggctgttcctgcggagccaggagtacaagaaataccagacaaacaagacaaccggcaacaccgataagagagccttcgtcgagacctggcagtccttttaccggaagaagcttaaggaggtgtggaaacctgccgtgcggtctggcggatctggcggaggctccaccagccccaagaaaaagagaaaagtctaagctgccttctgcggggcttgccttctggccatgcccttcttctctcccttgcacctgtacctcttggtctttgaataaagcctgagtaggaaggctagcaaaaaaaaaaaaaaaaaaaaaaaaaaaaaaaaaaaaaaaaaaaaaaaaaaaaaaaaaaaaaaaaaaaaaaaaaaaaaaaa

SEQ ID NO: 13117 - RNA, 5785 nt, synthetic construct
  source 1..5785: mol_type = other RNA
aggaaataagagagaaaagaagagtaagaagaaatataagagccaccatggcccctaagaagaagcgtaaagtgagccggatggaacgcctcgtctacgaggtgcggcagaagtgcagaaacatcgaggacatctgcatctcctgcggatctctgaacgtgaccctggagcacccactgttcatcggcggcatgtgccagaactgtaaaaactgttttctggagtgtgcctatcaatacgacgatgacggctaccagagctactgcaccatctgttgcggcggaagagaggtgctgatgtgtggaaataacaactgctgccggtgcttctgcgtggaatgcgtggacctgctggtgggccccggcgccgcccaggccgctattaaggaagatccttggaactgctacatgtgcggccacaagggcacatacggcctgctgagacggagagaggactggcctagcagactgcagatgttcttcgccaataaccacgaccaggagttcgacccccctaaggtgtaccctcccgtccccgccgagaagagaaagcccatccgggtcctgagcctgttcgatggcatcgccaccggtctgctggtgctgaaggacctgggcatccaggtggataggtacattgcctccgaggtgtgcgaggactccatcaccgtgggaatggtgcgtcatcagggcaagatcatgtacgtgggcgacgtgcggagcgtgacacagaagcatatccaggagtggggccctttcgacctggtgatcggcggcagcccttgcaatgacctgagcatcgtgaacccagcccggaagggcctgtacgagggaaccggcagactgttcttcgagttttacagactgctgcacgacgcccggcctaaggaaggcgacgaccggcccttcttttggctgttcgagaatgtggtggccatgggagtcagcgacaagcgggatattagccggttcctggagagcaaccccgtgatgatcgatgccaaggaagtgagcgccgcccaccgggccagatacttctggggcaatctgcctggcatgaacagacccctggccagcaccgtgaacgacaagctggagctgcaggagtgcctggagcacggccggatcgccaagttcagcaaggtgagaaccatcaccacccgaagcaacagcatcaaacaaggcaaggaccagcactttcctgtgttcatgaacgagaaggaggacatcctgtggtgtaccgagatggagagagtgttcgggttcccagtccactacacagatgtcagcaacatgtctagactggccagacagagactgctgggaagaagctggtccgtccctgtgatcagacacctgttcgcccctctgaaggagtacttcgcctgcgtgagcagcggcaacagcaacgccaacagccggggccccagcttctctagcggcctggtgccactgtccctgagagggagccacatgggccccatggagatctacaaaaccgtgagcgcctggaagcggcagcctgtgcgcgtgctgagcctgtttcggaatatcgataaagtcctgaaaagcctgggattcctggagagcggctctggctccggcggtggcaccctgaagtacgtggaggatgtgacaaacgtggtcagacgggatgtggagaagtggggccccttcgatctggtgtacggcagcacccaacccctgggcagctcttgtgaccggtgccctggctggtacatgtttcagttccaccggatcctgcagtacgccctgccgagacaggagtcccagcggccattcttttggattttcatggacaacttgctgctgaccgaggatgaccaggaaactaccactcggttcctgcagaccgaagccgtgaccctgcaggacgtgagaggccgggactaccagaacgccatgcgggtgtggtccaacatccctggactgaaaagcaagcacgcacctctgacccctaaagaagaggagtacctgcaggcccaggtgcggagcagaagcaagctggacgcccctaaggtggatctgctggtgaagaattgcctcctgcccctgagagagtacttcaagtatttcagccagaatagtctgcccctgggaggcagcggcggcggcatgatcgagtaccagatccccgtgagcttcaaggacgtggtggtgggcttcacccaggaggagtggcacaggctgagccccgcccagagggccctgtacagggacgtgatgctggagacctacagcaacctggtgagcgtgggctacgagggcaccaagcccgacgtgatcctgaggctggagcaggaggaggccccctggatcggcgaggccgcctgccccggctgccactgctggggcaagggcggcccaagcagcggcgcccctcctcccagcggcggcagcccagccggctccccaacctctaccgaggagggcacctctgagtccgccacccccgagagcggccctggcacctccaccgagcccagcgagggcagcgcacccggcagccctgccggcagccccacctccacagaggagggaaccagcaccgagcccagcgaaggcagcgccccaggcaccagcaccgagcctagtgagcaggagattaaacggatcaacaagatcagaagaagacttgtgaaagacagcaacaccaagaaggccggcaagacaggccccatgaaaaccctgctggttagagtgatgacacccgatctgagagagcggctggaaaacctgagaaagaagcctgaaaatatcccccagcccatcagcaatacatctagagccaacctgaataagctgctgaccgattacaccgaaatgaagaaggcgatcctgcatgtgtactgggaagagttccagaaggaccctgtgggcctgatgagccgggtggcccagcctgccagcaagaagatcgatcagaacaagctgaaacctgagatggacgagaagggcaacctgaccaccgccggctttgcctgctctcagtgtggccagcccctgttcgtgtacaagctggagcaggtgtctgagaagggcaaggcttacaccaactacttcggacggtgcaatgtggccgagcacgaaaagctgatcctgctggcccagctgaagcccgagaaggatagcgacgaagccgtgacatatagcctgggaaagtttgggcagagggccctggatttctacagcattcatgtgaccaaggagtccacccaccccgtgaagcccctggcccagatcgccggaaacagatacgcctccggacctgtgggaaaggccctgagcgacgcatgtatgggcacaatcgcctccttcctgtctaagtaccaggacatcatcatcgaacaccagaaggtggtgaagggcaaccagaagagactggagagcctgcgggagctggccggcaaggaaaacctggaataccctagcgtgaccctgccacctcagcctcacaccaaggagggcgttgatgcctacaacgaagtgatcgcccgggtgcgaatgtgggtgaacctgaacctgtggcagaagctgaagctaagcagagatgatgccaagcctctgctgagactgaagggattcccttcctttcctctggtcgagagacaggccaacgaagtggactggtgggacatggtgtgtaacgtgaagaagctgatcaacgagaaaaaggaggatggcaaggtgttttggcagaatctggctggctacaagagacaggaagccctgagaccatacctgagcagcgaggaagatcggaagaagggaaagaaattcgctcggtaccagctgggcgacctgctgctgcacctggaaaagaagcacggcgaggactggggaaaggtgtacgacgaggcctgggagcggattgacaagaaagtggaaggcctgagcaagcacatcaagctggaagaggaacggagaagcgaggacgcccagagcaaggccgccctgaccgactggctgcgggctaaggccagcttcgtgatcgagggcctgaaggaggccgacaaggacgagttctgcagatgcgagctgaagctgcagaagtggtacggggacctgcggggaaagcccttcgccatcgaagccgagaacagcatcctggacatcagcggcttcagcaagcagtacaactgtgccttcatctggcagaaggacggcgtgaagaagctgaacctgtacctgatcatcaactacttcaagggcggcaagctgcggttcaagaagatcaaacctgaagccttcgaagccaacagattctacaccgtgatcaacaaaaagagcggcgagatcgtgcccatggaggtgaacttcaacttcgacgaccccaacctgatcatcctgcctctggcctttggcaagagacagggcagagaattcatctggaacgacctgctgtccctggaaaccggcagcctgaagctggccaacggaagagtgatcgagaagacactgtacaacagaagaacccggcaggatgagcctgccctgttcgtggccctgaccttcgagcggcgggaggtcctggactcctccaatatcaaaccaatgaacctgatcggcgtggcaagaggcgaaaacatccccgccgtgatcgccctgaccgaccccgagggctgcccactgagccggtttaaggatagcctgggaaacccaacccacatcctgagaatcggcgagagctataaggagaagcagcggaccatccaggccaagaaggaggtggagcagcggagagccggcggctacagccggaagtacgccagcaaagccaagaatctggcagacgatatggtgagaaacaccgctagagatctgctgtactacgccgtgacccaggatgccatgctgatcttcgccaacctgagccggggcttcggccggcagggcaagcggaccttcatggccgagagacagtacacacggatggaggactggctgaccgccaagctggcctacgagggcctgagcaagacctacctgtccaagacactggcccagtacacctccaagacatgcagcaactgtgggtttaccatcaccagcgccgactacgacagggtgctggagaagctgaagaagacagcaacaggctggatgaccacaattaacggcaaggagctgaaggtggagggccagattacctactacaacagatacaagagacagaacgtagtcaaggacctgtccgtcgagctggatagactgagcgaagaatctgtgaacaacgacatctcctcctggacaaagggcagaagcggagaagctctgagcctcctgaagaaaagattctcccatagacccgtgcaggagaagttcgtgtgcctgaactgcggcttcgagacacacgcagccgagcaagccgccctgaacatcgccagatcctggctgttcctgcggagccaggagtacaagaaataccagacaaacaagacaaccggcaacaccgataagagagccttcgtcgagacctggcagtccttttaccggaagaagcttaaggaggtgtggaaacctgccgtgcggtctggcggatctggcggaggctccaccagccccaagaaaaagagaaaagtctaagctgccttctgcggggcttgccttctggccatgcccttcttctctcccttgcacctgtacctcttggtctttgaataaagcctgagtaggaaggctagcaaaaaaaaaaaaaaaaaaaaaaaaaaaaaaaaaaaaaaaaaaaaaaaaaaaaaaaaaaaaaaaaaaaaaaaaaaaaaaaa

SEQ ID NO: 13118 - RNA, 5785 nt, synthetic construct
  source 1..5785: mol_type = other RNA
aggaaataagagagaaaagaagagtaagaagaaatataagagccaccatggcccctaagaagaagcgtaaagtgagccggatggaacgcctcgtctacgaggtgcggcagaagtgcagaaacatcgaggacatctgcatctcctgcggatctctgaacgtgaccctggagcacccactgttcatcggcggcatgtgccagaactgtaaaaactgttttctggagtgtgcctatcaatacgacgatgacggctaccagagctactgcaccatctgttgcggcggaagagaggtgctgatgtgtggaaataacaactgctgccggtgcttctgcgtggaatgcgtggacctgctggtgggccccggcgccgcccaggccgctattaaggaagatccttggaactgctacatgtgcggccacaagggcacatacggcctgctgagacggagagaggactggcctagcagactgcagatgttcttcgccaataaccacgaccaggagttcgacccccctaaggtgtaccctcccgtccccgccgagaagagaaagcccatccgggtcctgagcctgttcgatggcatcgccaccggtctgctggtgctgaaggacctgggcatccaggtggataggtacattgcctccgaggtgtgcgaggactccatcaccgtgggaatggtgcgtcatcagggcaagatcatgtacgtgggcgacgtgcggagcgtgacacagaagcatatccaggagtggggccctttcgacctggtgatcggcggcagcccttgcaatgacctgagcatcgtgaacccagcccggaagggcctgtacgagggaaccggcagactgttcttcgagttttacagactgctgcacgacgcccggcctaaggaaggcgacgaccggcccttcttttggctgttcgagaatgtggtggccatgggagtcagcgacaagcgggatattagccggttcctggagagcaaccccgtgatgatcgatgccaaggaagtgagcgccgcccaccgggccagatacttctggggcaatctgcctggcatgaacagacccctggccagcaccgtgaacgacaagctggagctgcaggagtgcctggagcacggccggatcgccaagttcagcaaggtgagaaccatcaccacccgaagcaacagcatcaaacaaggcaaggaccagcactttcctgtgttcatgaacgagaaggaggacatcctgtggtgtaccgagatggagagagtgttcgggttcccagtccactacacagatgtcagcaacatgtctagactggccagacagagactgctgggaagaagctggtccgtccctgtgatcagacacctgttcgcccctctgaaggagtacttcgcctgcgtgagcagcggcaacagcaacgccaacagccggggccccagcttctctagcggcctggtgccactgtccctgagagggagccacatgggccccatggagatctacaaaaccgtgagcgcctggaagcggcagcctgtgcgcgtgctgagcctgtttcggaatatcgataaagtcctgaaaagcctgggattcctggagagcggctctggctccggcggtggcaccctgaagtacgtggaggatgtgacaaacgtggtcagacgggatgtggagaagtggggccccttcgatctggtgtacggcagcacccaacccctgggcagctcttgtgaccggtgccctggctggtacatgtttcagttccaccggatcctgcagtacgccctgccgagacaggagtcccagcggccattcttttggattttcatggacaacttgctgctgaccgaggatgaccaggaaactaccactcggttcctgcagaccgaagccgtgaccctgcaggacgtgagaggccgggactaccagaacgccatgcgggtgtggtccaacatccctggactgaaaagcaagcacgcacctctgacccctaaagaagaggagtacctgcaggcccaggtgcggagcagaagcaagctggacgcccctaaggtggatctgctggtgaagaattgcctcctgcccctgagagagtacttcaagtatttcagccagaatagtctgcccctgggaggcagcggcggcggcctgcaggaggccgtgaccttcaacgacgtggccatcgacttcagccaggaggagtgggagtggctgaacagcgcccagaggagcctgtacaggaccgtggtgctggagaactacaggaacctggtgagcgtgggcgcctgcatcagcaagcccagcctgatcagcctgctggagcacggcaaggagccctgggaggtgaagggccaggtgaccggcagcagggtgcagggcggcgagagcgtgggcggcccaagcagcggcgcccctcctcccagcggcggcagcccagccggctccccaacctctaccgaggagggcacctctgagtccgccacccccgagagcggccctggcacctccaccgagcccagcgagggcagcgcacccggcagccctgccggcagccccacctccacagaggagggaaccagcaccgagcccagcgaaggcagcgccccaggcaccagcaccgagcctagtgagcaggagattaaacggatcaacaagatcagaagaagacttgtgaaagacagcaacaccaagaaggccggcaagacaggccccatgaaaaccctgctggttagagtgatgacacccgatctgagagagcggctggaaaacctgagaaagaagcctgaaaatatcccccagcccatcagcaatacatctagagccaacctgaataagctgctgaccgattacaccgaaatgaagaaggcgatcctgcatgtgtactgggaagagttccagaaggaccctgtgggcctgatgagccgggtggcccagcctgccagcaagaagatcgatcagaacaagctgaaacctgagatggacgagaagggcaacctgaccaccgccggctttgcctgctctcagtgtggccagcccctgttcgtgtacaagctggagcaggtgtctgagaagggcaaggcttacaccaactacttcggacggtgcaatgtggccgagcacgaaaagctgatcctgctggcccagctgaagcccgagaaggatagcgacgaagccgtgacatatagcctgggaaagtttgggcagagggccctggatttctacagcattcatgtgaccaaggagtccacccaccccgtgaagcccctggcccagatcgccggaaacagatacgcctccggacctgtgggaaaggccctgagcgacgcatgtatgggcacaatcgcctccttcctgtctaagtaccaggacatcatcatcgaacaccagaaggtggtgaagggcaaccagaagagactggagagcctgcgggagctggccggcaaggaaaacctggaataccctagcgtgaccctgccacctcagcctcacaccaaggagggcgttgatgcctacaacgaagtgatcgcccgggtgcgaatgtgggtgaacctgaacctgtggcagaagctgaagctaagcagagatgatgccaagcctctgctgagactgaagggattcccttcctttcctctggtcgagagacaggccaacgaagtggactggtgggacatggtgtgtaacgtgaagaagctgatcaacgagaaaaaggaggatggcaaggtgttttggcagaatctggctggctacaagagacaggaagccctgagaccatacctgagcagcgaggaagatcggaagaagggaaagaaattcgctcggtaccagctgggcgacctgctgctgcacctggaaaagaagcacggcgaggactggggaaaggtgtacgacgaggcctgggagcggattgacaagaaagtggaaggcctgagcaagcacatcaagctggaagaggaacggagaagcgaggacgcccagagcaaggccgccctgaccgactggctgcgggctaaggccagcttcgtgatcgagggcctgaaggaggccgacaaggacgagttctgcagatgcgagctgaagctgcagaagtggtacggggacctgcggggaaagcccttcgccatcgaagccgagaacagcatcctggacatcagcggcttcagcaagcagtacaactgtgccttcatctggcagaaggacggcgtgaagaagctgaacctgtacctgatcatcaactacttcaagggcggcaagctgcggttcaagaagatcaaacctgaagccttcgaagccaacagattctacaccgtgatcaacaaaaagagcggcgagatcgtgcccatggaggtgaacttcaacttcgacgaccccaacctgatcatcctgcctctggcctttggcaagagacagggcagagaattcatctggaacgacctgctgtccctggaaaccggcagcctgaagctggccaacggaagagtgatcgagaagacactgtacaacagaagaacccggcaggatgagcctgccctgttcgtggccctgaccttcgagcggcgggaggtcctggactcctccaatatcaaaccaatgaacctgatcggcgtggcaagaggcgaaaacatccccgccgtgatcgccctgaccgaccccgagggctgcccactgagccggtttaaggatagcctgggaaacccaacccacatcctgagaatcggcgagagctataaggagaagcagcggaccatccaggccaagaaggaggtggagcagcggagagccggcggctacagccggaagtacgccagcaaagccaagaatctggcagacgatatggtgagaaacaccgctagagatctgctgtactacgccgtgacccaggatgccatgctgatcttcgccaacctgagccggggcttcggccggcagggcaagcggaccttcatggccgagagacagtacacacggatggaggactggctgaccgccaagctggcctacgagggcctgagcaagacctacctgtccaagacactggcccagtacacctccaagacatgcagcaactgtgggtttaccatcaccagcgccgactacgacagggtgctggagaagctgaagaagacagcaacaggctggatgaccacaattaacggcaaggagctgaaggtggagggccagattacctactacaacagatacaagagacagaacgtagtcaaggacctgtccgtcgagctggatagactgagcgaagaatctgtgaacaacgacatctcctcctggacaaagggcagaagcggagaagctctgagcctcctgaagaaaagattctcccatagacccgtgcaggagaagttcgtgtgcctgaactgcggcttcgagacacacgcagccgagcaagccgccctgaacatcgccagatcctggctgttcctgcggagccaggagtacaagaaataccagacaaacaagacaaccggcaacaccgataagagagccttcgtcgagacctggcagtccttttaccggaagaagcttaaggaggtgtggaaacctgccgtgcggtctggcggatctggcggaggctccaccagccccaagaaaaagagaaaagtctaagctgccttctgcggggcttgccttctggccatgcccttcttctctcccttgcacctgtacctcttggtctttgaataaagcctgagtaggaaggctagcaaaaaaaaaaaaaaaaaaaaaaaaaaaaaaaaaaaaaaaaaaaaaaaaaaaaaaaaaaaaaaaaaaaaaaaaaaaaaaaa

SEQ ID NO: 13119 - RNA, 5785 nt, synthetic construct
  source 1..5785: mol_type = other RNA
aggaaataagagagaaaagaagagtaagaagaaatataagagccaccatggcccctaagaagaagcgtaaagtgagccggatggaacgcctcgtctacgaggtgcggcagaagtgcagaaacatcgaggacatctgcatctcctgcggatctctgaacgtgaccctggagcacccactgttcatcggcggcatgtgccagaactgtaaaaactgttttctggagtgtgcctatcaatacgacgatgacggctaccagagctactgcaccatctgttgcggcggaagagaggtgctgatgtgtggaaataacaactgctgccggtgcttctgcgtggaatgcgtggacctgctggtgggccccggcgccgcccaggccgctattaaggaagatccttggaactgctacatgtgcggccacaagggcacatacggcctgctgagacggagagaggactggcctagcagactgcagatgttcttcgccaataaccacgaccaggagttcgacccccctaaggtgtaccctcccgtccccgccgagaagagaaagcccatccgggtcctgagcctgttcgatggcatcgccaccggtctgctggtgctgaaggacctgggcatccaggtggataggtacattgcctccgaggtgtgcgaggactccatcaccgtgggaatggtgcgtcatcagggcaagatcatgtacgtgggcgacgtgcggagcgtgacacagaagcatatccaggagtggggccctttcgacctggtgatcggcggcagcccttgcaatgacctgagcatcgtgaacccagcccggaagggcctgtacgagggaaccggcagactgttcttcgagttttacagactgctgcacgacgcccggcctaaggaaggcgacgaccggcccttcttttggctgttcgagaatgtggtggccatgggagtcagcgacaagcgggatattagccggttcctggagagcaaccccgtgatgatcgatgccaaggaagtgagcgccgcccaccgggccagatacttctggggcaatctgcctggcatgaacagacccctggccagcaccgtgaacgacaagctggagctgcaggagtgcctggagcacggccggatcgccaagttcagcaaggtgagaaccatcaccacccgaagcaacagcatcaaacaaggcaaggaccagcactttcctgtgttcatgaacgagaaggaggacatcctgtggtgtaccgagatggagagagtgttcgggttcccagtccactacacagatgtcagcaacatgtctagactggccagacagagactgctgggaagaagctggtccgtccctgtgatcagacacctgttcgcccctctgaaggagtacttcgcctgcgtgagcagcggcaacagcaacgccaacagccggggccccagcttctctagcggcctggtgccactgtccctgagagggagccacatgggccccatggagatctacaaaaccgtgagcgcctggaagcggcagcctgtgcgcgtgctgagcctgtttcggaatatcgataaagtcctgaaaagcctgggattcctggagagcggctctggctccggcggtggcaccctgaagtacgtggaggatgtgacaaacgtggtcagacgggatgtggagaagtggggccccttcgatctggtgtacggcagcacccaacccctgggcagctcttgtgaccggtgccctggctggtacatgtttcagttccaccggatcctgcagtacgccctgccgagacaggagtcccagcggccattcttttggattttcatggacaacttgctgctgaccgaggatgaccaggaaactaccactcggttcctgcagaccgaagccgtgaccctgcaggacgtgagaggccgggactaccagaacgccatgcgggtgtggtccaacatccctggactgaaaagcaagcacgcacctctgacccctaaagaagaggagtacctgcaggcccaggtgcggagcagaagcaagctggacgcccctaaggtggatctgctggtgaagaattgcctcctgcccctgagagagtacttcaagtatttcagccagaatagtctgcccctgggaggcagcggcggcggcatggccctgacccagggccaggtgaccttcagggacgtggccatcgagttcagccaggaggagtggacctgcctggaccccgcccagaggagcctgtacagggacgtgatgctggagaactacaggaacctggccagcctgggcatcagctgcttcgacctgagcatcatcagcatgctggagcagggcaagggccccttcgccctggagagccaggtgcagagggccggcaaccccgacggcggcggcccaagcagcggcgcccctcctcccagcggcggcagcccagccggctccccaacctctaccgaggagggcacctctgagtccgccacccccgagagcggccctggcacctccaccgagcccagcgagggcagcgcacccggcagccctgccggcagccccacctccacagaggagggaaccagcaccgagcccagcgaaggcagcgccccaggcaccagcaccgagcctagtgagcaggagattaaacggatcaacaagatcagaagaagacttgtgaaagacagcaacaccaagaaggccggcaagacaggccccatgaaaaccctgctggttagagtgatgacacccgatctgagagagcggctggaaaacctgagaaagaagcctgaaaatatcccccagcccatcagcaatacatctagagccaacctgaataagctgctgaccgattacaccgaaatgaagaaggcgatcctgcatgtgtactgggaagagttccagaaggaccctgtgggcctgatgagccgggtggcccagcctgccagcaagaagatcgatcagaacaagctgaaacctgagatggacgagaagggcaacctgaccaccgccggctttgcctgctctcagtgtggccagcccctgttcgtgtacaagctggagcaggtgtctgagaagggcaaggcttacaccaactacttcggacggtgcaatgtggccgagcacgaaaagctgatcctgctggcccagctgaagcccgagaaggatagcgacgaagccgtgacatatagcctgggaaagtttgggcagagggccctggatttctacagcattcatgtgaccaaggagtccacccaccccgtgaagcccctggcccagatcgccggaaacagatacgcctccggacctgtgggaaaggccctgagcgacgcatgtatgggcacaatcgcctccttcctgtctaagtaccaggacatcatcatcgaacaccagaaggtggtgaagggcaaccagaagagactggagagcctgcgggagctggccggcaaggaaaacctggaataccctagcgtgaccctgccacctcagcctcacaccaaggagggcgttgatgcctacaacgaagtgatcgcccgggtgcgaatgtgggtgaacctgaacctgtggcagaagctgaagctaagcagagatgatgccaagcctctgctgagactgaagggattcccttcctttcctctggtcgagagacaggccaacgaagtggactggtgggacatggtgtgtaacgtgaagaagctgatcaacgagaaaaaggaggatggcaaggtgttttggcagaatctggctggctacaagagacaggaagccctgagaccatacctgagcagcgaggaagatcggaagaagggaaagaaattcgctcggtaccagctgggcgacctgctgctgcacctggaaaagaagcacggcgaggactggggaaaggtgtacgacgaggcctgggagcggattgacaagaaagtggaaggcctgagcaagcacatcaagctggaagaggaacggagaagcgaggacgcccagagcaaggccgccctgaccgactggctgcgggctaaggccagcttcgtgatcgagggcctgaaggaggccgacaaggacgagttctgcagatgcgagctgaagctgcagaagtggtacggggacctgcggggaaagcccttcgccatcgaagccgagaacagcatcctggacatcagcggcttcagcaagcagtacaactgtgccttcatctggcagaaggacggcgtgaagaagctgaacctgtacctgatcatcaactacttcaagggcggcaagctgcggttcaagaagatcaaacctgaagccttcgaagccaacagattctacaccgtgatcaacaaaaagagcggcgagatcgtgcccatggaggtgaacttcaacttcgacgaccccaacctgatcatcctgcctctggcctttggcaagagacagggcagagaattcatctggaacgacctgctgtccctggaaaccggcagcctgaagctggccaacggaagagtgatcgagaagacactgtacaacagaagaacccggcaggatgagcctgccctgttcgtggccctgaccttcgagcggcgggaggtcctggactcctccaatatcaaaccaatgaacctgatcggcgtggcaagaggcgaaaacatccccgccgtgatcgccctgaccgaccccgagggctgcccactgagccggtttaaggatagcctgggaaacccaacccacatcctgagaatcggcgagagctataaggagaagcagcggaccatccaggccaagaaggaggtggagcagcggagagccggcggctacagccggaagtacgccagcaaagccaagaatctggcagacgatatggtgagaaacaccgctagagatctgctgtactacgccgtgacccaggatgccatgctgatcttcgccaacctgagccggggcttcggccggcagggcaagcggaccttcatggccgagagacagtacacacggatggaggactggctgaccgccaagctggcctacgagggcctgagcaagacctacctgtccaagacactggcccagtacacctccaagacatgcagcaactgtgggtttaccatcaccagcgccgactacgacagggtgctggagaagctgaagaagacagcaacaggctggatgaccacaattaacggcaaggagctgaaggtggagggccagattacctactacaacagatacaagagacagaacgtagtcaaggacctgtccgtcgagctggatagactgagcgaagaatctgtgaacaacgacatctcctcctggacaaagggcagaagcggagaagctctgagcctcctgaagaaaagattctcccatagacccgtgcaggagaagttcgtgtgcctgaactgcggcttcgagacacacgcagccgagcaagccgccctgaacatcgccagatcctggctgttcctgcggagccaggagtacaagaaataccagacaaacaagacaaccggcaacaccgataagagagccttcgtcgagacctggcagtccttttaccggaagaagcttaaggaggtgtggaaacctgccgtgcggtctggcggatctggcggaggctccaccagccccaagaaaaagagaaaagtctaagctgccttctgcggggcttgccttctggccatgcccttcttctctcccttgcacctgtacctcttggtctttgaataaagcctgagtaggaaggctagcaaaaaaaaaaaaaaaaaaaaaaaaaaaaaaaaaaaaaaaaaaaaaaaaaaaaaaaaaaaaaaaaaaaaaaaaaaaaaaaa

SEQ ID NO: 13120 - RNA, 5785 nt, synthetic construct
  source 1..5785: mol_type = other RNA
aggaaataagagagaaaagaagagtaagaagaaatataagagccaccatggcccctaagaagaagcgtaaagtgagccggatggaacgcctcgtctacgaggtgcggcagaagtgcagaaacatcgaggacatctgcatctcctgcggatctctgaacgtgaccctggagcacccactgttcatcggcggcatgtgccagaactgtaaaaactgttttctggagtgtgcctatcaatacgacgatgacggctaccagagctactgcaccatctgttgcggcggaagagaggtgctgatgtgtggaaataacaactgctgccggtgcttctgcgtggaatgcgtggacctgctggtgggccccggcgccgcccaggccgctattaaggaagatccttggaactgctacatgtgcggccacaagggcacatacggcctgctgagacggagagaggactggcctagcagactgcagatgttcttcgccaataaccacgaccaggagttcgacccccctaaggtgtaccctcccgtccccgccgagaagagaaagcccatccgggtcctgagcctgttcgatggcatcgccaccggtctgctggtgctgaaggacctgggcatccaggtggataggtacattgcctccgaggtgtgcgaggactccatcaccgtgggaatggtgcgtcatcagggcaagatcatgtacgtgggcgacgtgcggagcgtgacacagaagcatatccaggagtggggccctttcgacctggtgatcggcggcagcccttgcaatgacctgagcatcgtgaacccagcccggaagggcctgtacgagggaaccggcagactgttcttcgagttttacagactgctgcacgacgcccggcctaaggaaggcgacgaccggcccttcttttggctgttcgagaatgtggtggccatgggagtcagcgacaagcgggatattagccggttcctggagagcaaccccgtgatgatcgatgccaaggaagtgagcgccgcccaccgggccagatacttctggggcaatctgcctggcatgaacagacccctggccagcaccgtgaacgacaagctggagctgcaggagtgcctggagcacggccggatcgccaagttcagcaaggtgagaaccatcaccacccgaagcaacagcatcaaacaaggcaaggaccagcactttcctgtgttcatgaacgagaaggaggacatcctgtggtgtaccgagatggagagagtgttcgggttcccagtccactacacagatgtcagcaacatgtctagactggccagacagagactgctgggaagaagctggtccgtccctgtgatcagacacctgttcgcccctctgaaggagtacttcgcctgcgtgagcagcggcaacagcaacgccaacagccggggccccagcttctctagcggcctggtgccactgtccctgagagggagccacatgggccccatggagatctacaaaaccgtgagcgcctggaagcggcagcctgtgcgcgtgctgagcctgtttcggaatatcgataaagtcctgaaaagcctgggattcctggagagcggctctggctccggcggtggcaccctgaagtacgtggaggatgtgacaaacgtggtcagacgggatgtggagaagtggggccccttcgatctggtgtacggcagcacccaacccctgggcagctcttgtgaccggtgccctggctggtacatgtttcagttccaccggatcctgcagtacgccctgccgagacaggagtcccagcggccattcttttggattttcatggacaacttgctgctgaccgaggatgaccaggaaactaccactcggttcctgcagaccgaagccgtgaccctgcaggacgtgagaggccgggactaccagaacgccatgcgggtgtggtccaacatccctggactgaaaagcaagcacgcacctctgacccctaaagaagaggagtacctgcaggcccaggtgcggagcagaagcaagctggacgcccctaaggtggatctgctggtgaagaattgcctcctgcccctgagagagtacttcaagtatttcagccagaatagtctgcccctgggaggcagcggcggcggcctggcccccgacgaccacggcagcagctacgagggcagcgtgagcttcagggacgtggccatcgacttcagcagggaggagtggaggcacctggaccccagccagaggaacctgtacagggacgtgatgctggagacctacagccacctgctgagcgtgggctaccaggtgcccgaggccgaggtggtgatgctggagcagggcaaggagccctgggccctgcagggcgagaggcccaggcacggcggcccaagcagcggcgcccctcctcccagcggcggcagcccagccggctccccaacctctaccgaggagggcacctctgagtccgccacccccgagagcggccctggcacctccaccgagcccagcgagggcagcgcacccggcagccctgccggcagccccacctccacagaggagggaaccagcaccgagcccagcgaaggcagcgccccaggcaccagcaccgagcctagtgagcaggagattaaacggatcaacaagatcagaagaagacttgtgaaagacagcaacaccaagaaggccggcaagacaggccccatgaaaaccctgctggttagagtgatgacacccgatctgagagagcggctggaaaacctgagaaagaagcctgaaaatatcccccagcccatcagcaatacatctagagccaacctgaataagctgctgaccgattacaccgaaatgaagaaggcgatcctgcatgtgtactgggaagagttccagaaggaccctgtgggcctgatgagccgggtggcccagcctgccagcaagaagatcgatcagaacaagctgaaacctgagatggacgagaagggcaacctgaccaccgccggctttgcctgctctcagtgtggccagcccctgttcgtgtacaagctggagcaggtgtctgagaagggcaaggcttacaccaactacttcggacggtgcaatgtggccgagcacgaaaagctgatcctgctggcccagctgaagcccgagaaggatagcgacgaagccgtgacatatagcctgggaaagtttgggcagagggccctggatttctacagcattcatgtgaccaaggagtccacccaccccgtgaagcccctggcccagatcgccggaaacagatacgcctccggacctgtgggaaaggccctgagcgacgcatgtatgggcacaatcgcctccttcctgtctaagtaccaggacatcatcatcgaacaccagaaggtggtgaagggcaaccagaagagactggagagcctgcgggagctggccggcaaggaaaacctggaataccctagcgtgaccctgccacctcagcctcacaccaaggagggcgttgatgcctacaacgaagtgatcgcccgggtgcgaatgtgggtgaacctgaacctgtggcagaagctgaagctaagcagagatgatgccaagcctctgctgagactgaagggattcccttcctttcctctggtcgagagacaggccaacgaagtggactggtgggacatggtgtgtaacgtgaagaagctgatcaacgagaaaaaggaggatggcaaggtgttttggcagaatctggctggctacaagagacaggaagccctgagaccatacctgagcagcgaggaagatcggaagaagggaaagaaattcgctcggtaccagctgggcgacctgctgctgcacctggaaaagaagcacggcgaggactggggaaaggtgtacgacgaggcctgggagcggattgacaagaaagtggaaggcctgagcaagcacatcaagctggaagaggaacggagaagcgaggacgcccagagcaaggccgccctgaccgactggctgcgggctaaggccagcttcgtgatcgagggcctgaaggaggccgacaaggacgagttctgcagatgcgagctgaagctgcagaagtggtacggggacctgcggggaaagcccttcgccatcgaagccgagaacagcatcctggacatcagcggcttcagcaagcagtacaactgtgccttcatctggcagaaggacggcgtgaagaagctgaacctgtacctgatcatcaactacttcaagggcggcaagctgcggttcaagaagatcaaacctgaagccttcgaagccaacagattctacaccgtgatcaacaaaaagagcggcgagatcgtgcccatggaggtgaacttcaacttcgacgaccccaacctgatcatcctgcctctggcctttggcaagagacagggcagagaattcatctggaacgacctgctgtccctggaaaccggcagcctgaagctggccaacggaagagtgatcgagaagacactgtacaacagaagaacccggcaggatgagcctgccctgttcgtggccctgaccttcgagcggcgggaggtcctggactcctccaatatcaaaccaatgaacctgatcggcgtggcaagaggcgaaaacatccccgccgtgatcgccctgaccgaccccgagggctgcccactgagccggtttaaggatagcctgggaaacccaacccacatcctgagaatcggcgagagctataaggagaagcagcggaccatccaggccaagaaggaggtggagcagcggagagccggcggctacagccggaagtacgccagcaaagccaagaatctggcagacgatatggtgagaaacaccgctagagatctgctgtactacgccgtgacccaggatgccatgctgatcttcgccaacctgagccggggcttcggccggcagggcaagcggaccttcatggccgagagacagtacacacggatggaggactggctgaccgccaagctggcctacgagggcctgagcaagacctacctgtccaagacactggcccagtacacctccaagacatgcagcaactgtgggtttaccatcaccagcgccgactacgacagggtgctggagaagctgaagaagacagcaacaggctggatgaccacaattaacggcaaggagctgaaggtggagggccagattacctactacaacagatacaagagacagaacgtagtcaaggacctgtccgtcgagctggatagactgagcgaagaatctgtgaacaacgacatctcctcctggacaaagggcagaagcggagaagctctgagcctcctgaagaaaagattctcccatagacccgtgcaggagaagttcgtgtgcctgaactgcggcttcgagacacacgcagccgagcaagccgccctgaacatcgccagatcctggctgttcctgcggagccaggagtacaagaaataccagacaaacaagacaaccggcaacaccgataagagagccttcgtcgagacctggcagtccttttaccggaagaagcttaaggaggtgtggaaacctgccgtgcggtctggcggatctggcggaggctccaccagccccaagaaaaagagaaaagtctaagctgccttctgcggggcttgccttctggccatgcccttcttctctcccttgcacctgtacctcttggtctttgaataaagcctgagtaggaaggctagcaaaaaaaaaaaaaaaaaaaaaaaaaaaaaaaaaaaaaaaaaaaaaaaaaaaaaaaaaaaaaaaaaaaaaaaaaaaaaaaa

SEQ ID NO: 13121 - RNA, 5785 nt, synthetic construct
  source 1..5785: mol_type = other RNA
aggaaataagagagaaaagaagagtaagaagaaatataagagccaccatggcccctaagaagaagcgtaaagtgagccggatggaacgcctcgtctacgaggtgcggcagaagtgcagaaacatcgaggacatctgcatctcctgcggatctctgaacgtgaccctggagcacccactgttcatcggcggcatgtgccagaactgtaaaaactgttttctggagtgtgcctatcaatacgacgatgacggctaccagagctactgcaccatctgttgcggcggaagagaggtgctgatgtgtggaaataacaactgctgccggtgcttctgcgtggaatgcgtggacctgctggtgggccccggcgccgcccaggccgctattaaggaagatccttggaactgctacatgtgcggccacaagggcacatacggcctgctgagacggagagaggactggcctagcagactgcagatgttcttcgccaataaccacgaccaggagttcgacccccctaaggtgtaccctcccgtccccgccgagaagagaaagcccatccgggtcctgagcctgttcgatggcatcgccaccggtctgctggtgctgaaggacctgggcatccaggtggataggtacattgcctccgaggtgtgcgaggactccatcaccgtgggaatggtgcgtcatcagggcaagatcatgtacgtgggcgacgtgcggagcgtgacacagaagcatatccaggagtggggccctttcgacctggtgatcggcggcagcccttgcaatgacctgagcatcgtgaacccagcccggaagggcctgtacgagggaaccggcagactgttcttcgagttttacagactgctgcacgacgcccggcctaaggaaggcgacgaccggcccttcttttggctgttcgagaatgtggtggccatgggagtcagcgacaagcgggatattagccggttcctggagagcaaccccgtgatgatcgatgccaaggaagtgagcgccgcccaccgggccagatacttctggggcaatctgcctggcatgaacagacccctggccagcaccgtgaacgacaagctggagctgcaggagtgcctggagcacggccggatcgccaagttcagcaaggtgagaaccatcaccacccgaagcaacagcatcaaacaaggcaaggaccagcactttcctgtgttcatgaacgagaaggaggacatcctgtggtgtaccgagatggagagagtgttcgggttcccagtccactacacagatgtcagcaacatgtctagactggccagacagagactgctgggaagaagctggtccgtccctgtgatcagacacctgttcgcccctctgaaggagtacttcgcctgcgtgagcagcggcaacagcaacgccaacagccggggccccagcttctctagcggcctggtgccactgtccctgagagggagccacatgggccccatggagatctacaaaaccgtgagcgcctggaagcggcagcctgtgcgcgtgctgagcctgtttcggaatatcgataaagtcctgaaaagcctgggattcctggagagcggctctggctccggcggtggcaccctgaagtacgtggaggatgtgacaaacgtggtcagacgggatgtggagaagtggggccccttcgatctggtgtacggcagcacccaacccctgggcagctcttgtgaccggtgccctggctggtacatgtttcagttccaccggatcctgcagtacgccctgccgagacaggagtcccagcggccattcttttggattttcatggacaacttgctgctgaccgaggatgaccaggaaactaccactcggttcctgcagaccgaagccgtgaccctgcaggacgtgagaggccgggactaccagaacgccatgcgggtgtggtccaacatccctggactgaaaagcaagcacgcacctctgacccctaaagaagaggagtacctgcaggcccaggtgcggagcagaagcaagctggacgcccctaaggtggatctgctggtgaagaattgcctcctgcccctgagagagtacttcaagtatttcagccagaatagtctgcccctgggaggcagcggcggcggcatccaggagcccgtgaccttcaaggacgtggccgtggacttcacccaggaggagtggggcaggctggaccccgtgcagaggaccctgtacagggacgtgatgctggagacctacaggcacctgctgagcgtgggcaaccagatcgccaagcccgaggtgatcagcctgctggagcagggcgaggagccctggagcgtggagcaggcctacccccagagcacctgccccgccgtggacaccgagggcggcccaagcagcggcgcccctcctcccagcggcggcagcccagccggctccccaacctctaccgaggagggcacctctgagtccgccacccccgagagcggccctggcacctccaccgagcccagcgagggcagcgcacccggcagccctgccggcagccccacctccacagaggagggaaccagcaccgagcccagcgaaggcagcgccccaggcaccagcaccgagcctagtgagcaggagattaaacggatcaacaagatcagaagaagacttgtgaaagacagcaacaccaagaaggccggcaagacaggccccatgaaaaccctgctggttagagtgatgacacccgatctgagagagcggctggaaaacctgagaaagaagcctgaaaatatcccccagcccatcagcaatacatctagagccaacctgaataagctgctgaccgattacaccgaaatgaagaaggcgatcctgcatgtgtactgggaagagttccagaaggaccctgtgggcctgatgagccgggtggcccagcctgccagcaagaagatcgatcagaacaagctgaaacctgagatggacgagaagggcaacctgaccaccgccggctttgcctgctctcagtgtggccagcccctgttcgtgtacaagctggagcaggtgtctgagaagggcaaggcttacaccaactacttcggacggtgcaatgtggccgagcacgaaaagctgatcctgctggcccagctgaagcccgagaaggatagcgacgaagccgtgacatatagcctgggaaagtttgggcagagggccctggatttctacagcattcatgtgaccaaggagtccacccaccccgtgaagcccctggcccagatcgccggaaacagatacgcctccggacctgtgggaaaggccctgagcgacgcatgtatgggcacaatcgcctccttcctgtctaagtaccaggacatcatcatcgaacaccagaaggtggtgaagggcaaccagaagagactggagagcctgcgggagctggccggcaaggaaaacctggaataccctagcgtgaccctgccacctcagcctcacaccaaggagggcgttgatgcctacaacgaagtgatcgcccgggtgcgaatgtgggtgaacctgaacctgtggcagaagctgaagctaagcagagatgatgccaagcctctgctgagactgaagggattcccttcctttcctctggtcgagagacaggccaacgaagtggactggtgggacatggtgtgtaacgtgaagaagctgatcaacgagaaaaaggaggatggcaaggtgttttggcagaatctggctggctacaagagacaggaagccctgagaccatacctgagcagcgaggaagatcggaagaagggaaagaaattcgctcggtaccagctgggcgacctgctgctgcacctggaaaagaagcacggcgaggactggggaaaggtgtacgacgaggcctgggagcggattgacaagaaagtggaaggcctgagcaagcacatcaagctggaagaggaacggagaagcgaggacgcccagagcaaggccgccctgaccgactggctgcgggctaaggccagcttcgtgatcgagggcctgaaggaggccgacaaggacgagttctgcagatgcgagctgaagctgcagaagtggtacggggacctgcggggaaagcccttcgccatcgaagccgagaacagcatcctggacatcagcggcttcagcaagcagtacaactgtgccttcatctggcagaaggacggcgtgaagaagctgaacctgtacctgatcatcaactacttcaagggcggcaagctgcggttcaagaagatcaaacctgaagccttcgaagccaacagattctacaccgtgatcaacaaaaagagcggcgagatcgtgcccatggaggtgaacttcaacttcgacgaccccaacctgatcatcctgcctctggcctttggcaagagacagggcagagaattcatctggaacgacctgctgtccctggaaaccggcagcctgaagctggccaacggaagagtgatcgagaagacactgtacaacagaagaacccggcaggatgagcctgccctgttcgtggccctgaccttcgagcggcgggaggtcctggactcctccaatatcaaaccaatgaacctgatcggcgtggcaagaggcgaaaacatccccgccgtgatcgccctgaccgaccccgagggctgcccactgagccggtttaaggatagcctgggaaacccaacccacatcctgagaatcggcgagagctataaggagaagcagcggaccatccaggccaagaaggaggtggagcagcggagagccggcggctacagccggaagtacgccagcaaagccaagaatctggcagacgatatggtgagaaacaccgctagagatctgctgtactacgccgtgacccaggatgccatgctgatcttcgccaacctgagccggggcttcggccggcagggcaagcggaccttcatggccgagagacagtacacacggatggaggactggctgaccgccaagctggcctacgagggcctgagcaagacctacctgtccaagacactggcccagtacacctccaagacatgcagcaactgtgggtttaccatcaccagcgccgactacgacagggtgctggagaagctgaagaagacagcaacaggctggatgaccacaattaacggcaaggagctgaaggtggagggccagattacctactacaacagatacaagagacagaacgtagtcaaggacctgtccgtcgagctggatagactgagcgaagaatctgtgaacaacgacatctcctcctggacaaagggcagaagcggagaagctctgagcctcctgaagaaaagattctcccatagacccgtgcaggagaagttcgtgtgcctgaactgcggcttcgagacacacgcagccgagcaagccgccctgaacatcgccagatcctggctgttcctgcggagccaggagtacaagaaataccagacaaacaagacaaccggcaacaccgataagagagccttcgtcgagacctggcagtccttttaccggaagaagcttaaggaggtgtggaaacctgccgtgcggtctggcggatctggcggaggctccaccagccccaagaaaaagagaaaagtctaagctgccttctgcggggcttgccttctggccatgcccttcttctctcccttgcacctgtacctcttggtctttgaataaagcctgagtaggaaggctagcaaaaaaaaaaaaaaaaaaaaaaaaaaaaaaaaaaaaaaaaaaaaaaaaaaaaaaaaaaaaaaaaaaaaaaaaaaaaaaaa

SEQ ID NO: 13122 - RNA, 5791 nt, synthetic construct
  source 1..5791: mol_type = other RNA
aggaaataagagagaaaagaagagtaagaagaaatataagagccaccatggcccctaagaagaagcgtaaagtgagccggatggaacgcctcgtctacgaggtgcggcagaagtgcagaaacatcgaggacatctgcatctcctgcggatctctgaacgtgaccctggagcacccactgttcatcggcggcatgtgccagaactgtaaaaactgttttctggagtgtgcctatcaatacgacgatgacggctaccagagctactgcaccatctgttgcggcggaagagaggtgctgatgtgtggaaataacaactgctgccggtgcttctgcgtggaatgcgtggacctgctggtgggccccggcgccgcccaggccgctattaaggaagatccttggaactgctacatgtgcggccacaagggcacatacggcctgctgagacggagagaggactggcctagcagactgcagatgttcttcgccaataaccacgaccaggagttcgacccccctaaggtgtaccctcccgtccccgccgagaagagaaagcccatccgggtcctgagcctgttcgatggcatcgccaccggtctgctggtgctgaaggacctgggcatccaggtggataggtacattgcctccgaggtgtgcgaggactccatcaccgtgggaatggtgcgtcatcagggcaagatcatgtacgtgggcgacgtgcggagcgtgacacagaagcatatccaggagtggggccctttcgacctggtgatcggcggcagcccttgcaatgacctgagcatcgtgaacccagcccggaagggcctgtacgagggaaccggcagactgttcttcgagttttacagactgctgcacgacgcccggcctaaggaaggcgacgaccggcccttcttttggctgttcgagaatgtggtggccatgggagtcagcgacaagcgggatattagccggttcctggagagcaaccccgtgatgatcgatgccaaggaagtgagcgccgcccaccgggccagatacttctggggcaatctgcctggcatgaacagacccctggccagcaccgtgaacgacaagctggagctgcaggagtgcctggagcacggccggatcgccaagttcagcaaggtgagaaccatcaccacccgaagcaacagcatcaaacaaggcaaggaccagcactttcctgtgttcatgaacgagaaggaggacatcctgtggtgtaccgagatggagagagtgttcgggttcccagtccactacacagatgtcagcaacatgtctagactggccagacagagactgctgggaagaagctggtccgtccctgtgatcagacacctgttcgcccctctgaaggagtacttcgcctgcgtgagcagcggcaacagcaacgccaacagccggggccccagcttctctagcggcctggtgccactgtccctgagagggagccacatgggccccatggagatctacaaaaccgtgagcgcctggaagcggcagcctgtgcgcgtgctgagcctgtttcggaatatcgataaagtcctgaaaagcctgggattcctggagagcggctctggctccggcggtggcaccctgaagtacgtggaggatgtgacaaacgtggtcagacgggatgtggagaagtggggccccttcgatctggtgtacggcagcacccaacccctgggcagctcttgtgaccggtgccctggctggtacatgtttcagttccaccggatcctgcagtacgccctgccgagacaggagtcccagcggccattcttttggattttcatggacaacttgctgctgaccgaggatgaccaggaaactaccactcggttcctgcagaccgaagccgtgaccctgcaggacgtgagaggccgggactaccagaacgccatgcgggtgtggtccaacatccctggactgaaaagcaagcacgcacctctgacccctaaagaagaggagtacctgcaggcccaggtgcggagcagaagcaagctggacgcccctaaggtggatctgctggtgaagaattgcctcctgcccctgagagagtacttcaagtatttcagccagaatagtctgcccctgggaggcagcggcggcggcgtgacctacgacgacgtgtgcatcgacttcacctgggaggagtggaccctgctggaccccagccagaagaagctgtacaaggacgtgatgctggagacctacaggaacctgaccgccatcggctacaactgggagaaccaccacgtggaggagtactaccagagcagcaggaggaacgccaggaacgagaagagccagaccgccgagaagcccagcgtgaacacccagtgcgtgaaggccttcacccacggcggcccaagcagcggcgcccctcctcccagcggcggcagcccagccggctccccaacctctaccgaggagggcacctctgagtccgccacccccgagagcggccctggcacctccaccgagcccagcgagggcagcgcacccggcagccctgccggcagccccacctccacagaggagggaaccagcaccgagcccagcgaaggcagcgccccaggcaccagcaccgagcctagtgagcaggagattaaacggatcaacaagatcagaagaagacttgtgaaagacagcaacaccaagaaggccggcaagacaggccccatgaaaaccctgctggttagagtgatgacacccgatctgagagagcggctggaaaacctgagaaagaagcctgaaaatatcccccagcccatcagcaatacatctagagccaacctgaataagctgctgaccgattacaccgaaatgaagaaggcgatcctgcatgtgtactgggaagagttccagaaggaccctgtgggcctgatgagccgggtggcccagcctgccagcaagaagatcgatcagaacaagctgaaacctgagatggacgagaagggcaacctgaccaccgccggctttgcctgctctcagtgtggccagcccctgttcgtgtacaagctggagcaggtgtctgagaagggcaaggcttacaccaactacttcggacggtgcaatgtggccgagcacgaaaagctgatcctgctggcccagctgaagcccgagaaggatagcgacgaagccgtgacatatagcctgggaaagtttgggcagagggccctggatttctacagcattcatgtgaccaaggagtccacccaccccgtgaagcccctggcccagatcgccggaaacagatacgcctccggacctgtgggaaaggccctgagcgacgcatgtatgggcacaatcgcctccttcctgtctaagtaccaggacatcatcatcgaacaccagaaggtggtgaagggcaaccagaagagactggagagcctgcgggagctggccggcaaggaaaacctggaataccctagcgtgaccctgccacctcagcctcacaccaaggagggcgttgatgcctacaacgaagtgatcgcccgggtgcgaatgtgggtgaacctgaacctgtggcagaagctgaagctaagcagagatgatgccaagcctctgctgagactgaagggattcccttcctttcctctggtcgagagacaggccaacgaagtggactggtgggacatggtgtgtaacgtgaagaagctgatcaacgagaaaaaggaggatggcaaggtgttttggcagaatctggctggctacaagagacaggaagccctgagaccatacctgagcagcgaggaagatcggaagaagggaaagaaattcgctcggtaccagctgggcgacctgctgctgcacctggaaaagaagcacggcgaggactggggaaaggtgtacgacgaggcctgggagcggattgacaagaaagtggaaggcctgagcaagcacatcaagctggaagaggaacggagaagcgaggacgcccagagcaaggccgccctgaccgactggctgcgggctaaggccagcttcgtgatcgagggcctgaaggaggccgacaaggacgagttctgcagatgcgagctgaagctgcagaagtggtacggggacctgcggggaaagcccttcgccatcgaagccgagaacagcatcctggacatcagcggcttcagcaagcagtacaactgtgccttcatctggcagaaggacggcgtgaagaagctgaacctgtacctgatcatcaactacttcaagggcggcaagctgcggttcaagaagatcaaacctgaagccttcgaagccaacagattctacaccgtgatcaacaaaaagagcggcgagatcgtgcccatggaggtgaacttcaacttcgacgaccccaacctgatcatcctgcctctggcctttggcaagagacagggcagagaattcatctggaacgacctgctgtccctggaaaccggcagcctgaagctggccaacggaagagtgatcgagaagacactgtacaacagaagaacccggcaggatgagcctgccctgttcgtggccctgaccttcgagcggcgggaggtcctggactcctccaatatcaaaccaatgaacctgatcggcgtggcaagaggcgaaaacatccccgccgtgatcgccctgaccgaccccgagggctgcccactgagccggtttaaggatagcctgggaaacccaacccacatcctgagaatcggcgagagctataaggagaagcagcggaccatccaggccaagaaggaggtggagcagcggagagccggcggctacagccggaagtacgccagcaaagccaagaatctggcagacgatatggtgagaaacaccgctagagatctgctgtactacgccgtgacccaggatgccatgctgatcttcgccaacctgagccggggcttcggccggcagggcaagcggaccttcatggccgagagacagtacacacggatggaggactggctgaccgccaagctggcctacgagggcctgagcaagacctacctgtccaagacactggcccagtacacctccaagacatgcagcaactgtgggtttaccatcaccagcgccgactacgacagggtgctggagaagctgaagaagacagcaacaggctggatgaccacaattaacggcaaggagctgaaggtggagggccagattacctactacaacagatacaagagacagaacgtagtcaaggacctgtccgtcgagctggatagactgagcgaagaatctgtgaacaacgacatctcctcctggacaaagggcagaagcggagaagctctgagcctcctgaagaaaagattctcccatagacccgtgcaggagaagttcgtgtgcctgaactgcggcttcgagacacacgcagccgagcaagccgccctgaacatcgccagatcctggctgttcctgcggagccaggagtacaagaaataccagacaaacaagacaaccggcaacaccgataagagagccttcgtcgagacctggcagtccttttaccggaagaagcttaaggaggtgtggaaacctgccgtgcggtctggcggatctggcggaggctccaccagccccaagaaaaagagaaaagtctaagctgccttctgcggggcttgccttctggccatgcccttcttctctcccttgcacctgtacctcttggtctttgaataaagcctgagtaggaaggctagcaaaaaaaaaaaaaaaaaaaaaaaaaaaaaaaaaaaaaaaaaaaaaaaaaaaaaaaaaaaaaaaaaaaaaaaaaaaaaaaa

SEQ ID NO: 13123 - RNA, 5785 nt, synthetic construct
  source 1..5785: mol_type = other RNA
aggaaataagagagaaaagaagagtaagaagaaatataagagccaccatggcccctaagaagaagcgtaaagtgagccggatggaacgcctcgtctacgaggtgcggcagaagtgcagaaacatcgaggacatctgcatctcctgcggatctctgaacgtgaccctggagcacccactgttcatcggcggcatgtgccagaactgtaaaaactgttttctggagtgtgcctatcaatacgacgatgacggctaccagagctactgcaccatctgttgcggcggaagagaggtgctgatgtgtggaaataacaactgctgccggtgcttctgcgtggaatgcgtggacctgctggtgggccccggcgccgcccaggccgctattaaggaagatccttggaactgctacatgtgcggccacaagggcacatacggcctgctgagacggagagaggactggcctagcagactgcagatgttcttcgccaataaccacgaccaggagttcgacccccctaaggtgtaccctcccgtccccgccgagaagagaaagcccatccgggtcctgagcctgttcgatggcatcgccaccggtctgctggtgctgaaggacctgggcatccaggtggataggtacattgcctccgaggtgtgcgaggactccatcaccgtgggaatggtgcgtcatcagggcaagatcatgtacgtgggcgacgtgcggagcgtgacacagaagcatatccaggagtggggccctttcgacctggtgatcggcggcagcccttgcaatgacctgagcatcgtgaacccagcccggaagggcctgtacgagggaaccggcagactgttcttcgagttttacagactgctgcacgacgcccggcctaaggaaggcgacgaccggcccttcttttggctgttcgagaatgtggtggccatgggagtcagcgacaagcgggatattagccggttcctggagagcaaccccgtgatgatcgatgccaaggaagtgagcgccgcccaccgggccagatacttctggggcaatctgcctggcatgaacagacccctggccagcaccgtgaacgacaagctggagctgcaggagtgcctggagcacggccggatcgccaagttcagcaaggtgagaaccatcaccacccgaagcaacagcatcaaacaaggcaaggaccagcactttcctgtgttcatgaacgagaaggaggacatcctgtggtgtaccgagatggagagagtgttcgggttcccagtccactacacagatgtcagcaacatgtctagactggccagacagagactgctgggaagaagctggtccgtccctgtgatcagacacctgttcgcccctctgaaggagtacttcgcctgcgtgagcagcggcaacagcaacgccaacagccggggccccagcttctctagcggcctggtgccactgtccctgagagggagccacatgggccccatggagatctacaaaaccgtgagcgcctggaagcggcagcctgtgcgcgtgctgagcctgtttcggaatatcgataaagtcctgaaaagcctgggattcctggagagcggctctggctccggcggtggcaccctgaagtacgtggaggatgtgacaaacgtggtcagacgggatgtggagaagtggggccccttcgatctggtgtacggcagcacccaacccctgggcagctcttgtgaccggtgccctggctggtacatgtttcagttccaccggatcctgcagtacgccctgccgagacaggagtcccagcggccattcttttggattttcatggacaacttgctgctgaccgaggatgaccaggaaactaccactcggttcctgcagaccgaagccgtgaccctgcaggacgtgagaggccgggactaccagaacgccatgcgggtgtggtccaacatccctggactgaaaagcaagcacgcacctctgacccctaaagaagaggagtacctgcaggcccaggtgcggagcagaagcaagctggacgcccctaaggtggatctgctggtgaagaattgcctcctgcccctgagagagtacttcaagtatttcagccagaatagtctgcccctgggaggcagcggcggcggcatggagggcctggtgatgttcagggacgtggccgtggacttcagccaggaggagtgggcctgcctggaccccgcccagaggggcctgtacagggacgtgatgctggagaactaccaccacctggtgagcctgggcctgagcctgagcaagcccgacgtgatcagcctgctggagcagggcaaggagccctggatggtgagcaggaacatggccggcggctggtgccccgacaggctgaagaacggcggcccaagcagcggcgcccctcctcccagcggcggcagcccagccggctccccaacctctaccgaggagggcacctctgagtccgccacccccgagagcggccctggcacctccaccgagcccagcgagggcagcgcacccggcagccctgccggcagccccacctccacagaggagggaaccagcaccgagcccagcgaaggcagcgccccaggcaccagcaccgagcctagtgagcaggagattaaacggatcaacaagatcagaagaagacttgtgaaagacagcaacaccaagaaggccggcaagacaggccccatgaaaaccctgctggttagagtgatgacacccgatctgagagagcggctggaaaacctgagaaagaagcctgaaaatatcccccagcccatcagcaatacatctagagccaacctgaataagctgctgaccgattacaccgaaatgaagaaggcgatcctgcatgtgtactgggaagagttccagaaggaccctgtgggcctgatgagccgggtggcccagcctgccagcaagaagatcgatcagaacaagctgaaacctgagatggacgagaagggcaacctgaccaccgccggctttgcctgctctcagtgtggccagcccctgttcgtgtacaagctggagcaggtgtctgagaagggcaaggcttacaccaactacttcggacggtgcaatgtggccgagcacgaaaagctgatcctgctggcccagctgaagcccgagaaggatagcgacgaagccgtgacatatagcctgggaaagtttgggcagagggccctggatttctacagcattcatgtgaccaaggagtccacccaccccgtgaagcccctggcccagatcgccggaaacagatacgcctccggacctgtgggaaaggccctgagcgacgcatgtatgggcacaatcgcctccttcctgtctaagtaccaggacatcatcatcgaacaccagaaggtggtgaagggcaaccagaagagactggagagcctgcgggagctggccggcaaggaaaacctggaataccctagcgtgaccctgccacctcagcctcacaccaaggagggcgttgatgcctacaacgaagtgatcgcccgggtgcgaatgtgggtgaacctgaacctgtggcagaagctgaagctaagcagagatgatgccaagcctctgctgagactgaagggattcccttcctttcctctggtcgagagacaggccaacgaagtggactggtgggacatggtgtgtaacgtgaagaagctgatcaacgagaaaaaggaggatggcaaggtgttttggcagaatctggctggctacaagagacaggaagccctgagaccatacctgagcagcgaggaagatcggaagaagggaaagaaattcgctcggtaccagctgggcgacctgctgctgcacctggaaaagaagcacggcgaggactggggaaaggtgtacgacgaggcctgggagcggattgacaagaaagtggaaggcctgagcaagcacatcaagctggaagaggaacggagaagcgaggacgcccagagcaaggccgccctgaccgactggctgcgggctaaggccagcttcgtgatcgagggcctgaaggaggccgacaaggacgagttctgcagatgcgagctgaagctgcagaagtggtacggggacctgcggggaaagcccttcgccatcgaagccgagaacagcatcctggacatcagcggcttcagcaagcagtacaactgtgccttcatctggcagaaggacggcgtgaagaagctgaacctgtacctgatcatcaactacttcaagggcggcaagctgcggttcaagaagatcaaacctgaagccttcgaagccaacagattctacaccgtgatcaacaaaaagagcggcgagatcgtgcccatggaggtgaacttcaacttcgacgaccccaacctgatcatcctgcctctggcctttggcaagagacagggcagagaattcatctggaacgacctgctgtccctggaaaccggcagcctgaagctggccaacggaagagtgatcgagaagacactgtacaacagaagaacccggcaggatgagcctgccctgttcgtggccctgaccttcgagcggcgggaggtcctggactcctccaatatcaaaccaatgaacctgatcggcgtggcaagaggcgaaaacatccccgccgtgatcgccctgaccgaccccgagggctgcccactgagccggtttaaggatagcctgggaaacccaacccacatcctgagaatcggcgagagctataaggagaagcagcggaccatccaggccaagaaggaggtggagcagcggagagccggcggctacagccggaagtacgccagcaaagccaagaatctggcagacgatatggtgagaaacaccgctagagatctgctgtactacgccgtgacccaggatgccatgctgatcttcgccaacctgagccggggcttcggccggcagggcaagcggaccttcatggccgagagacagtacacacggatggaggactggctgaccgccaagctggcctacgagggcctgagcaagacctacctgtccaagacactggcccagtacacctccaagacatgcagcaactgtgggtttaccatcaccagcgccgactacgacagggtgctggagaagctgaagaagacagcaacaggctggatgaccacaattaacggcaaggagctgaaggtggagggccagattacctactacaacagatacaagagacagaacgtagtcaaggacctgtccgtcgagctggatagactgagcgaagaatctgtgaacaacgacatctcctcctggacaaagggcagaagcggagaagctctgagcctcctgaagaaaagattctcccatagacccgtgcaggagaagttcgtgtgcctgaactgcggcttcgagacacacgcagccgagcaagccgccctgaacatcgccagatcctggctgttcctgcggagccaggagtacaagaaataccagacaaacaagacaaccggcaacaccgataagagagccttcgtcgagacctggcagtccttttaccggaagaagcttaaggaggtgtggaaacctgccgtgcggtctggcggatctggcggaggctccaccagccccaagaaaaagagaaaagtctaagctgccttctgcggggcttgccttctggccatgcccttcttctctcccttgcacctgtacctcttggtctttgaataaagcctgagtaggaaggctagcaaaaaaaaaaaaaaaaaaaaaaaaaaaaaaaaaaaaaaaaaaaaaaaaaaaaaaaaaaaaaaaaaaaaaaaaaaaaaaaa

SEQ ID NO: 13124 - RNA, 5785 nt, synthetic construct
  source 1..5785: mol_type = other RNA
aggaaataagagagaaaagaagagtaagaagaaatataagagccaccatggcccctaagaagaagcgtaaagtgagccggatggaacgcctcgtctacgaggtgcggcagaagtgcagaaacatcgaggacatctgcatctcctgcggatctctgaacgtgaccctggagcacccactgttcatcggcggcatgtgccagaactgtaaaaactgttttctggagtgtgcctatcaatacgacgatgacggctaccagagctactgcaccatctgttgcggcggaagagaggtgctgatgtgtggaaataacaactgctgccggtgcttctgcgtggaatgcgtggacctgctggtgggccccggcgccgcccaggccgctattaaggaagatccttggaactgctacatgtgcggccacaagggcacatacggcctgctgagacggagagaggactggcctagcagactgcagatgttcttcgccaataaccacgaccaggagttcgacccccctaaggtgtaccctcccgtccccgccgagaagagaaagcccatccgggtcctgagcctgttcgatggcatcgccaccggtctgctggtgctgaaggacctgggcatccaggtggataggtacattgcctccgaggtgtgcgaggactccatcaccgtgggaatggtgcgtcatcagggcaagatcatgtacgtgggcgacgtgcggagcgtgacacagaagcatatccaggagtggggccctttcgacctggtgatcggcggcagcccttgcaatgacctgagcatcgtgaacccagcccggaagggcctgtacgagggaaccggcagactgttcttcgagttttacagactgctgcacgacgcccggcctaaggaaggcgacgaccggcccttcttttggctgttcgagaatgtggtggccatgggagtcagcgacaagcgggatattagccggttcctggagagcaaccccgtgatgatcgatgccaaggaagtgagcgccgcccaccgggccagatacttctggggcaatctgcctggcatgaacagacccctggccagcaccgtgaacgacaagctggagctgcaggagtgcctggagcacggccggatcgccaagttcagcaaggtgagaaccatcaccacccgaagcaacagcatcaaacaaggcaaggaccagcactttcctgtgttcatgaacgagaaggaggacatcctgtggtgtaccgagatggagagagtgttcgggttcccagtccactacacagatgtcagcaacatgtctagactggccagacagagactgctgggaagaagctggtccgtccctgtgatcagacacctgttcgcccctctgaaggagtacttcgcctgcgtgagcagcggcaacagcaacgccaacagccggggccccagcttctctagcggcctggtgccactgtccctgagagggagccacatgggccccatggagatctacaaaaccgtgagcgcctggaagcggcagcctgtgcgcgtgctgagcctgtttcggaatatcgataaagtcctgaaaagcctgggattcctggagagcggctctggctccggcggtggcaccctgaagtacgtggaggatgtgacaaacgtggtcagacgggatgtggagaagtggggccccttcgatctggtgtacggcagcacccaacccctgggcagctcttgtgaccggtgccctggctggtacatgtttcagttccaccggatcctgcagtacgccctgccgagacaggagtcccagcggccattcttttggattttcatggacaacttgctgctgaccgaggatgaccaggaaactaccactcggttcctgcagaccgaagccgtgaccctgcaggacgtgagaggccgggactaccagaacgccatgcgggtgtggtccaacatccctggactgaaaagcaagcacgcacctctgacccctaaagaagaggagtacctgcaggcccaggtgcggagcagaagcaagctggacgcccctaaggtggatctgctggtgaagaattgcctcctgcccctgagagagtacttcaagtatttcagccagaatagtctgcccctgggaggcagcggcggcggcgccagggagcccgtgagcttcgtggaggtggccgtgtacttcagcagggaggagtgggccctgctggaccccgcccagagggccctgtacagggacgtgatgctggagacctacgagagcgtggccagcctgggccccttccccgcccccaagcccgtggtgatcagcctgctggagggcggcgacgacccctggatccccgacgtgcacagccccgaggccgtgagcggcgacttcagccccggcggcccaagcagcggcgcccctcctcccagcggcggcagcccagccggctccccaacctctaccgaggagggcacctctgagtccgccacccccgagagcggccctggcacctccaccgagcccagcgagggcagcgcacccggcagccctgccggcagccccacctccacagaggagggaaccagcaccgagcccagcgaaggcagcgccccaggcaccagcaccgagcctagtgagcaggagattaaacggatcaacaagatcagaagaagacttgtgaaagacagcaacaccaagaaggccggcaagacaggccccatgaaaaccctgctggttagagtgatgacacccgatctgagagagcggctggaaaacctgagaaagaagcctgaaaatatcccccagcccatcagcaatacatctagagccaacctgaataagctgctgaccgattacaccgaaatgaagaaggcgatcctgcatgtgtactgggaagagttccagaaggaccctgtgggcctgatgagccgggtggcccagcctgccagcaagaagatcgatcagaacaagctgaaacctgagatggacgagaagggcaacctgaccaccgccggctttgcctgctctcagtgtggccagcccctgttcgtgtacaagctggagcaggtgtctgagaagggcaaggcttacaccaactacttcggacggtgcaatgtggccgagcacgaaaagctgatcctgctggcccagctgaagcccgagaaggatagcgacgaagccgtgacatatagcctgggaaagtttgggcagagggccctggatttctacagcattcatgtgaccaaggagtccacccaccccgtgaagcccctggcccagatcgccggaaacagatacgcctccggacctgtgggaaaggccctgagcgacgcatgtatgggcacaatcgcctccttcctgtctaagtaccaggacatcatcatcgaacaccagaaggtggtgaagggcaaccagaagagactggagagcctgcgggagctggccggcaaggaaaacctggaataccctagcgtgaccctgccacctcagcctcacaccaaggagggcgttgatgcctacaacgaagtgatcgcccgggtgcgaatgtgggtgaacctgaacctgtggcagaagctgaagctaagcagagatgatgccaagcctctgctgagactgaagggattcccttcctttcctctggtcgagagacaggccaacgaagtggactggtgggacatggtgtgtaacgtgaagaagctgatcaacgagaaaaaggaggatggcaaggtgttttggcagaatctggctggctacaagagacaggaagccctgagaccatacctgagcagcgaggaagatcggaagaagggaaagaaattcgctcggtaccagctgggcgacctgctgctgcacctggaaaagaagcacggcgaggactggggaaaggtgtacgacgaggcctgggagcggattgacaagaaagtggaaggcctgagcaagcacatcaagctggaagaggaacggagaagcgaggacgcccagagcaaggccgccctgaccgactggctgcgggctaaggccagcttcgtgatcgagggcctgaaggaggccgacaaggacgagttctgcagatgcgagctgaagctgcagaagtggtacggggacctgcggggaaagcccttcgccatcgaagccgagaacagcatcctggacatcagcggcttcagcaagcagtacaactgtgccttcatctggcagaaggacggcgtgaagaagctgaacctgtacctgatcatcaactacttcaagggcggcaagctgcggttcaagaagatcaaacctgaagccttcgaagccaacagattctacaccgtgatcaacaaaaagagcggcgagatcgtgcccatggaggtgaacttcaacttcgacgaccccaacctgatcatcctgcctctggcctttggcaagagacagggcagagaattcatctggaacgacctgctgtccctggaaaccggcagcctgaagctggccaacggaagagtgatcgagaagacactgtacaacagaagaacccggcaggatgagcctgccctgttcgtggccctgaccttcgagcggcgggaggtcctggactcctccaatatcaaaccaatgaacctgatcggcgtggcaagaggcgaaaacatccccgccgtgatcgccctgaccgaccccgagggctgcccactgagccggtttaaggatagcctgggaaacccaacccacatcctgagaatcggcgagagctataaggagaagcagcggaccatccaggccaagaaggaggtggagcagcggagagccggcggctacagccggaagtacgccagcaaagccaagaatctggcagacgatatggtgagaaacaccgctagagatctgctgtactacgccgtgacccaggatgccatgctgatcttcgccaacctgagccggggcttcggccggcagggcaagcggaccttcatggccgagagacagtacacacggatggaggactggctgaccgccaagctggcctacgagggcctgagcaagacctacctgtccaagacactggcccagtacacctccaagacatgcagcaactgtgggtttaccatcaccagcgccgactacgacagggtgctggagaagctgaagaagacagcaacaggctggatgaccacaattaacggcaaggagctgaaggtggagggccagattacctactacaacagatacaagagacagaacgtagtcaaggacctgtccgtcgagctggatagactgagcgaagaatctgtgaacaacgacatctcctcctggacaaagggcagaagcggagaagctctgagcctcctgaagaaaagattctcccatagacccgtgcaggagaagttcgtgtgcctgaactgcggcttcgagacacacgcagccgagcaagccgccctgaacatcgccagatcctggctgttcctgcggagccaggagtacaagaaataccagacaaacaagacaaccggcaacaccgataagagagccttcgtcgagacctggcagtccttttaccggaagaagcttaaggaggtgtggaaacctgccgtgcggtctggcggatctggcggaggctccaccagccccaagaaaaagagaaaagtctaagctgccttctgcggggcttgccttctggccatgcccttcttctctcccttgcacctgtacctcttggtctttgaataaagcctgagtaggaaggctagcaaaaaaaaaaaaaaaaaaaaaaaaaaaaaaaaaaaaaaaaaaaaaaaaaaaaaaaaaaaaaaaaaaaaaaaaaaaaaaaa

SEQ ID NO: 13125 - RNA, 5785 nt, synthetic construct
  source 1..5785: mol_type = other RNA
aggaaataagagagaaaagaagagtaagaagaaatataagagccaccatggcccctaagaagaagcgtaaagtgagccggatggaacgcctcgtctacgaggtgcggcagaagtgcagaaacatcgaggacatctgcatctcctgcggatctctgaacgtgaccctggagcacccactgttcatcggcggcatgtgccagaactgtaaaaactgttttctggagtgtgcctatcaatacgacgatgacggctaccagagctactgcaccatctgttgcggcggaagagaggtgctgatgtgtggaaataacaactgctgccggtgcttctgcgtggaatgcgtggacctgctggtgggccccggcgccgcccaggccgctattaaggaagatccttggaactgctacatgtgcggccacaagggcacatacggcctgctgagacggagagaggactggcctagcagactgcagatgttcttcgccaataaccacgaccaggagttcgacccccctaaggtgtaccctcccgtccccgccgagaagagaaagcccatccgggtcctgagcctgttcgatggcatcgccaccggtctgctggtgctgaaggacctgggcatccaggtggataggtacattgcctccgaggtgtgcgaggactccatcaccgtgggaatggtgcgtcatcagggcaagatcatgtacgtgggcgacgtgcggagcgtgacacagaagcatatccaggagtggggccctttcgacctggtgatcggcggcagcccttgcaatgacctgagcatcgtgaacccagcccggaagggcctgtacgagggaaccggcagactgttcttcgagttttacagactgctgcacgacgcccggcctaaggaaggcgacgaccggcccttcttttggctgttcgagaatgtggtggccatgggagtcagcgacaagcgggatattagccggttcctggagagcaaccccgtgatgatcgatgccaaggaagtgagcgccgcccaccgggccagatacttctggggcaatctgcctggcatgaacagacccctggccagcaccgtgaacgacaagctggagctgcaggagtgcctggagcacggccggatcgccaagttcagcaaggtgagaaccatcaccacccgaagcaacagcatcaaacaaggcaaggaccagcactttcctgtgttcatgaacgagaaggaggacatcctgtggtgtaccgagatggagagagtgttcgggttcccagtccactacacagatgtcagcaacatgtctagactggccagacagagactgctgggaagaagctggtccgtccctgtgatcagacacctgttcgcccctctgaaggagtacttcgcctgcgtgagcagcggcaacagcaacgccaacagccggggccccagcttctctagcggcctggtgccactgtccctgagagggagccacatgggccccatggagatctacaaaaccgtgagcgcctggaagcggcagcctgtgcgcgtgctgagcctgtttcggaatatcgataaagtcctgaaaagcctgggattcctggagagcggctctggctccggcggtggcaccctgaagtacgtggaggatgtgacaaacgtggtcagacgggatgtggagaagtggggccccttcgatctggtgtacggcagcacccaacccctgggcagctcttgtgaccggtgccctggctggtacatgtttcagttccaccggatcctgcagtacgccctgccgagacaggagtcccagcggccattcttttggattttcatggacaacttgctgctgaccgaggatgaccaggaaactaccactcggttcctgcagaccgaagccgtgaccctgcaggacgtgagaggccgggactaccagaacgccatgcgggtgtggtccaacatccctggactgaaaagcaagcacgcacctctgacccctaaagaagaggagtacctgcaggcccaggtgcggagcagaagcaagctggacgcccctaaggtggatctgctggtgaagaattgcctcctgcccctgagagagtacttcaagtatttcagccagaatagtctgcccctgggaggcagcggcggcggcgccagggccagcctgagcttcgaggacgtggccgtgggcttcagctgggaggagtggcagctgctggcccccagccagaaggacctgtacagggaggtgatgctggagaactacaggaacctggtgagcgtgggctaccaggccagcaagcccgacagcctgttccagctggagcagggcgagcccccctggaccgtggtgggcgccgcccagagccagacctgccaggaggagatctgggagggcggcccaagcagcggcgcccctcctcccagcggcggcagcccagccggctccccaacctctaccgaggagggcacctctgagtccgccacccccgagagcggccctggcacctccaccgagcccagcgagggcagcgcacccggcagccctgccggcagccccacctccacagaggagggaaccagcaccgagcccagcgaaggcagcgccccaggcaccagcaccgagcctagtgagcaggagattaaacggatcaacaagatcagaagaagacttgtgaaagacagcaacaccaagaaggccggcaagacaggccccatgaaaaccctgctggttagagtgatgacacccgatctgagagagcggctggaaaacctgagaaagaagcctgaaaatatcccccagcccatcagcaatacatctagagccaacctgaataagctgctgaccgattacaccgaaatgaagaaggcgatcctgcatgtgtactgggaagagttccagaaggaccctgtgggcctgatgagccgggtggcccagcctgccagcaagaagatcgatcagaacaagctgaaacctgagatggacgagaagggcaacctgaccaccgccggctttgcctgctctcagtgtggccagcccctgttcgtgtacaagctggagcaggtgtctgagaagggcaaggcttacaccaactacttcggacggtgcaatgtggccgagcacgaaaagctgatcctgctggcccagctgaagcccgagaaggatagcgacgaagccgtgacatatagcctgggaaagtttgggcagagggccctggatttctacagcattcatgtgaccaaggagtccacccaccccgtgaagcccctggcccagatcgccggaaacagatacgcctccggacctgtgggaaaggccctgagcgacgcatgtatgggcacaatcgcctccttcctgtctaagtaccaggacatcatcatcgaacaccagaaggtggtgaagggcaaccagaagagactggagagcctgcgggagctggccggcaaggaaaacctggaataccctagcgtgaccctgccacctcagcctcacaccaaggagggcgttgatgcctacaacgaagtgatcgcccgggtgcgaatgtgggtgaacctgaacctgtggcagaagctgaagctaagcagagatgatgccaagcctctgctgagactgaagggattcccttcctttcctctggtcgagagacaggccaacgaagtggactggtgggacatggtgtgtaacgtgaagaagctgatcaacgagaaaaaggaggatggcaaggtgttttggcagaatctggctggctacaagagacaggaagccctgagaccatacctgagcagcgaggaagatcggaagaagggaaagaaattcgctcggtaccagctgggcgacctgctgctgcacctggaaaagaagcacggcgaggactggggaaaggtgtacgacgaggcctgggagcggattgacaagaaagtggaaggcctgagcaagcacatcaagctggaagaggaacggagaagcgaggacgcccagagcaaggccgccctgaccgactggctgcgggctaaggccagcttcgtgatcgagggcctgaaggaggccgacaaggacgagttctgcagatgcgagctgaagctgcagaagtggtacggggacctgcggggaaagcccttcgccatcgaagccgagaacagcatcctggacatcagcggcttcagcaagcagtacaactgtgccttcatctggcagaaggacggcgtgaagaagctgaacctgtacctgatcatcaactacttcaagggcggcaagctgcggttcaagaagatcaaacctgaagccttcgaagccaacagattctacaccgtgatcaacaaaaagagcggcgagatcgtgcccatggaggtgaacttcaacttcgacgaccccaacctgatcatcctgcctctggcctttggcaagagacagggcagagaattcatctggaacgacctgctgtccctggaaaccggcagcctgaagctggccaacggaagagtgatcgagaagacactgtacaacagaagaacccggcaggatgagcctgccctgttcgtggccctgaccttcgagcggcgggaggtcctggactcctccaatatcaaaccaatgaacctgatcggcgtggcaagaggcgaaaacatccccgccgtgatcgccctgaccgaccccgagggctgcccactgagccggtttaaggatagcctgggaaacccaacccacatcctgagaatcggcgagagctataaggagaagcagcggaccatccaggccaagaaggaggtggagcagcggagagccggcggctacagccggaagtacgccagcaaagccaagaatctggcagacgatatggtgagaaacaccgctagagatctgctgtactacgccgtgacccaggatgccatgctgatcttcgccaacctgagccggggcttcggccggcagggcaagcggaccttcatggccgagagacagtacacacggatggaggactggctgaccgccaagctggcctacgagggcctgagcaagacctacctgtccaagacactggcccagtacacctccaagacatgcagcaactgtgggtttaccatcaccagcgccgactacgacagggtgctggagaagctgaagaagacagcaacaggctggatgaccacaattaacggcaaggagctgaaggtggagggccagattacctactacaacagatacaagagacagaacgtagtcaaggacctgtccgtcgagctggatagactgagcgaagaatctgtgaacaacgacatctcctcctggacaaagggcagaagcggagaagctctgagcctcctgaagaaaagattctcccatagacccgtgcaggagaagttcgtgtgcctgaactgcggcttcgagacacacgcagccgagcaagccgccctgaacatcgccagatcctggctgttcctgcggagccaggagtacaagaaataccagacaaacaagacaaccggcaacaccgataagagagccttcgtcgagacctggcagtccttttaccggaagaagcttaaggaggtgtggaaacctgccgtgcggtctggcggatctggcggaggctccaccagccccaagaaaaagagaaaagtctaagctgccttctgcggggcttgccttctggccatgcccttcttctctcccttgcacctgtacctcttggtctttgaataaagcctgagtaggaaggctagcaaaaaaaaaaaaaaaaaaaaaaaaaaaaaaaaaaaaaaaaaaaaaaaaaaaaaaaaaaaaaaaaaaaaaaaaaaaaaaaa

SEQ ID NO: 13126 - RNA, 5785 nt, synthetic construct
  source 1..5785: mol_type = other RNA
aggaaataagagagaaaagaagagtaagaagaaatataagagccaccatggcccctaagaagaagcgtaaagtgagccggatggaacgcctcgtctacgaggtgcggcagaagtgcagaaacatcgaggacatctgcatctcctgcggatctctgaacgtgaccctggagcacccactgttcatcggcggcatgtgccagaactgtaaaaactgttttctggagtgtgcctatcaatacgacgatgacggctaccagagctactgcaccatctgttgcggcggaagagaggtgctgatgtgtggaaataacaactgctgccggtgcttctgcgtggaatgcgtggacctgctggtgggccccggcgccgcccaggccgctattaaggaagatccttggaactgctacatgtgcggccacaagggcacatacggcctgctgagacggagagaggactggcctagcagactgcagatgttcttcgccaataaccacgaccaggagttcgacccccctaaggtgtaccctcccgtccccgccgagaagagaaagcccatccgggtcctgagcctgttcgatggcatcgccaccggtctgctggtgctgaaggacctgggcatccaggtggataggtacattgcctccgaggtgtgcgaggactccatcaccgtgggaatggtgcgtcatcagggcaagatcatgtacgtgggcgacgtgcggagcgtgacacagaagcatatccaggagtggggccctttcgacctggtgatcggcggcagcccttgcaatgacctgagcatcgtgaacccagcccggaagggcctgtacgagggaaccggcagactgttcttcgagttttacagactgctgcacgacgcccggcctaaggaaggcgacgaccggcccttcttttggctgttcgagaatgtggtggccatgggagtcagcgacaagcgggatattagccggttcctggagagcaaccccgtgatgatcgatgccaaggaagtgagcgccgcccaccgggccagatacttctggggcaatctgcctggcatgaacagacccctggccagcaccgtgaacgacaagctggagctgcaggagtgcctggagcacggccggatcgccaagttcagcaaggtgagaaccatcaccacccgaagcaacagcatcaaacaaggcaaggaccagcactttcctgtgttcatgaacgagaaggaggacatcctgtggtgtaccgagatggagagagtgttcgggttcccagtccactacacagatgtcagcaacatgtctagactggccagacagagactgctgggaagaagctggtccgtccctgtgatcagacacctgttcgcccctctgaaggagtacttcgcctgcgtgagcagcggcaacagcaacgccaacagccggggccccagcttctctagcggcctggtgccactgtccctgagagggagccacatgggccccatggagatctacaaaaccgtgagcgcctggaagcggcagcctgtgcgcgtgctgagcctgtttcggaatatcgataaagtcctgaaaagcctgggattcctggagagcggctctggctccggcggtggcaccctgaagtacgtggaggatgtgacaaacgtggtcagacgggatgtggagaagtggggccccttcgatctggtgtacggcagcacccaacccctgggcagctcttgtgaccggtgccctggctggtacatgtttcagttccaccggatcctgcagtacgccctgccgagacaggagtcccagcggccattcttttggattttcatggacaacttgctgctgaccgaggatgaccaggaaactaccactcggttcctgcagaccgaagccgtgaccctgcaggacgtgagaggccgggactaccagaacgccatgcgggtgtggtccaacatccctggactgaaaagcaagcacgcacctctgacccctaaagaagaggagtacctgcaggcccaggtgcggagcagaagcaagctggacgcccctaaggtggatctgctggtgaagaattgcctcctgcccctgagagagtacttcaagtatttcagccagaatagtctgcccctgggaggcagcggcggcggcagccagggcctggtgaccttcgaggacgtggccgtgtacttcagcctggaggagtgggagaggctgaacgtggagcagagggccctgtaccaggaggtgatgcagggcaactacggcatcctggtgagcctgggctaccccatccccaagcccgacctgatcttcaggctggagcagggcgaggagccctgggtgcccgacagcccccaccccgaggagggcgacatcgtgaccggcgtgtacggcggcccaagcagcggcgcccctcctcccagcggcggcagcccagccggctccccaacctctaccgaggagggcacctctgagtccgccacccccgagagcggccctggcacctccaccgagcccagcgagggcagcgcacccggcagccctgccggcagccccacctccacagaggagggaaccagcaccgagcccagcgaaggcagcgccccaggcaccagcaccgagcctagtgagcaggagattaaacggatcaacaagatcagaagaagacttgtgaaagacagcaacaccaagaaggccggcaagacaggccccatgaaaaccctgctggttagagtgatgacacccgatctgagagagcggctggaaaacctgagaaagaagcctgaaaatatcccccagcccatcagcaatacatctagagccaacctgaataagctgctgaccgattacaccgaaatgaagaaggcgatcctgcatgtgtactgggaagagttccagaaggaccctgtgggcctgatgagccgggtggcccagcctgccagcaagaagatcgatcagaacaagctgaaacctgagatggacgagaagggcaacctgaccaccgccggctttgcctgctctcagtgtggccagcccctgttcgtgtacaagctggagcaggtgtctgagaagggcaaggcttacaccaactacttcggacggtgcaatgtggccgagcacgaaaagctgatcctgctggcccagctgaagcccgagaaggatagcgacgaagccgtgacatatagcctgggaaagtttgggcagagggccctggatttctacagcattcatgtgaccaaggagtccacccaccccgtgaagcccctggcccagatcgccggaaacagatacgcctccggacctgtgggaaaggccctgagcgacgcatgtatgggcacaatcgcctccttcctgtctaagtaccaggacatcatcatcgaacaccagaaggtggtgaagggcaaccagaagagactggagagcctgcgggagctggccggcaaggaaaacctggaataccctagcgtgaccctgccacctcagcctcacaccaaggagggcgttgatgcctacaacgaagtgatcgcccgggtgcgaatgtgggtgaacctgaacctgtggcagaagctgaagctaagcagagatgatgccaagcctctgctgagactgaagggattcccttcctttcctctggtcgagagacaggccaacgaagtggactggtgggacatggtgtgtaacgtgaagaagctgatcaacgagaaaaaggaggatggcaaggtgttttggcagaatctggctggctacaagagacaggaagccctgagaccatacctgagcagcgaggaagatcggaagaagggaaagaaattcgctcggtaccagctgggcgacctgctgctgcacctggaaaagaagcacggcgaggactggggaaaggtgtacgacgaggcctgggagcggattgacaagaaagtggaaggcctgagcaagcacatcaagctggaagaggaacggagaagcgaggacgcccagagcaaggccgccctgaccgactggctgcgggctaaggccagcttcgtgatcgagggcctgaaggaggccgacaaggacgagttctgcagatgcgagctgaagctgcagaagtggtacggggacctgcggggaaagcccttcgccatcgaagccgagaacagcatcctggacatcagcggcttcagcaagcagtacaactgtgccttcatctggcagaaggacggcgtgaagaagctgaacctgtacctgatcatcaactacttcaagggcggcaagctgcggttcaagaagatcaaacctgaagccttcgaagccaacagattctacaccgtgatcaacaaaaagagcggcgagatcgtgcccatggaggtgaacttcaacttcgacgaccccaacctgatcatcctgcctctggcctttggcaagagacagggcagagaattcatctggaacgacctgctgtccctggaaaccggcagcctgaagctggccaacggaagagtgatcgagaagacactgtacaacagaagaacccggcaggatgagcctgccctgttcgtggccctgaccttcgagcggcgggaggtcctggactcctccaatatcaaaccaatgaacctgatcggcgtggcaagaggcgaaaacatccccgccgtgatcgccctgaccgaccccgagggctgcccactgagccggtttaaggatagcctgggaaacccaacccacatcctgagaatcggcgagagctataaggagaagcagcggaccatccaggccaagaaggaggtggagcagcggagagccggcggctacagccggaagtacgccagcaaagccaagaatctggcagacgatatggtgagaaacaccgctagagatctgctgtactacgccgtgacccaggatgccatgctgatcttcgccaacctgagccggggcttcggccggcagggcaagcggaccttcatggccgagagacagtacacacggatggaggactggctgaccgccaagctggcctacgagggcctgagcaagacctacctgtccaagacactggcccagtacacctccaagacatgcagcaactgtgggtttaccatcaccagcgccgactacgacagggtgctggagaagctgaagaagacagcaacaggctggatgaccacaattaacggcaaggagctgaaggtggagggccagattacctactacaacagatacaagagacagaacgtagtcaaggacctgtccgtcgagctggatagactgagcgaagaatctgtgaacaacgacatctcctcctggacaaagggcagaagcggagaagctctgagcctcctgaagaaaagattctcccatagacccgtgcaggagaagttcgtgtgcctgaactgcggcttcgagacacacgcagccgagcaagccgccctgaacatcgccagatcctggctgttcctgcggagccaggagtacaagaaataccagacaaacaagacaaccggcaacaccgataagagagccttcgtcgagacctggcagtccttttaccggaagaagcttaaggaggtgtggaaacctgccgtgcggtctggcggatctggcggaggctccaccagccccaagaaaaagagaaaagtctaagctgccttctgcggggcttgccttctggccatgcccttcttctctcccttgcacctgtacctcttggtctttgaataaagcctgagtaggaaggctagcaaaaaaaaaaaaaaaaaaaaaaaaaaaaaaaaaaaaaaaaaaaaaaaaaaaaaaaaaaaaaaaaaaaaaaaaaaaaaaaa

SEQ ID NO: 13127 - RNA, 5785 nt, synthetic construct
  source 1..5785: mol_type = other RNA
aggaaataagagagaaaagaagagtaagaagaaatataagagccaccatggcccctaagaagaagcgtaaagtgagccggatggaacgcctcgtctacgaggtgcggcagaagtgcagaaacatcgaggacatctgcatctcctgcggatctctgaacgtgaccctggagcacccactgttcatcggcggcatgtgccagaactgtaaaaactgttttctggagtgtgcctatcaatacgacgatgacggctaccagagctactgcaccatctgttgcggcggaagagaggtgctgatgtgtggaaataacaactgctgccggtgcttctgcgtggaatgcgtggacctgctggtgggccccggcgccgcccaggccgctattaaggaagatccttggaactgctacatgtgcggccacaagggcacatacggcctgctgagacggagagaggactggcctagcagactgcagatgttcttcgccaataaccacgaccaggagttcgacccccctaaggtgtaccctcccgtccccgccgagaagagaaagcccatccgggtcctgagcctgttcgatggcatcgccaccggtctgctggtgctgaaggacctgggcatccaggtggataggtacattgcctccgaggtgtgcgaggactccatcaccgtgggaatggtgcgtcatcagggcaagatcatgtacgtgggcgacgtgcggagcgtgacacagaagcatatccaggagtggggccctttcgacctggtgatcggcggcagcccttgcaatgacctgagcatcgtgaacccagcccggaagggcctgtacgagggaaccggcagactgttcttcgagttttacagactgctgcacgacgcccggcctaaggaaggcgacgaccggcccttcttttggctgttcgagaatgtggtggccatgggagtcagcgacaagcgggatattagccggttcctggagagcaaccccgtgatgatcgatgccaaggaagtgagcgccgcccaccgggccagatacttctggggcaatctgcctggcatgaacagacccctggccagcaccgtgaacgacaagctggagctgcaggagtgcctggagcacggccggatcgccaagttcagcaaggtgagaaccatcaccacccgaagcaacagcatcaaacaaggcaaggaccagcactttcctgtgttcatgaacgagaaggaggacatcctgtggtgtaccgagatggagagagtgttcgggttcccagtccactacacagatgtcagcaacatgtctagactggccagacagagactgctgggaagaagctggtccgtccctgtgatcagacacctgttcgcccctctgaaggagtacttcgcctgcgtgagcagcggcaacagcaacgccaacagccggggccccagcttctctagcggcctggtgccactgtccctgagagggagccacatgggccccatggagatctacaaaaccgtgagcgcctggaagcggcagcctgtgcgcgtgctgagcctgtttcggaatatcgataaagtcctgaaaagcctgggattcctggagagcggctctggctccggcggtggcaccctgaagtacgtggaggatgtgacaaacgtggtcagacgggatgtggagaagtggggccccttcgatctggtgtacggcagcacccaacccctgggcagctcttgtgaccggtgccctggctggtacatgtttcagttccaccggatcctgcagtacgccctgccgagacaggagtcccagcggccattcttttggattttcatggacaacttgctgctgaccgaggatgaccaggaaactaccactcggttcctgcagaccgaagccgtgaccctgcaggacgtgagaggccgggactaccagaacgccatgcgggtgtggtccaacatccctggactgaaaagcaagcacgcacctctgacccctaaagaagaggagtacctgcaggcccaggtgcggagcagaagcaagctggacgcccctaaggtggatctgctggtgaagaattgcctcctgcccctgagagagtacttcaagtatttcagccagaatagtctgcccctgggaggcagcggcggcggcccccagaagagcgtgaccttcgaggacgtggccgtgtacttcacccagaccgagtgggacggcctgagccccgcccagagggccctgtacagggacgtgatgctggagaactacggcaacgtggccagcctgggcttcagcctgctgaagcccgccgtgatcagccagctggagggcgccgacgagctggagggccccagccccctggtggccggcaccgagatcggcccccagggcctgtggggcggcccaagcagcggcgcccctcctcccagcggcggcagcccagccggctccccaacctctaccgaggagggcacctctgagtccgccacccccgagagcggccctggcacctccaccgagcccagcgagggcagcgcacccggcagccctgccggcagccccacctccacagaggagggaaccagcaccgagcccagcgaaggcagcgccccaggcaccagcaccgagcctagtgagcaggagattaaacggatcaacaagatcagaagaagacttgtgaaagacagcaacaccaagaaggccggcaagacaggccccatgaaaaccctgctggttagagtgatgacacccgatctgagagagcggctggaaaacctgagaaagaagcctgaaaatatcccccagcccatcagcaatacatctagagccaacctgaataagctgctgaccgattacaccgaaatgaagaaggcgatcctgcatgtgtactgggaagagttccagaaggaccctgtgggcctgatgagccgggtggcccagcctgccagcaagaagatcgatcagaacaagctgaaacctgagatggacgagaagggcaacctgaccaccgccggctttgcctgctctcagtgtggccagcccctgttcgtgtacaagctggagcaggtgtctgagaagggcaaggcttacaccaactacttcggacggtgcaatgtggccgagcacgaaaagctgatcctgctggcccagctgaagcccgagaaggatagcgacgaagccgtgacatatagcctgggaaagtttgggcagagggccctggatttctacagcattcatgtgaccaaggagtccacccaccccgtgaagcccctggcccagatcgccggaaacagatacgcctccggacctgtgggaaaggccctgagcgacgcatgtatgggcacaatcgcctccttcctgtctaagtaccaggacatcatcatcgaacaccagaaggtggtgaagggcaaccagaagagactggagagcctgcgggagctggccggcaaggaaaacctggaataccctagcgtgaccctgccacctcagcctcacaccaaggagggcgttgatgcctacaacgaagtgatcgcccgggtgcgaatgtgggtgaacctgaacctgtggcagaagctgaagctaagcagagatgatgccaagcctctgctgagactgaagggattcccttcctttcctctggtcgagagacaggccaacgaagtggactggtgggacatggtgtgtaacgtgaagaagctgatcaacgagaaaaaggaggatggcaaggtgttttggcagaatctggctggctacaagagacaggaagccctgagaccatacctgagcagcgaggaagatcggaagaagggaaagaaattcgctcggtaccagctgggcgacctgctgctgcacctggaaaagaagcacggcgaggactggggaaaggtgtacgacgaggcctgggagcggattgacaagaaagtggaaggcctgagcaagcacatcaagctggaagaggaacggagaagcgaggacgcccagagcaaggccgccctgaccgactggctgcgggctaaggccagcttcgtgatcgagggcctgaaggaggccgacaaggacgagttctgcagatgcgagctgaagctgcagaagtggtacggggacctgcggggaaagcccttcgccatcgaagccgagaacagcatcctggacatcagcggcttcagcaagcagtacaactgtgccttcatctggcagaaggacggcgtgaagaagctgaacctgtacctgatcatcaactacttcaagggcggcaagctgcggttcaagaagatcaaacctgaagccttcgaagccaacagattctacaccgtgatcaacaaaaagagcggcgagatcgtgcccatggaggtgaacttcaacttcgacgaccccaacctgatcatcctgcctctggcctttggcaagagacagggcagagaattcatctggaacgacctgctgtccctggaaaccggcagcctgaagctggccaacggaagagtgatcgagaagacactgtacaacagaagaacccggcaggatgagcctgccctgttcgtggccctgaccttcgagcggcgggaggtcctggactcctccaatatcaaaccaatgaacctgatcggcgtggcaagaggcgaaaacatccccgccgtgatcgccctgaccgaccccgagggctgcccactgagccggtttaaggatagcctgggaaacccaacccacatcctgagaatcggcgagagctataaggagaagcagcggaccatccaggccaagaaggaggtggagcagcggagagccggcggctacagccggaagtacgccagcaaagccaagaatctggcagacgatatggtgagaaacaccgctagagatctgctgtactacgccgtgacccaggatgccatgctgatcttcgccaacctgagccggggcttcggccggcagggcaagcggaccttcatggccgagagacagtacacacggatggaggactggctgaccgccaagctggcctacgagggcctgagcaagacctacctgtccaagacactggcccagtacacctccaagacatgcagcaactgtgggtttaccatcaccagcgccgactacgacagggtgctggagaagctgaagaagacagcaacaggctggatgaccacaattaacggcaaggagctgaaggtggagggccagattacctactacaacagatacaagagacagaacgtagtcaaggacctgtccgtcgagctggatagactgagcgaagaatctgtgaacaacgacatctcctcctggacaaagggcagaagcggagaagctctgagcctcctgaagaaaagattctcccatagacccgtgcaggagaagttcgtgtgcctgaactgcggcttcgagacacacgcagccgagcaagccgccctgaacatcgccagatcctggctgttcctgcggagccaggagtacaagaaataccagacaaacaagacaaccggcaacaccgataagagagccttcgtcgagacctggcagtccttttaccggaagaagcttaaggaggtgtggaaacctgccgtgcggtctggcggatctggcggaggctccaccagccccaagaaaaagagaaaagtctaagctgccttctgcggggcttgccttctggccatgcccttcttctctcccttgcacctgtacctcttggtctttgaataaagcctgagtaggaaggctagcaaaaaaaaaaaaaaaaaaaaaaaaaaaaaaaaaaaaaaaaaaaaaaaaaaaaaaaaaaaaaaaaaaaaaaaaaaaaaaaa

SEQ ID NO: 13128 - RNA, 5785 nt, synthetic construct
  source 1..5785: mol_type = other RNA
aggaaataagagagaaaagaagagtaagaagaaatataagagccaccatggcccctaagaagaagcgtaaagtgagccggatggaacgcctcgtctacgaggtgcggcagaagtgcagaaacatcgaggacatctgcatctcctgcggatctctgaacgtgaccctggagcacccactgttcatcggcggcatgtgccagaactgtaaaaactgttttctggagtgtgcctatcaatacgacgatgacggctaccagagctactgcaccatctgttgcggcggaagagaggtgctgatgtgtggaaataacaactgctgccggtgcttctgcgtggaatgcgtggacctgctggtgggccccggcgccgcccaggccgctattaaggaagatccttggaactgctacatgtgcggccacaagggcacatacggcctgctgagacggagagaggactggcctagcagactgcagatgttcttcgccaataaccacgaccaggagttcgacccccctaaggtgtaccctcccgtccccgccgagaagagaaagcccatccgggtcctgagcctgttcgatggcatcgccaccggtctgctggtgctgaaggacctgggcatccaggtggataggtacattgcctccgaggtgtgcgaggactccatcaccgtgggaatggtgcgtcatcagggcaagatcatgtacgtgggcgacgtgcggagcgtgacacagaagcatatccaggagtggggccctttcgacctggtgatcggcggcagcccttgcaatgacctgagcatcgtgaacccagcccggaagggcctgtacgagggaaccggcagactgttcttcgagttttacagactgctgcacgacgcccggcctaaggaaggcgacgaccggcccttcttttggctgttcgagaatgtggtggccatgggagtcagcgacaagcgggatattagccggttcctggagagcaaccccgtgatgatcgatgccaaggaagtgagcgccgcccaccgggccagatacttctggggcaatctgcctggcatgaacagacccctggccagcaccgtgaacgacaagctggagctgcaggagtgcctggagcacggccggatcgccaagttcagcaaggtgagaaccatcaccacccgaagcaacagcatcaaacaaggcaaggaccagcactttcctgtgttcatgaacgagaaggaggacatcctgtggtgtaccgagatggagagagtgttcgggttcccagtccactacacagatgtcagcaacatgtctagactggccagacagagactgctgggaagaagctggtccgtccctgtgatcagacacctgttcgcccctctgaaggagtacttcgcctgcgtgagcagcggcaacagcaacgccaacagccggggccccagcttctctagcggcctggtgccactgtccctgagagggagccacatgggccccatggagatctacaaaaccgtgagcgcctggaagcggcagcctgtgcgcgtgctgagcctgtttcggaatatcgataaagtcctgaaaagcctgggattcctggagagcggctctggctccggcggtggcaccctgaagtacgtggaggatgtgacaaacgtggtcagacgggatgtggagaagtggggccccttcgatctggtgtacggcagcacccaacccctgggcagctcttgtgaccggtgccctggctggtacatgtttcagttccaccggatcctgcagtacgccctgccgagacaggagtcccagcggccattcttttggattttcatggacaacttgctgctgaccgaggatgaccaggaaactaccactcggttcctgcagaccgaagccgtgaccctgcaggacgtgagaggccgggactaccagaacgccatgcgggtgtggtccaacatccctggactgaaaagcaagcacgcacctctgacccctaaagaagaggagtacctgcaggcccaggtgcggagcagaagcaagctggacgcccctaaggtggatctgctggtgaagaattgcctcctgcccctgagagagtacttcaagtatttcagccagaatagtctgcccctgggaggcagcggcggcggcaggcccagggccgtgaagttcgccgacgtggccgtgtacttcagccccgaggagtggggctgcctgaggcccgcccagagggccctgtacagggacgtgatgagggagacctacggccacctgggcgccctgggctgcgccggccccaagcccgccctgatcagctggctggagaggaacaccgacgactgggagcccgccgccctggacccccaggagtgccccaggggcctgaccgtgcagggcggcccaagcagcggcgcccctcctcccagcggcggcagcccagccggctccccaacctctaccgaggagggcacctctgagtccgccacccccgagagcggccctggcacctccaccgagcccagcgagggcagcgcacccggcagccctgccggcagccccacctccacagaggagggaaccagcaccgagcccagcgaaggcagcgccccaggcaccagcaccgagcctagtgagcaggagattaaacggatcaacaagatcagaagaagacttgtgaaagacagcaacaccaagaaggccggcaagacaggccccatgaaaaccctgctggttagagtgatgacacccgatctgagagagcggctggaaaacctgagaaagaagcctgaaaatatcccccagcccatcagcaatacatctagagccaacctgaataagctgctgaccgattacaccgaaatgaagaaggcgatcctgcatgtgtactgggaagagttccagaaggaccctgtgggcctgatgagccgggtggcccagcctgccagcaagaagatcgatcagaacaagctgaaacctgagatggacgagaagggcaacctgaccaccgccggctttgcctgctctcagtgtggccagcccctgttcgtgtacaagctggagcaggtgtctgagaagggcaaggcttacaccaactacttcggacggtgcaatgtggccgagcacgaaaagctgatcctgctggcccagctgaagcccgagaaggatagcgacgaagccgtgacatatagcctgggaaagtttgggcagagggccctggatttctacagcattcatgtgaccaaggagtccacccaccccgtgaagcccctggcccagatcgccggaaacagatacgcctccggacctgtgggaaaggccctgagcgacgcatgtatgggcacaatcgcctccttcctgtctaagtaccaggacatcatcatcgaacaccagaaggtggtgaagggcaaccagaagagactggagagcctgcgggagctggccggcaaggaaaacctggaataccctagcgtgaccctgccacctcagcctcacaccaaggagggcgttgatgcctacaacgaagtgatcgcccgggtgcgaatgtgggtgaacctgaacctgtggcagaagctgaagctaagcagagatgatgccaagcctctgctgagactgaagggattcccttcctttcctctggtcgagagacaggccaacgaagtggactggtgggacatggtgtgtaacgtgaagaagctgatcaacgagaaaaaggaggatggcaaggtgttttggcagaatctggctggctacaagagacaggaagccctgagaccatacctgagcagcgaggaagatcggaagaagggaaagaaattcgctcggtaccagctgggcgacctgctgctgcacctggaaaagaagcacggcgaggactggggaaaggtgtacgacgaggcctgggagcggattgacaagaaagtggaaggcctgagcaagcacatcaagctggaagaggaacggagaagcgaggacgcccagagcaaggccgccctgaccgactggctgcgggctaaggccagcttcgtgatcgagggcctgaaggaggccgacaaggacgagttctgcagatgcgagctgaagctgcagaagtggtacggggacctgcggggaaagcccttcgccatcgaagccgagaacagcatcctggacatcagcggcttcagcaagcagtacaactgtgccttcatctggcagaaggacggcgtgaagaagctgaacctgtacctgatcatcaactacttcaagggcggcaagctgcggttcaagaagatcaaacctgaagccttcgaagccaacagattctacaccgtgatcaacaaaaagagcggcgagatcgtgcccatggaggtgaacttcaacttcgacgaccccaacctgatcatcctgcctctggcctttggcaagagacagggcagagaattcatctggaacgacctgctgtccctggaaaccggcagcctgaagctggccaacggaagagtgatcgagaagacactgtacaacagaagaacccggcaggatgagcctgccctgttcgtggccctgaccttcgagcggcgggaggtcctggactcctccaatatcaaaccaatgaacctgatcggcgtggcaagaggcgaaaacatccccgccgtgatcgccctgaccgaccccgagggctgcccactgagccggtttaaggatagcctgggaaacccaacccacatcctgagaatcggcgagagctataaggagaagcagcggaccatccaggccaagaaggaggtggagcagcggagagccggcggctacagccggaagtacgccagcaaagccaagaatctggcagacgatatggtgagaaacaccgctagagatctgctgtactacgccgtgacccaggatgccatgctgatcttcgccaacctgagccggggcttcggccggcagggcaagcggaccttcatggccgagagacagtacacacggatggaggactggctgaccgccaagctggcctacgagggcctgagcaagacctacctgtccaagacactggcccagtacacctccaagacatgcagcaactgtgggtttaccatcaccagcgccgactacgacagggtgctggagaagctgaagaagacagcaacaggctggatgaccacaattaacggcaaggagctgaaggtggagggccagattacctactacaacagatacaagagacagaacgtagtcaaggacctgtccgtcgagctggatagactgagcgaagaatctgtgaacaacgacatctcctcctggacaaagggcagaagcggagaagctctgagcctcctgaagaaaagattctcccatagacccgtgcaggagaagttcgtgtgcctgaactgcggcttcgagacacacgcagccgagcaagccgccctgaacatcgccagatcctggctgttcctgcggagccaggagtacaagaaataccagacaaacaagacaaccggcaacaccgataagagagccttcgtcgagacctggcagtccttttaccggaagaagcttaaggaggtgtggaaacctgccgtgcggtctggcggatctggcggaggctccaccagccccaagaaaaagagaaaagtctaagctgccttctgcggggcttgccttctggccatgcccttcttctctcccttgcacctgtacctcttggtctttgaataaagcctgagtaggaaggctagcaaaaaaaaaaaaaaaaaaaaaaaaaaaaaaaaaaaaaaaaaaaaaaaaaaaaaaaaaaaaaaaaaaaaaaaaaaaaaaaa

SEQ ID NO: 13129 - RNA, 5785 nt, synthetic construct
  source 1..5785: mol_type = other RNA
aggaaataagagagaaaagaagagtaagaagaaatataagagccaccatggcccctaagaagaagcgtaaagtgagccggatggaacgcctcgtctacgaggtgcggcagaagtgcagaaacatcgaggacatctgcatctcctgcggatctctgaacgtgaccctggagcacccactgttcatcggcggcatgtgccagaactgtaaaaactgttttctggagtgtgcctatcaatacgacgatgacggctaccagagctactgcaccatctgttgcggcggaagagaggtgctgatgtgtggaaataacaactgctgccggtgcttctgcgtggaatgcgtggacctgctggtgggccccggcgccgcccaggccgctattaaggaagatccttggaactgctacatgtgcggccacaagggcacatacggcctgctgagacggagagaggactggcctagcagactgcagatgttcttcgccaataaccacgaccaggagttcgacccccctaaggtgtaccctcccgtccccgccgagaagagaaagcccatccgggtcctgagcctgttcgatggcatcgccaccggtctgctggtgctgaaggacctgggcatccaggtggataggtacattgcctccgaggtgtgcgaggactccatcaccgtgggaatggtgcgtcatcagggcaagatcatgtacgtgggcgacgtgcggagcgtgacacagaagcatatccaggagtggggccctttcgacctggtgatcggcggcagcccttgcaatgacctgagcatcgtgaacccagcccggaagggcctgtacgagggaaccggcagactgttcttcgagttttacagactgctgcacgacgcccggcctaaggaaggcgacgaccggcccttcttttggctgttcgagaatgtggtggccatgggagtcagcgacaagcgggatattagccggttcctggagagcaaccccgtgatgatcgatgccaaggaagtgagcgccgcccaccgggccagatacttctggggcaatctgcctggcatgaacagacccctggccagcaccgtgaacgacaagctggagctgcaggagtgcctggagcacggccggatcgccaagttcagcaaggtgagaaccatcaccacccgaagcaacagcatcaaacaaggcaaggaccagcactttcctgtgttcatgaacgagaaggaggacatcctgtggtgtaccgagatggagagagtgttcgggttcccagtccactacacagatgtcagcaacatgtctagactggccagacagagactgctgggaagaagctggtccgtccctgtgatcagacacctgttcgcccctctgaaggagtacttcgcctgcgtgagcagcggcaacagcaacgccaacagccggggccccagcttctctagcggcctggtgccactgtccctgagagggagccacatgggccccatggagatctacaaaaccgtgagcgcctggaagcggcagcctgtgcgcgtgctgagcctgtttcggaatatcgataaagtcctgaaaagcctgggattcctggagagcggctctggctccggcggtggcaccctgaagtacgtggaggatgtgacaaacgtggtcagacgggatgtggagaagtggggccccttcgatctggtgtacggcagcacccaacccctgggcagctcttgtgaccggtgccctggctggtacatgtttcagttccaccggatcctgcagtacgccctgccgagacaggagtcccagcggccattcttttggattttcatggacaacttgctgctgaccgaggatgaccaggaaactaccactcggttcctgcagaccgaagccgtgaccctgcaggacgtgagaggccgggactaccagaacgccatgcgggtgtggtccaacatccctggactgaaaagcaagcacgcacctctgacccctaaagaagaggagtacctgcaggcccaggtgcggagcagaagcaagctggacgcccctaaggtggatctgctggtgaagaattgcctcctgcccctgagagagtacttcaagtatttcagccagaatagtctgcccctgggaggcagcggcggcggccaccaggaggtggtgaccttcgaggacgtggccgtgtacttcacccagaccgagtgggccggcctgagccccgcccagagggccctgtacaggagcgtgatgctggagatctacggcaacctgaccagcctgggctaccccgtgcccaagcccgagctggtgagcctgctggagaggggcgacctgcccgtgggcctggagacccaggacaacccccccgcccagggcaccagggacatctacggcggcccaagcagcggcgcccctcctcccagcggcggcagcccagccggctccccaacctctaccgaggagggcacctctgagtccgccacccccgagagcggccctggcacctccaccgagcccagcgagggcagcgcacccggcagccctgccggcagccccacctccacagaggagggaaccagcaccgagcccagcgaaggcagcgccccaggcaccagcaccgagcctagtgagcaggagattaaacggatcaacaagatcagaagaagacttgtgaaagacagcaacaccaagaaggccggcaagacaggccccatgaaaaccctgctggttagagtgatgacacccgatctgagagagcggctggaaaacctgagaaagaagcctgaaaatatcccccagcccatcagcaatacatctagagccaacctgaataagctgctgaccgattacaccgaaatgaagaaggcgatcctgcatgtgtactgggaagagttccagaaggaccctgtgggcctgatgagccgggtggcccagcctgccagcaagaagatcgatcagaacaagctgaaacctgagatggacgagaagggcaacctgaccaccgccggctttgcctgctctcagtgtggccagcccctgttcgtgtacaagctggagcaggtgtctgagaagggcaaggcttacaccaactacttcggacggtgcaatgtggccgagcacgaaaagctgatcctgctggcccagctgaagcccgagaaggatagcgacgaagccgtgacatatagcctgggaaagtttgggcagagggccctggatttctacagcattcatgtgaccaaggagtccacccaccccgtgaagcccctggcccagatcgccggaaacagatacgcctccggacctgtgggaaaggccctgagcgacgcatgtatgggcacaatcgcctccttcctgtctaagtaccaggacatcatcatcgaacaccagaaggtggtgaagggcaaccagaagagactggagagcctgcgggagctggccggcaaggaaaacctggaataccctagcgtgaccctgccacctcagcctcacaccaaggagggcgttgatgcctacaacgaagtgatcgcccgggtgcgaatgtgggtgaacctgaacctgtggcagaagctgaagctaagcagagatgatgccaagcctctgctgagactgaagggattcccttcctttcctctggtcgagagacaggccaacgaagtggactggtgggacatggtgtgtaacgtgaagaagctgatcaacgagaaaaaggaggatggcaaggtgttttggcagaatctggctggctacaagagacaggaagccctgagaccatacctgagcagcgaggaagatcggaagaagggaaagaaattcgctcggtaccagctgggcgacctgctgctgcacctggaaaagaagcacggcgaggactggggaaaggtgtacgacgaggcctgggagcggattgacaagaaagtggaaggcctgagcaagcacatcaagctggaagaggaacggagaagcgaggacgcccagagcaaggccgccctgaccgactggctgcgggctaaggccagcttcgtgatcgagggcctgaaggaggccgacaaggacgagttctgcagatgcgagctgaagctgcagaagtggtacggggacctgcggggaaagcccttcgccatcgaagccgagaacagcatcctggacatcagcggcttcagcaagcagtacaactgtgccttcatctggcagaaggacggcgtgaagaagctgaacctgtacctgatcatcaactacttcaagggcggcaagctgcggttcaagaagatcaaacctgaagccttcgaagccaacagattctacaccgtgatcaacaaaaagagcggcgagatcgtgcccatggaggtgaacttcaacttcgacgaccccaacctgatcatcctgcctctggcctttggcaagagacagggcagagaattcatctggaacgacctgctgtccctggaaaccggcagcctgaagctggccaacggaagagtgatcgagaagacactgtacaacagaagaacccggcaggatgagcctgccctgttcgtggccctgaccttcgagcggcgggaggtcctggactcctccaatatcaaaccaatgaacctgatcggcgtggcaagaggcgaaaacatccccgccgtgatcgccctgaccgaccccgagggctgcccactgagccggtttaaggatagcctgggaaacccaacccacatcctgagaatcggcgagagctataaggagaagcagcggaccatccaggccaagaaggaggtggagcagcggagagccggcggctacagccggaagtacgccagcaaagccaagaatctggcagacgatatggtgagaaacaccgctagagatctgctgtactacgccgtgacccaggatgccatgctgatcttcgccaacctgagccggggcttcggccggcagggcaagcggaccttcatggccgagagacagtacacacggatggaggactggctgaccgccaagctggcctacgagggcctgagcaagacctacctgtccaagacactggcccagtacacctccaagacatgcagcaactgtgggtttaccatcaccagcgccgactacgacagggtgctggagaagctgaagaagacagcaacaggctggatgaccacaattaacggcaaggagctgaaggtggagggccagattacctactacaacagatacaagagacagaacgtagtcaaggacctgtccgtcgagctggatagactgagcgaagaatctgtgaacaacgacatctcctcctggacaaagggcagaagcggagaagctctgagcctcctgaagaaaagattctcccatagacccgtgcaggagaagttcgtgtgcctgaactgcggcttcgagacacacgcagccgagcaagccgccctgaacatcgccagatcctggctgttcctgcggagccaggagtacaagaaataccagacaaacaagacaaccggcaacaccgataagagagccttcgtcgagacctggcagtccttttaccggaagaagcttaaggaggtgtggaaacctgccgtgcggtctggcggatctggcggaggctccaccagccccaagaaaaagagaaaagtctaagctgccttctgcggggcttgccttctggccatgcccttcttctctcccttgcacctgtacctcttggtctttgaataaagcctgagtaggaaggctagcaaaaaaaaaaaaaaaaaaaaaaaaaaaaaaaaaaaaaaaaaaaaaaaaaaaaaaaaaaaaaaaaaaaaaaaaaaaaaaaa

SEQ ID NO: 13130 - RNA, 5785 nt, synthetic construct
  source 1..5785: mol_type = other RNA
aggaaataagagagaaaagaagagtaagaagaaatataagagccaccatggcccctaagaagaagcgtaaagtgagccggatggaacgcctcgtctacgaggtgcggcagaagtgcagaaacatcgaggacatctgcatctcctgcggatctctgaacgtgaccctggagcacccactgttcatcggcggcatgtgccagaactgtaaaaactgttttctggagtgtgcctatcaatacgacgatgacggctaccagagctactgcaccatctgttgcggcggaagagaggtgctgatgtgtggaaataacaactgctgccggtgcttctgcgtggaatgcgtggacctgctggtgggccccggcgccgcccaggccgctattaaggaagatccttggaactgctacatgtgcggccacaagggcacatacggcctgctgagacggagagaggactggcctagcagactgcagatgttcttcgccaataaccacgaccaggagttcgacccccctaaggtgtaccctcccgtccccgccgagaagagaaagcccatccgggtcctgagcctgttcgatggcatcgccaccggtctgctggtgctgaaggacctgggcatccaggtggataggtacattgcctccgaggtgtgcgaggactccatcaccgtgggaatggtgcgtcatcagggcaagatcatgtacgtgggcgacgtgcggagcgtgacacagaagcatatccaggagtggggccctttcgacctggtgatcggcggcagcccttgcaatgacctgagcatcgtgaacccagcccggaagggcctgtacgagggaaccggcagactgttcttcgagttttacagactgctgcacgacgcccggcctaaggaaggcgacgaccggcccttcttttggctgttcgagaatgtggtggccatgggagtcagcgacaagcgggatattagccggttcctggagagcaaccccgtgatgatcgatgccaaggaagtgagcgccgcccaccgggccagatacttctggggcaatctgcctggcatgaacagacccctggccagcaccgtgaacgacaagctggagctgcaggagtgcctggagcacggccggatcgccaagttcagcaaggtgagaaccatcaccacccgaagcaacagcatcaaacaaggcaaggaccagcactttcctgtgttcatgaacgagaaggaggacatcctgtggtgtaccgagatggagagagtgttcgggttcccagtccactacacagatgtcagcaacatgtctagactggccagacagagactgctgggaagaagctggtccgtccctgtgatcagacacctgttcgcccctctgaaggagtacttcgcctgcgtgagcagcggcaacagcaacgccaacagccggggccccagcttctctagcggcctggtgccactgtccctgagagggagccacatgggccccatggagatctacaaaaccgtgagcgcctggaagcggcagcctgtgcgcgtgctgagcctgtttcggaatatcgataaagtcctgaaaagcctgggattcctggagagcggctctggctccggcggtggcaccctgaagtacgtggaggatgtgacaaacgtggtcagacgggatgtggagaagtggggccccttcgatctggtgtacggcagcacccaacccctgggcagctcttgtgaccggtgccctggctggtacatgtttcagttccaccggatcctgcagtacgccctgccgagacaggagtcccagcggccattcttttggattttcatggacaacttgctgctgaccgaggatgaccaggaaactaccactcggttcctgcagaccgaagccgtgaccctgcaggacgtgagaggccgggactaccagaacgccatgcgggtgtggtccaacatccctggactgaaaagcaagcacgcacctctgacccctaaagaagaggagtacctgcaggcccaggtgcggagcagaagcaagctggacgcccctaaggtggatctgctggtgaagaattgcctcctgcccctgagagagtacttcaagtatttcagccagaatagtctgcccctgggaggcagcggcggcggcagccacggccccctgagcttcgaggacgtggccatcgccttcaccaaggaggagtggcagcagctggaccccgcccagaggaccctgtacagggacgtgatgctggagaacttcagccacctggtgagcctgggccaccccgtgagcaagcccgacatcatcagcaggctggagcagggcgaggagccctggatcatcaagagggacatcagcgactggatctgccccgagagggagaccaggggcggcccaagcagcggcgcccctcctcccagcggcggcagcccagccggctccccaacctctaccgaggagggcacctctgagtccgccacccccgagagcggccctggcacctccaccgagcccagcgagggcagcgcacccggcagccctgccggcagccccacctccacagaggagggaaccagcaccgagcccagcgaaggcagcgccccaggcaccagcaccgagcctagtgagcaggagattaaacggatcaacaagatcagaagaagacttgtgaaagacagcaacaccaagaaggccggcaagacaggccccatgaaaaccctgctggttagagtgatgacacccgatctgagagagcggctggaaaacctgagaaagaagcctgaaaatatcccccagcccatcagcaatacatctagagccaacctgaataagctgctgaccgattacaccgaaatgaagaaggcgatcctgcatgtgtactgggaagagttccagaaggaccctgtgggcctgatgagccgggtggcccagcctgccagcaagaagatcgatcagaacaagctgaaacctgagatggacgagaagggcaacctgaccaccgccggctttgcctgctctcagtgtggccagcccctgttcgtgtacaagctggagcaggtgtctgagaagggcaaggcttacaccaactacttcggacggtgcaatgtggccgagcacgaaaagctgatcctgctggcccagctgaagcccgagaaggatagcgacgaagccgtgacatatagcctgggaaagtttgggcagagggccctggatttctacagcattcatgtgaccaaggagtccacccaccccgtgaagcccctggcccagatcgccggaaacagatacgcctccggacctgtgggaaaggccctgagcgacgcatgtatgggcacaatcgcctccttcctgtctaagtaccaggacatcatcatcgaacaccagaaggtggtgaagggcaaccagaagagactggagagcctgcgggagctggccggcaaggaaaacctggaataccctagcgtgaccctgccacctcagcctcacaccaaggagggcgttgatgcctacaacgaagtgatcgcccgggtgcgaatgtgggtgaacctgaacctgtggcagaagctgaagctaagcagagatgatgccaagcctctgctgagactgaagggattcccttcctttcctctggtcgagagacaggccaacgaagtggactggtgggacatggtgtgtaacgtgaagaagctgatcaacgagaaaaaggaggatggcaaggtgttttggcagaatctggctggctacaagagacaggaagccctgagaccatacctgagcagcgaggaagatcggaagaagggaaagaaattcgctcggtaccagctgggcgacctgctgctgcacctggaaaagaagcacggcgaggactggggaaaggtgtacgacgaggcctgggagcggattgacaagaaagtggaaggcctgagcaagcacatcaagctggaagaggaacggagaagcgaggacgcccagagcaaggccgccctgaccgactggctgcgggctaaggccagcttcgtgatcgagggcctgaaggaggccgacaaggacgagttctgcagatgcgagctgaagctgcagaagtggtacggggacctgcggggaaagcccttcgccatcgaagccgagaacagcatcctggacatcagcggcttcagcaagcagtacaactgtgccttcatctggcagaaggacggcgtgaagaagctgaacctgtacctgatcatcaactacttcaagggcggcaagctgcggttcaagaagatcaaacctgaagccttcgaagccaacagattctacaccgtgatcaacaaaaagagcggcgagatcgtgcccatggaggtgaacttcaacttcgacgaccccaacctgatcatcctgcctctggcctttggcaagagacagggcagagaattcatctggaacgacctgctgtccctggaaaccggcagcctgaagctggccaacggaagagtgatcgagaagacactgtacaacagaagaacccggcaggatgagcctgccctgttcgtggccctgaccttcgagcggcgggaggtcctggactcctccaatatcaaaccaatgaacctgatcggcgtggcaagaggcgaaaacatccccgccgtgatcgccctgaccgaccccgagggctgcccactgagccggtttaaggatagcctgggaaacccaacccacatcctgagaatcggcgagagctataaggagaagcagcggaccatccaggccaagaaggaggtggagcagcggagagccggcggctacagccggaagtacgccagcaaagccaagaatctggcagacgatatggtgagaaacaccgctagagatctgctgtactacgccgtgacccaggatgccatgctgatcttcgccaacctgagccggggcttcggccggcagggcaagcggaccttcatggccgagagacagtacacacggatggaggactggctgaccgccaagctggcctacgagggcctgagcaagacctacctgtccaagacactggcccagtacacctccaagacatgcagcaactgtgggtttaccatcaccagcgccgactacgacagggtgctggagaagctgaagaagacagcaacaggctggatgaccacaattaacggcaaggagctgaaggtggagggccagattacctactacaacagatacaagagacagaacgtagtcaaggacctgtccgtcgagctggatagactgagcgaagaatctgtgaacaacgacatctcctcctggacaaagggcagaagcggagaagctctgagcctcctgaagaaaagattctcccatagacccgtgcaggagaagttcgtgtgcctgaactgcggcttcgagacacacgcagccgagcaagccgccctgaacatcgccagatcctggctgttcctgcggagccaggagtacaagaaataccagacaaacaagacaaccggcaacaccgataagagagccttcgtcgagacctggcagtccttttaccggaagaagcttaaggaggtgtggaaacctgccgtgcggtctggcggatctggcggaggctccaccagccccaagaaaaagagaaaagtctaagctgccttctgcggggcttgccttctggccatgcccttcttctctcccttgcacctgtacctcttggtctttgaataaagcctgagtaggaaggctagcaaaaaaaaaaaaaaaaaaaaaaaaaaaaaaaaaaaaaaaaaaaaaaaaaaaaaaaaaaaaaaaaaaaaaaaaaaaaaaaa

SEQ ID NO: 13131 - RNA, 5785 nt, synthetic construct
  source 1..5785: mol_type = other RNA
aggaaataagagagaaaagaagagtaagaagaaatataagagccaccatggcccctaagaagaagcgtaaagtgagccggatggaacgcctcgtctacgaggtgcggcagaagtgcagaaacatcgaggacatctgcatctcctgcggatctctgaacgtgaccctggagcacccactgttcatcggcggcatgtgccagaactgtaaaaactgttttctggagtgtgcctatcaatacgacgatgacggctaccagagctactgcaccatctgttgcggcggaagagaggtgctgatgtgtggaaataacaactgctgccggtgcttctgcgtggaatgcgtggacctgctggtgggccccggcgccgcccaggccgctattaaggaagatccttggaactgctacatgtgcggccacaagggcacatacggcctgctgagacggagagaggactggcctagcagactgcagatgttcttcgccaataaccacgaccaggagttcgacccccctaaggtgtaccctcccgtccccgccgagaagagaaagcccatccgggtcctgagcctgttcgatggcatcgccaccggtctgctggtgctgaaggacctgggcatccaggtggataggtacattgcctccgaggtgtgcgaggactccatcaccgtgggaatggtgcgtcatcagggcaagatcatgtacgtgggcgacgtgcggagcgtgacacagaagcatatccaggagtggggccctttcgacctggtgatcggcggcagcccttgcaatgacctgagcatcgtgaacccagcccggaagggcctgtacgagggaaccggcagactgttcttcgagttttacagactgctgcacgacgcccggcctaaggaaggcgacgaccggcccttcttttggctgttcgagaatgtggtggccatgggagtcagcgacaagcgggatattagccggttcctggagagcaaccccgtgatgatcgatgccaaggaagtgagcgccgcccaccgggccagatacttctggggcaatctgcctggcatgaacagacccctggccagcaccgtgaacgacaagctggagctgcaggagtgcctggagcacggccggatcgccaagttcagcaaggtgagaaccatcaccacccgaagcaacagcatcaaacaaggcaaggaccagcactttcctgtgttcatgaacgagaaggaggacatcctgtggtgtaccgagatggagagagtgttcgggttcccagtccactacacagatgtcagcaacatgtctagactggccagacagagactgctgggaagaagctggtccgtccctgtgatcagacacctgttcgcccctctgaaggagtacttcgcctgcgtgagcagcggcaacagcaacgccaacagccggggccccagcttctctagcggcctggtgccactgtccctgagagggagccacatgggccccatggagatctacaaaaccgtgagcgcctggaagcggcagcctgtgcgcgtgctgagcctgtttcggaatatcgataaagtcctgaaaagcctgggattcctggagagcggctctggctccggcggtggcaccctgaagtacgtggaggatgtgacaaacgtggtcagacgggatgtggagaagtggggccccttcgatctggtgtacggcagcacccaacccctgggcagctcttgtgaccggtgccctggctggtacatgtttcagttccaccggatcctgcagtacgccctgccgagacaggagtcccagcggccattcttttggattttcatggacaacttgctgctgaccgaggatgaccaggaaactaccactcggttcctgcagaccgaagccgtgaccctgcaggacgtgagaggccgggactaccagaacgccatgcgggtgtggtccaacatccctggactgaaaagcaagcacgcacctctgacccctaaagaagaggagtacctgcaggcccaggtgcggagcagaagcaagctggacgcccctaaggtggatctgctggtgaagaattgcctcctgcccctgagagagtacttcaagtatttcagccagaatagtctgcccctgggaggcagcggcggcggccccgccgacagggacgccgtgacctacgacgacgtgcacatcggcttcacccaggaggagtgggtgctgctgaaccccagccagaagagcctgtacaaggacgtgatgctggacacctacaggaacctgaccgccatcggctacaggtggcaggaccacaacatcgaggagcactgcgagaacagcaggaggcacaggaggaagttcagctgcaccaccaagccctacgagagcctgcagaacggcggcccaagcagcggcgcccctcctcccagcggcggcagcccagccggctccccaacctctaccgaggagggcacctctgagtccgccacccccgagagcggccctggcacctccaccgagcccagcgagggcagcgcacccggcagccctgccggcagccccacctccacagaggagggaaccagcaccgagcccagcgaaggcagcgccccaggcaccagcaccgagcctagtgagcaggagattaaacggatcaacaagatcagaagaagacttgtgaaagacagcaacaccaagaaggccggcaagacaggccccatgaaaaccctgctggttagagtgatgacacccgatctgagagagcggctggaaaacctgagaaagaagcctgaaaatatcccccagcccatcagcaatacatctagagccaacctgaataagctgctgaccgattacaccgaaatgaagaaggcgatcctgcatgtgtactgggaagagttccagaaggaccctgtgggcctgatgagccgggtggcccagcctgccagcaagaagatcgatcagaacaagctgaaacctgagatggacgagaagggcaacctgaccaccgccggctttgcctgctctcagtgtggccagcccctgttcgtgtacaagctggagcaggtgtctgagaagggcaaggcttacaccaactacttcggacggtgcaatgtggccgagcacgaaaagctgatcctgctggcccagctgaagcccgagaaggatagcgacgaagccgtgacatatagcctgggaaagtttgggcagagggccctggatttctacagcattcatgtgaccaaggagtccacccaccccgtgaagcccctggcccagatcgccggaaacagatacgcctccggacctgtgggaaaggccctgagcgacgcatgtatgggcacaatcgcctccttcctgtctaagtaccaggacatcatcatcgaacaccagaaggtggtgaagggcaaccagaagagactggagagcctgcgggagctggccggcaaggaaaacctggaataccctagcgtgaccctgccacctcagcctcacaccaaggagggcgttgatgcctacaacgaagtgatcgcccgggtgcgaatgtgggtgaacctgaacctgtggcagaagctgaagctaagcagagatgatgccaagcctctgctgagactgaagggattcccttcctttcctctggtcgagagacaggccaacgaagtggactggtgggacatggtgtgtaacgtgaagaagctgatcaacgagaaaaaggaggatggcaaggtgttttggcagaatctggctggctacaagagacaggaagccctgagaccatacctgagcagcgaggaagatcggaagaagggaaagaaattcgctcggtaccagctgggcgacctgctgctgcacctggaaaagaagcacggcgaggactggggaaaggtgtacgacgaggcctgggagcggattgacaagaaagtggaaggcctgagcaagcacatcaagctggaagaggaacggagaagcgaggacgcccagagcaaggccgccctgaccgactggctgcgggctaaggccagcttcgtgatcgagggcctgaaggaggccgacaaggacgagttctgcagatgcgagctgaagctgcagaagtggtacggggacctgcggggaaagcccttcgccatcgaagccgagaacagcatcctggacatcagcggcttcagcaagcagtacaactgtgccttcatctggcagaaggacggcgtgaagaagctgaacctgtacctgatcatcaactacttcaagggcggcaagctgcggttcaagaagatcaaacctgaagccttcgaagccaacagattctacaccgtgatcaacaaaaagagcggcgagatcgtgcccatggaggtgaacttcaacttcgacgaccccaacctgatcatcctgcctctggcctttggcaagagacagggcagagaattcatctggaacgacctgctgtccctggaaaccggcagcctgaagctggccaacggaagagtgatcgagaagacactgtacaacagaagaacccggcaggatgagcctgccctgttcgtggccctgaccttcgagcggcgggaggtcctggactcctccaatatcaaaccaatgaacctgatcggcgtggcaagaggcgaaaacatccccgccgtgatcgccctgaccgaccccgagggctgcccactgagccggtttaaggatagcctgggaaacccaacccacatcctgagaatcggcgagagctataaggagaagcagcggaccatccaggccaagaaggaggtggagcagcggagagccggcggctacagccggaagtacgccagcaaagccaagaatctggcagacgatatggtgagaaacaccgctagagatctgctgtactacgccgtgacccaggatgccatgctgatcttcgccaacctgagccggggcttcggccggcagggcaagcggaccttcatggccgagagacagtacacacggatggaggactggctgaccgccaagctggcctacgagggcctgagcaagacctacctgtccaagacactggcccagtacacctccaagacatgcagcaactgtgggtttaccatcaccagcgccgactacgacagggtgctggagaagctgaagaagacagcaacaggctggatgaccacaattaacggcaaggagctgaaggtggagggccagattacctactacaacagatacaagagacagaacgtagtcaaggacctgtccgtcgagctggatagactgagcgaagaatctgtgaacaacgacatctcctcctggacaaagggcagaagcggagaagctctgagcctcctgaagaaaagattctcccatagacccgtgcaggagaagttcgtgtgcctgaactgcggcttcgagacacacgcagccgagcaagccgccctgaacatcgccagatcctggctgttcctgcggagccaggagtacaagaaataccagacaaacaagacaaccggcaacaccgataagagagccttcgtcgagacctggcagtccttttaccggaagaagcttaaggaggtgtggaaacctgccgtgcggtctggcggatctggcggaggctccaccagccccaagaaaaagagaaaagtctaagctgccttctgcggggcttgccttctggccatgcccttcttctctcccttgcacctgtacctcttggtctttgaataaagcctgagtaggaaggctagcaaaaaaaaaaaaaaaaaaaaaaaaaaaaaaaaaaaaaaaaaaaaaaaaaaaaaaaaaaaaaaaaaaaaaaaaaaaaaaaa

SEQ ID NO: 13132 - RNA, 5785 nt, synthetic construct
  source 1..5785: mol_type = other RNA
aggaaataagagagaaaagaagagtaagaagaaatataagagccaccatggcccctaagaagaagcgtaaagtgagccggatggaacgcctcgtctacgaggtgcggcagaagtgcagaaacatcgaggacatctgcatctcctgcggatctctgaacgtgaccctggagcacccactgttcatcggcggcatgtgccagaactgtaaaaactgttttctggagtgtgcctatcaatacgacgatgacggctaccagagctactgcaccatctgttgcggcggaagagaggtgctgatgtgtggaaataacaactgctgccggtgcttctgcgtggaatgcgtggacctgctggtgggccccggcgccgcccaggccgctattaaggaagatccttggaactgctacatgtgcggccacaagggcacatacggcctgctgagacggagagaggactggcctagcagactgcagatgttcttcgccaataaccacgaccaggagttcgacccccctaaggtgtaccctcccgtccccgccgagaagagaaagcccatccgggtcctgagcctgttcgatggcatcgccaccggtctgctggtgctgaaggacctgggcatccaggtggataggtacattgcctccgaggtgtgcgaggactccatcaccgtgggaatggtgcgtcatcagggcaagatcatgtacgtgggcgacgtgcggagcgtgacacagaagcatatccaggagtggggccctttcgacctggtgatcggcggcagcccttgcaatgacctgagcatcgtgaacccagcccggaagggcctgtacgagggaaccggcagactgttcttcgagttttacagactgctgcacgacgcccggcctaaggaaggcgacgaccggcccttcttttggctgttcgagaatgtggtggccatgggagtcagcgacaagcgggatattagccggttcctggagagcaaccccgtgatgatcgatgccaaggaagtgagcgccgcccaccgggccagatacttctggggcaatctgcctggcatgaacagacccctggccagcaccgtgaacgacaagctggagctgcaggagtgcctggagcacggccggatcgccaagttcagcaaggtgagaaccatcaccacccgaagcaacagcatcaaacaaggcaaggaccagcactttcctgtgttcatgaacgagaaggaggacatcctgtggtgtaccgagatggagagagtgttcgggttcccagtccactacacagatgtcagcaacatgtctagactggccagacagagactgctgggaagaagctggtccgtccctgtgatcagacacctgttcgcccctctgaaggagtacttcgcctgcgtgagcagcggcaacagcaacgccaacagccggggccccagcttctctagcggcctggtgccactgtccctgagagggagccacatgggccccatggagatctacaaaaccgtgagcgcctggaagcggcagcctgtgcgcgtgctgagcctgtttcggaatatcgataaagtcctgaaaagcctgggattcctggagagcggctctggctccggcggtggcaccctgaagtacgtggaggatgtgacaaacgtggtcagacgggatgtggagaagtggggccccttcgatctggtgtacggcagcacccaacccctgggcagctcttgtgaccggtgccctggctggtacatgtttcagttccaccggatcctgcagtacgccctgccgagacaggagtcccagcggccattcttttggattttcatggacaacttgctgctgaccgaggatgaccaggaaactaccactcggttcctgcagaccgaagccgtgaccctgcaggacgtgagaggccgggactaccagaacgccatgcgggtgtggtccaacatccctggactgaaaagcaagcacgcacctctgacccctaaagaagaggagtacctgcaggcccaggtgcggagcagaagcaagctggacgcccctaaggtggatctgctggtgaagaattgcctcctgcccctgagagagtacttcaagtatttcagccagaatagtctgcccctgggaggcagcggcggcggcagccaggagctgctgaccttcaaggacatcagcgtggacttcacccaggaggagtggggccagctgcccctggcccacaggaacctgtacagggaggtgatgctggagaactacggcaacctggtgagcgtggccggctaccagctgagcaagcccagcgtgatcagccagctggagaagggccaggagccctggatgaccgagaaggaggtgcccgaggaccccagcagcgacctgaggaccggcggcccaagcagcggcgcccctcctcccagcggcggcagcccagccggctccccaacctctaccgaggagggcacctctgagtccgccacccccgagagcggccctggcacctccaccgagcccagcgagggcagcgcacccggcagccctgccggcagccccacctccacagaggagggaaccagcaccgagcccagcgaaggcagcgccccaggcaccagcaccgagcctagtgagcaggagattaaacggatcaacaagatcagaagaagacttgtgaaagacagcaacaccaagaaggccggcaagacaggccccatgaaaaccctgctggttagagtgatgacacccgatctgagagagcggctggaaaacctgagaaagaagcctgaaaatatcccccagcccatcagcaatacatctagagccaacctgaataagctgctgaccgattacaccgaaatgaagaaggcgatcctgcatgtgtactgggaagagttccagaaggaccctgtgggcctgatgagccgggtggcccagcctgccagcaagaagatcgatcagaacaagctgaaacctgagatggacgagaagggcaacctgaccaccgccggctttgcctgctctcagtgtggccagcccctgttcgtgtacaagctggagcaggtgtctgagaagggcaaggcttacaccaactacttcggacggtgcaatgtggccgagcacgaaaagctgatcctgctggcccagctgaagcccgagaaggatagcgacgaagccgtgacatatagcctgggaaagtttgggcagagggccctggatttctacagcattcatgtgaccaaggagtccacccaccccgtgaagcccctggcccagatcgccggaaacagatacgcctccggacctgtgggaaaggccctgagcgacgcatgtatgggcacaatcgcctccttcctgtctaagtaccaggacatcatcatcgaacaccagaaggtggtgaagggcaaccagaagagactggagagcctgcgggagctggccggcaaggaaaacctggaataccctagcgtgaccctgccacctcagcctcacaccaaggagggcgttgatgcctacaacgaagtgatcgcccgggtgcgaatgtgggtgaacctgaacctgtggcagaagctgaagctaagcagagatgatgccaagcctctgctgagactgaagggattcccttcctttcctctggtcgagagacaggccaacgaagtggactggtgggacatggtgtgtaacgtgaagaagctgatcaacgagaaaaaggaggatggcaaggtgttttggcagaatctggctggctacaagagacaggaagccctgagaccatacctgagcagcgaggaagatcggaagaagggaaagaaattcgctcggtaccagctgggcgacctgctgctgcacctggaaaagaagcacggcgaggactggggaaaggtgtacgacgaggcctgggagcggattgacaagaaagtggaaggcctgagcaagcacatcaagctggaagaggaacggagaagcgaggacgcccagagcaaggccgccctgaccgactggctgcgggctaaggccagcttcgtgatcgagggcctgaaggaggccgacaaggacgagttctgcagatgcgagctgaagctgcagaagtggtacggggacctgcggggaaagcccttcgccatcgaagccgagaacagcatcctggacatcagcggcttcagcaagcagtacaactgtgccttcatctggcagaaggacggcgtgaagaagctgaacctgtacctgatcatcaactacttcaagggcggcaagctgcggttcaagaagatcaaacctgaagccttcgaagccaacagattctacaccgtgatcaacaaaaagagcggcgagatcgtgcccatggaggtgaacttcaacttcgacgaccccaacctgatcatcctgcctctggcctttggcaagagacagggcagagaattcatctggaacgacctgctgtccctggaaaccggcagcctgaagctggccaacggaagagtgatcgagaagacactgtacaacagaagaacccggcaggatgagcctgccctgttcgtggccctgaccttcgagcggcgggaggtcctggactcctccaatatcaaaccaatgaacctgatcggcgtggcaagaggcgaaaacatccccgccgtgatcgccctgaccgaccccgagggctgcccactgagccggtttaaggatagcctgggaaacccaacccacatcctgagaatcggcgagagctataaggagaagcagcggaccatccaggccaagaaggaggtggagcagcggagagccggcggctacagccggaagtacgccagcaaagccaagaatctggcagacgatatggtgagaaacaccgctagagatctgctgtactacgccgtgacccaggatgccatgctgatcttcgccaacctgagccggggcttcggccggcagggcaagcggaccttcatggccgagagacagtacacacggatggaggactggctgaccgccaagctggcctacgagggcctgagcaagacctacctgtccaagacactggcccagtacacctccaagacatgcagcaactgtgggtttaccatcaccagcgccgactacgacagggtgctggagaagctgaagaagacagcaacaggctggatgaccacaattaacggcaaggagctgaaggtggagggccagattacctactacaacagatacaagagacagaacgtagtcaaggacctgtccgtcgagctggatagactgagcgaagaatctgtgaacaacgacatctcctcctggacaaagggcagaagcggagaagctctgagcctcctgaagaaaagattctcccatagacccgtgcaggagaagttcgtgtgcctgaactgcggcttcgagacacacgcagccgagcaagccgccctgaacatcgccagatcctggctgttcctgcggagccaggagtacaagaaataccagacaaacaagacaaccggcaacaccgataagagagccttcgtcgagacctggcagtccttttaccggaagaagcttaaggaggtgtggaaacctgccgtgcggtctggcggatctggcggaggctccaccagccccaagaaaaagagaaaagtctaagctgccttctgcggggcttgccttctggccatgcccttcttctctcccttgcacctgtacctcttggtctttgaataaagcctgagtaggaaggctagcaaaaaaaaaaaaaaaaaaaaaaaaaaaaaaaaaaaaaaaaaaaaaaaaaaaaaaaaaaaaaaaaaaaaaaaaaaaaaaaa

SEQ ID NO: 13133 - RNA, 5785 nt, synthetic construct
  source 1..5785: mol_type = other RNA
aggaaataagagagaaaagaagagtaagaagaaatataagagccaccatggcccctaagaagaagcgtaaagtgagccggatggaacgcctcgtctacgaggtgcggcagaagtgcagaaacatcgaggacatctgcatctcctgcggatctctgaacgtgaccctggagcacccactgttcatcggcggcatgtgccagaactgtaaaaactgttttctggagtgtgcctatcaatacgacgatgacggctaccagagctactgcaccatctgttgcggcggaagagaggtgctgatgtgtggaaataacaactgctgccggtgcttctgcgtggaatgcgtggacctgctggtgggccccggcgccgcccaggccgctattaaggaagatccttggaactgctacatgtgcggccacaagggcacatacggcctgctgagacggagagaggactggcctagcagactgcagatgttcttcgccaataaccacgaccaggagttcgacccccctaaggtgtaccctcccgtccccgccgagaagagaaagcccatccgggtcctgagcctgttcgatggcatcgccaccggtctgctggtgctgaaggacctgggcatccaggtggataggtacattgcctccgaggtgtgcgaggactccatcaccgtgggaatggtgcgtcatcagggcaagatcatgtacgtgggcgacgtgcggagcgtgacacagaagcatatccaggagtggggccctttcgacctggtgatcggcggcagcccttgcaatgacctgagcatcgtgaacccagcccggaagggcctgtacgagggaaccggcagactgttcttcgagttttacagactgctgcacgacgcccggcctaaggaaggcgacgaccggcccttcttttggctgttcgagaatgtggtggccatgggagtcagcgacaagcgggatattagccggttcctggagagcaaccccgtgatgatcgatgccaaggaagtgagcgccgcccaccgggccagatacttctggggcaatctgcctggcatgaacagacccctggccagcaccgtgaacgacaagctggagctgcaggagtgcctggagcacggccggatcgccaagttcagcaaggtgagaaccatcaccacccgaagcaacagcatcaaacaaggcaaggaccagcactttcctgtgttcatgaacgagaaggaggacatcctgtggtgtaccgagatggagagagtgttcgggttcccagtccactacacagatgtcagcaacatgtctagactggccagacagagactgctgggaagaagctggtccgtccctgtgatcagacacctgttcgcccctctgaaggagtacttcgcctgcgtgagcagcggcaacagcaacgccaacagccggggccccagcttctctagcggcctggtgccactgtccctgagagggagccacatgggccccatggagatctacaaaaccgtgagcgcctggaagcggcagcctgtgcgcgtgctgagcctgtttcggaatatcgataaagtcctgaaaagcctgggattcctggagagcggctctggctccggcggtggcaccctgaagtacgtggaggatgtgacaaacgtggtcagacgggatgtggagaagtggggccccttcgatctggtgtacggcagcacccaacccctgggcagctcttgtgaccggtgccctggctggtacatgtttcagttccaccggatcctgcagtacgccctgccgagacaggagtcccagcggccattcttttggattttcatggacaacttgctgctgaccgaggatgaccaggaaactaccactcggttcctgcagaccgaagccgtgaccctgcaggacgtgagaggccgggactaccagaacgccatgcgggtgtggtccaacatccctggactgaaaagcaagcacgcacctctgacccctaaagaagaggagtacctgcaggcccaggtgcggagcagaagcaagctggacgcccctaaggtggatctgctggtgaagaattgcctcctgcccctgagagagtacttcaagtatttcagccagaatagtctgcccctgggaggcagcggcggcggcgcccaggagctggtgaccttccaggacgtggccgtggacttcaccgaggaggagtggggcctgctggaccacagccagaaggagctgtacaaggaggtgatgctggagaacgcccagaacctgctgagcctgggcctgcccgtgaccagggaggacctgatcagcttcttccagaagggcgaggccccctggatcctggagcccaagggcccctggaacttctgccccgacgccgtgaccaggggcggcccaagcagcggcgcccctcctcccagcggcggcagcccagccggctccccaacctctaccgaggagggcacctctgagtccgccacccccgagagcggccctggcacctccaccgagcccagcgagggcagcgcacccggcagccctgccggcagccccacctccacagaggagggaaccagcaccgagcccagcgaaggcagcgccccaggcaccagcaccgagcctagtgagcaggagattaaacggatcaacaagatcagaagaagacttgtgaaagacagcaacaccaagaaggccggcaagacaggccccatgaaaaccctgctggttagagtgatgacacccgatctgagagagcggctggaaaacctgagaaagaagcctgaaaatatcccccagcccatcagcaatacatctagagccaacctgaataagctgctgaccgattacaccgaaatgaagaaggcgatcctgcatgtgtactgggaagagttccagaaggaccctgtgggcctgatgagccgggtggcccagcctgccagcaagaagatcgatcagaacaagctgaaacctgagatggacgagaagggcaacctgaccaccgccggctttgcctgctctcagtgtggccagcccctgttcgtgtacaagctggagcaggtgtctgagaagggcaaggcttacaccaactacttcggacggtgcaatgtggccgagcacgaaaagctgatcctgctggcccagctgaagcccgagaaggatagcgacgaagccgtgacatatagcctgggaaagtttgggcagagggccctggatttctacagcattcatgtgaccaaggagtccacccaccccgtgaagcccctggcccagatcgccggaaacagatacgcctccggacctgtgggaaaggccctgagcgacgcatgtatgggcacaatcgcctccttcctgtctaagtaccaggacatcatcatcgaacaccagaaggtggtgaagggcaaccagaagagactggagagcctgcgggagctggccggcaaggaaaacctggaataccctagcgtgaccctgccacctcagcctcacaccaaggagggcgttgatgcctacaacgaagtgatcgcccgggtgcgaatgtgggtgaacctgaacctgtggcagaagctgaagctaagcagagatgatgccaagcctctgctgagactgaagggattcccttcctttcctctggtcgagagacaggccaacgaagtggactggtgggacatggtgtgtaacgtgaagaagctgatcaacgagaaaaaggaggatggcaaggtgttttggcagaatctggctggctacaagagacaggaagccctgagaccatacctgagcagcgaggaagatcggaagaagggaaagaaattcgctcggtaccagctgggcgacctgctgctgcacctggaaaagaagcacggcgaggactggggaaaggtgtacgacgaggcctgggagcggattgacaagaaagtggaaggcctgagcaagcacatcaagctggaagaggaacggagaagcgaggacgcccagagcaaggccgccctgaccgactggctgcgggctaaggccagcttcgtgatcgagggcctgaaggaggccgacaaggacgagttctgcagatgcgagctgaagctgcagaagtggtacggggacctgcggggaaagcccttcgccatcgaagccgagaacagcatcctggacatcagcggcttcagcaagcagtacaactgtgccttcatctggcagaaggacggcgtgaagaagctgaacctgtacctgatcatcaactacttcaagggcggcaagctgcggttcaagaagatcaaacctgaagccttcgaagccaacagattctacaccgtgatcaacaaaaagagcggcgagatcgtgcccatggaggtgaacttcaacttcgacgaccccaacctgatcatcctgcctctggcctttggcaagagacagggcagagaattcatctggaacgacctgctgtccctggaaaccggcagcctgaagctggccaacggaagagtgatcgagaagacactgtacaacagaagaacccggcaggatgagcctgccctgttcgtggccctgaccttcgagcggcgggaggtcctggactcctccaatatcaaaccaatgaacctgatcggcgtggcaagaggcgaaaacatccccgccgtgatcgccctgaccgaccccgagggctgcccactgagccggtttaaggatagcctgggaaacccaacccacatcctgagaatcggcgagagctataaggagaagcagcggaccatccaggccaagaaggaggtggagcagcggagagccggcggctacagccggaagtacgccagcaaagccaagaatctggcagacgatatggtgagaaacaccgctagagatctgctgtactacgccgtgacccaggatgccatgctgatcttcgccaacctgagccggggcttcggccggcagggcaagcggaccttcatggccgagagacagtacacacggatggaggactggctgaccgccaagctggcctacgagggcctgagcaagacctacctgtccaagacactggcccagtacacctccaagacatgcagcaactgtgggtttaccatcaccagcgccgactacgacagggtgctggagaagctgaagaagacagcaacaggctggatgaccacaattaacggcaaggagctgaaggtggagggccagattacctactacaacagatacaagagacagaacgtagtcaaggacctgtccgtcgagctggatagactgagcgaagaatctgtgaacaacgacatctcctcctggacaaagggcagaagcggagaagctctgagcctcctgaagaaaagattctcccatagacccgtgcaggagaagttcgtgtgcctgaactgcggcttcgagacacacgcagccgagcaagccgccctgaacatcgccagatcctggctgttcctgcggagccaggagtacaagaaataccagacaaacaagacaaccggcaacaccgataagagagccttcgtcgagacctggcagtccttttaccggaagaagcttaaggaggtgtggaaacctgccgtgcggtctggcggatctggcggaggctccaccagccccaagaaaaagagaaaagtctaagctgccttctgcggggcttgccttctggccatgcccttcttctctcccttgcacctgtacctcttggtctttgaataaagcctgagtaggaaggctagcaaaaaaaaaaaaaaaaaaaaaaaaaaaaaaaaaaaaaaaaaaaaaaaaaaaaaaaaaaaaaaaaaaaaaaaaaaaaaaaa

SEQ ID NO: 13134 - RNA, 5785 nt, synthetic construct
  source 1..5785: mol_type = other RNA
aggaaataagagagaaaagaagagtaagaagaaatataagagccaccatggcccctaagaagaagcgtaaagtgagccggatggaacgcctcgtctacgaggtgcggcagaagtgcagaaacatcgaggacatctgcatctcctgcggatctctgaacgtgaccctggagcacccactgttcatcggcggcatgtgccagaactgtaaaaactgttttctggagtgtgcctatcaatacgacgatgacggctaccagagctactgcaccatctgttgcggcggaagagaggtgctgatgtgtggaaataacaactgctgccggtgcttctgcgtggaatgcgtggacctgctggtgggccccggcgccgcccaggccgctattaaggaagatccttggaactgctacatgtgcggccacaagggcacatacggcctgctgagacggagagaggactggcctagcagactgcagatgttcttcgccaataaccacgaccaggagttcgacccccctaaggtgtaccctcccgtccccgccgagaagagaaagcccatccgggtcctgagcctgttcgatggcatcgccaccggtctgctggtgctgaaggacctgggcatccaggtggataggtacattgcctccgaggtgtgcgaggactccatcaccgtgggaatggtgcgtcatcagggcaagatcatgtacgtgggcgacgtgcggagcgtgacacagaagcatatccaggagtggggccctttcgacctggtgatcggcggcagcccttgcaatgacctgagcatcgtgaacccagcccggaagggcctgtacgagggaaccggcagactgttcttcgagttttacagactgctgcacgacgcccggcctaaggaaggcgacgaccggcccttcttttggctgttcgagaatgtggtggccatgggagtcagcgacaagcgggatattagccggttcctggagagcaaccccgtgatgatcgatgccaaggaagtgagcgccgcccaccgggccagatacttctggggcaatctgcctggcatgaacagacccctggccagcaccgtgaacgacaagctggagctgcaggagtgcctggagcacggccggatcgccaagttcagcaaggtgagaaccatcaccacccgaagcaacagcatcaaacaaggcaaggaccagcactttcctgtgttcatgaacgagaaggaggacatcctgtggtgtaccgagatggagagagtgttcgggttcccagtccactacacagatgtcagcaacatgtctagactggccagacagagactgctgggaagaagctggtccgtccctgtgatcagacacctgttcgcccctctgaaggagtacttcgcctgcgtgagcagcggcaacagcaacgccaacagccggggccccagcttctctagcggcctggtgccactgtccctgagagggagccacatgggccccatggagatctacaaaaccgtgagcgcctggaagcggcagcctgtgcgcgtgctgagcctgtttcggaatatcgataaagtcctgaaaagcctgggattcctggagagcggctctggctccggcggtggcaccctgaagtacgtggaggatgtgacaaacgtggtcagacgggatgtggagaagtggggccccttcgatctggtgtacggcagcacccaacccctgggcagctcttgtgaccggtgccctggctggtacatgtttcagttccaccggatcctgcagtacgccctgccgagacaggagtcccagcggccattcttttggattttcatggacaacttgctgctgaccgaggatgaccaggaaactaccactcggttcctgcagaccgaagccgtgaccctgcaggacgtgagaggccgggactaccagaacgccatgcgggtgtggtccaacatccctggactgaaaagcaagcacgcacctctgacccctaaagaagaggagtacctgcaggcccaggtgcggagcagaagcaagctggacgcccctaaggtggatctgctggtgaagaattgcctcctgcccctgagagagtacttcaagtatttcagccagaatagtctgcccctgggaggcagcggcggcggcgccctgaggagcgtgatgttcagcgacgtgagcatcgacttcagccccgaggagtgggagtacctggacctggagcagaaggacctgtacagggacgtgatgctggagaactacagcaacctggtgagcctgggctgcttcatcagcaagcccgacgtgatcagcagcctggagcagggcaaggagccctggaaggtggtgaggaagggcaggaggcagtaccccgacctggagaccaagtacggcggcccaagcagcggcgcccctcctcccagcggcggcagcccagccggctccccaacctctaccgaggagggcacctctgagtccgccacccccgagagcggccctggcacctccaccgagcccagcgagggcagcgcacccggcagccctgccggcagccccacctccacagaggagggaaccagcaccgagcccagcgaaggcagcgccccaggcaccagcaccgagcctagtgagcaggagattaaacggatcaacaagatcagaagaagacttgtgaaagacagcaacaccaagaaggccggcaagacaggccccatgaaaaccctgctggttagagtgatgacacccgatctgagagagcggctggaaaacctgagaaagaagcctgaaaatatcccccagcccatcagcaatacatctagagccaacctgaataagctgctgaccgattacaccgaaatgaagaaggcgatcctgcatgtgtactgggaagagttccagaaggaccctgtgggcctgatgagccgggtggcccagcctgccagcaagaagatcgatcagaacaagctgaaacctgagatggacgagaagggcaacctgaccaccgccggctttgcctgctctcagtgtggccagcccctgttcgtgtacaagctggagcaggtgtctgagaagggcaaggcttacaccaactacttcggacggtgcaatgtggccgagcacgaaaagctgatcctgctggcccagctgaagcccgagaaggatagcgacgaagccgtgacatatagcctgggaaagtttgggcagagggccctggatttctacagcattcatgtgaccaaggagtccacccaccccgtgaagcccctggcccagatcgccggaaacagatacgcctccggacctgtgggaaaggccctgagcgacgcatgtatgggcacaatcgcctccttcctgtctaagtaccaggacatcatcatcgaacaccagaaggtggtgaagggcaaccagaagagactggagagcctgcgggagctggccggcaaggaaaacctggaataccctagcgtgaccctgccacctcagcctcacaccaaggagggcgttgatgcctacaacgaagtgatcgcccgggtgcgaatgtgggtgaacctgaacctgtggcagaagctgaagctaagcagagatgatgccaagcctctgctgagactgaagggattcccttcctttcctctggtcgagagacaggccaacgaagtggactggtgggacatggtgtgtaacgtgaagaagctgatcaacgagaaaaaggaggatggcaaggtgttttggcagaatctggctggctacaagagacaggaagccctgagaccatacctgagcagcgaggaagatcggaagaagggaaagaaattcgctcggtaccagctgggcgacctgctgctgcacctggaaaagaagcacggcgaggactggggaaaggtgtacgacgaggcctgggagcggattgacaagaaagtggaaggcctgagcaagcacatcaagctggaagaggaacggagaagcgaggacgcccagagcaaggccgccctgaccgactggctgcgggctaaggccagcttcgtgatcgagggcctgaaggaggccgacaaggacgagttctgcagatgcgagctgaagctgcagaagtggtacggggacctgcggggaaagcccttcgccatcgaagccgagaacagcatcctggacatcagcggcttcagcaagcagtacaactgtgccttcatctggcagaaggacggcgtgaagaagctgaacctgtacctgatcatcaactacttcaagggcggcaagctgcggttcaagaagatcaaacctgaagccttcgaagccaacagattctacaccgtgatcaacaaaaagagcggcgagatcgtgcccatggaggtgaacttcaacttcgacgaccccaacctgatcatcctgcctctggcctttggcaagagacagggcagagaattcatctggaacgacctgctgtccctggaaaccggcagcctgaagctggccaacggaagagtgatcgagaagacactgtacaacagaagaacccggcaggatgagcctgccctgttcgtggccctgaccttcgagcggcgggaggtcctggactcctccaatatcaaaccaatgaacctgatcggcgtggcaagaggcgaaaacatccccgccgtgatcgccctgaccgaccccgagggctgcccactgagccggtttaaggatagcctgggaaacccaacccacatcctgagaatcggcgagagctataaggagaagcagcggaccatccaggccaagaaggaggtggagcagcggagagccggcggctacagccggaagtacgccagcaaagccaagaatctggcagacgatatggtgagaaacaccgctagagatctgctgtactacgccgtgacccaggatgccatgctgatcttcgccaacctgagccggggcttcggccggcagggcaagcggaccttcatggccgagagacagtacacacggatggaggactggctgaccgccaagctggcctacgagggcctgagcaagacctacctgtccaagacactggcccagtacacctccaagacatgcagcaactgtgggtttaccatcaccagcgccgactacgacagggtgctggagaagctgaagaagacagcaacaggctggatgaccacaattaacggcaaggagctgaaggtggagggccagattacctactacaacagatacaagagacagaacgtagtcaaggacctgtccgtcgagctggatagactgagcgaagaatctgtgaacaacgacatctcctcctggacaaagggcagaagcggagaagctctgagcctcctgaagaaaagattctcccatagacccgtgcaggagaagttcgtgtgcctgaactgcggcttcgagacacacgcagccgagcaagccgccctgaacatcgccagatcctggctgttcctgcggagccaggagtacaagaaataccagacaaacaagacaaccggcaacaccgataagagagccttcgtcgagacctggcagtccttttaccggaagaagcttaaggaggtgtggaaacctgccgtgcggtctggcggatctggcggaggctccaccagccccaagaaaaagagaaaagtctaagctgccttctgcggggcttgccttctggccatgcccttcttctctcccttgcacctgtacctcttggtctttgaataaagcctgagtaggaaggctagcaaaaaaaaaaaaaaaaaaaaaaaaaaaaaaaaaaaaaaaaaaaaaaaaaaaaaaaaaaaaaaaaaaaaaaaaaaaaaaaa

SEQ ID NO: 13135 - RNA, 5785 nt, synthetic construct
  source 1..5785: mol_type = other RNA
aggaaataagagagaaaagaagagtaagaagaaatataagagccaccatggcccctaagaagaagcgtaaagtgagccggatggaacgcctcgtctacgaggtgcggcagaagtgcagaaacatcgaggacatctgcatctcctgcggatctctgaacgtgaccctggagcacccactgttcatcggcggcatgtgccagaactgtaaaaactgttttctggagtgtgcctatcaatacgacgatgacggctaccagagctactgcaccatctgttgcggcggaagagaggtgctgatgtgtggaaataacaactgctgccggtgcttctgcgtggaatgcgtggacctgctggtgggccccggcgccgcccaggccgctattaaggaagatccttggaactgctacatgtgcggccacaagggcacatacggcctgctgagacggagagaggactggcctagcagactgcagatgttcttcgccaataaccacgaccaggagttcgacccccctaaggtgtaccctcccgtccccgccgagaagagaaagcccatccgggtcctgagcctgttcgatggcatcgccaccggtctgctggtgctgaaggacctgggcatccaggtggataggtacattgcctccgaggtgtgcgaggactccatcaccgtgggaatggtgcgtcatcagggcaagatcatgtacgtgggcgacgtgcggagcgtgacacagaagcatatccaggagtggggccctttcgacctggtgatcggcggcagcccttgcaatgacctgagcatcgtgaacccagcccggaagggcctgtacgagggaaccggcagactgttcttcgagttttacagactgctgcacgacgcccggcctaaggaaggcgacgaccggcccttcttttggctgttcgagaatgtggtggccatgggagtcagcgacaagcgggatattagccggttcctggagagcaaccccgtgatgatcgatgccaaggaagtgagcgccgcccaccgggccagatacttctggggcaatctgcctggcatgaacagacccctggccagcaccgtgaacgacaagctggagctgcaggagtgcctggagcacggccggatcgccaagttcagcaaggtgagaaccatcaccacccgaagcaacagcatcaaacaaggcaaggaccagcactttcctgtgttcatgaacgagaaggaggacatcctgtggtgtaccgagatggagagagtgttcgggttcccagtccactacacagatgtcagcaacatgtctagactggccagacagagactgctgggaagaagctggtccgtccctgtgatcagacacctgttcgcccctctgaaggagtacttcgcctgcgtgagcagcggcaacagcaacgccaacagccggggccccagcttctctagcggcctggtgccactgtccctgagagggagccacatgggccccatggagatctacaaaaccgtgagcgcctggaagcggcagcctgtgcgcgtgctgagcctgtttcggaatatcgataaagtcctgaaaagcctgggattcctggagagcggctctggctccggcggtggcaccctgaagtacgtggaggatgtgacaaacgtggtcagacgggatgtggagaagtggggccccttcgatctggtgtacggcagcacccaacccctgggcagctcttgtgaccggtgccctggctggtacatgtttcagttccaccggatcctgcagtacgccctgccgagacaggagtcccagcggccattcttttggattttcatggacaacttgctgctgaccgaggatgaccaggaaactaccactcggttcctgcagaccgaagccgtgaccctgcaggacgtgagaggccgggactaccagaacgccatgcgggtgtggtccaacatccctggactgaaaagcaagcacgcacctctgacccctaaagaagaggagtacctgcaggcccaggtgcggagcagaagcaagctggacgcccctaaggtggatctgctggtgaagaattgcctcctgcccctgagagagtacttcaagtatttcagccagaatagtctgcccctgggaggcagcggcggcggcgtgaccttcgaggaggtggccgtgtacttcagcgaggaggagtgggccctgctggaccccggccagagggccctgtacagggacgtgatgcaggagaactacgagaccgtgatcagcctgggcaaggacttctgccccctgagccccgagcaggtggccctgtgcggcatgctgtgcggcaggagcgagggccacgtgagccagagccccgagcagagggagacctgcaagaggcagcacaagggcggcccaagcagcggcgcccctcctcccagcggcggcagcccagccggctccccaacctctaccgaggagggcacctctgagtccgccacccccgagagcggccctggcacctccaccgagcccagcgagggcagcgcacccggcagccctgccggcagccccacctccacagaggagggaaccagcaccgagcccagcgaaggcagcgccccaggcaccagcaccgagcctagtgagcaggagattaaacggatcaacaagatcagaagaagacttgtgaaagacagcaacaccaagaaggccggcaagacaggccccatgaaaaccctgctggttagagtgatgacacccgatctgagagagcggctggaaaacctgagaaagaagcctgaaaatatcccccagcccatcagcaatacatctagagccaacctgaataagctgctgaccgattacaccgaaatgaagaaggcgatcctgcatgtgtactgggaagagttccagaaggaccctgtgggcctgatgagccgggtggcccagcctgccagcaagaagatcgatcagaacaagctgaaacctgagatggacgagaagggcaacctgaccaccgccggctttgcctgctctcagtgtggccagcccctgttcgtgtacaagctggagcaggtgtctgagaagggcaaggcttacaccaactacttcggacggtgcaatgtggccgagcacgaaaagctgatcctgctggcccagctgaagcccgagaaggatagcgacgaagccgtgacatatagcctgggaaagtttgggcagagggccctggatttctacagcattcatgtgaccaaggagtccacccaccccgtgaagcccctggcccagatcgccggaaacagatacgcctccggacctgtgggaaaggccctgagcgacgcatgtatgggcacaatcgcctccttcctgtctaagtaccaggacatcatcatcgaacaccagaaggtggtgaagggcaaccagaagagactggagagcctgcgggagctggccggcaaggaaaacctggaataccctagcgtgaccctgccacctcagcctcacaccaaggagggcgttgatgcctacaacgaagtgatcgcccgggtgcgaatgtgggtgaacctgaacctgtggcagaagctgaagctaagcagagatgatgccaagcctctgctgagactgaagggattcccttcctttcctctggtcgagagacaggccaacgaagtggactggtgggacatggtgtgtaacgtgaagaagctgatcaacgagaaaaaggaggatggcaaggtgttttggcagaatctggctggctacaagagacaggaagccctgagaccatacctgagcagcgaggaagatcggaagaagggaaagaaattcgctcggtaccagctgggcgacctgctgctgcacctggaaaagaagcacggcgaggactggggaaaggtgtacgacgaggcctgggagcggattgacaagaaagtggaaggcctgagcaagcacatcaagctggaagaggaacggagaagcgaggacgcccagagcaaggccgccctgaccgactggctgcgggctaaggccagcttcgtgatcgagggcctgaaggaggccgacaaggacgagttctgcagatgcgagctgaagctgcagaagtggtacggggacctgcggggaaagcccttcgccatcgaagccgagaacagcatcctggacatcagcggcttcagcaagcagtacaactgtgccttcatctggcagaaggacggcgtgaagaagctgaacctgtacctgatcatcaactacttcaagggcggcaagctgcggttcaagaagatcaaacctgaagccttcgaagccaacagattctacaccgtgatcaacaaaaagagcggcgagatcgtgcccatggaggtgaacttcaacttcgacgaccccaacctgatcatcctgcctctggcctttggcaagagacagggcagagaattcatctggaacgacctgctgtccctggaaaccggcagcctgaagctggccaacggaagagtgatcgagaagacactgtacaacagaagaacccggcaggatgagcctgccctgttcgtggccctgaccttcgagcggcgggaggtcctggactcctccaatatcaaaccaatgaacctgatcggcgtggcaagaggcgaaaacatccccgccgtgatcgccctgaccgaccccgagggctgcccactgagccggtttaaggatagcctgggaaacccaacccacatcctgagaatcggcgagagctataaggagaagcagcggaccatccaggccaagaaggaggtggagcagcggagagccggcggctacagccggaagtacgccagcaaagccaagaatctggcagacgatatggtgagaaacaccgctagagatctgctgtactacgccgtgacccaggatgccatgctgatcttcgccaacctgagccggggcttcggccggcagggcaagcggaccttcatggccgagagacagtacacacggatggaggactggctgaccgccaagctggcctacgagggcctgagcaagacctacctgtccaagacactggcccagtacacctccaagacatgcagcaactgtgggtttaccatcaccagcgccgactacgacagggtgctggagaagctgaagaagacagcaacaggctggatgaccacaattaacggcaaggagctgaaggtggagggccagattacctactacaacagatacaagagacagaacgtagtcaaggacctgtccgtcgagctggatagactgagcgaagaatctgtgaacaacgacatctcctcctggacaaagggcagaagcggagaagctctgagcctcctgaagaaaagattctcccatagacccgtgcaggagaagttcgtgtgcctgaactgcggcttcgagacacacgcagccgagcaagccgccctgaacatcgccagatcctggctgttcctgcggagccaggagtacaagaaataccagacaaacaagacaaccggcaacaccgataagagagccttcgtcgagacctggcagtccttttaccggaagaagcttaaggaggtgtggaaacctgccgtgcggtctggcggatctggcggaggctccaccagccccaagaaaaagagaaaagtctaagctgccttctgcggggcttgccttctggccatgcccttcttctctcccttgcacctgtacctcttggtctttgaataaagcctgagtaggaaggctagcaaaaaaaaaaaaaaaaaaaaaaaaaaaaaaaaaaaaaaaaaaaaaaaaaaaaaaaaaaaaaaaaaaaaaaaaaaaaaaaa

SEQ ID NO: 13136 - RNA, 5785 nt, synthetic construct
  source 1..5785: mol_type = other RNA
aggaaataagagagaaaagaagagtaagaagaaatataagagccaccatggcccctaagaagaagcgtaaagtgagccggatggaacgcctcgtctacgaggtgcggcagaagtgcagaaacatcgaggacatctgcatctcctgcggatctctgaacgtgaccctggagcacccactgttcatcggcggcatgtgccagaactgtaaaaactgttttctggagtgtgcctatcaatacgacgatgacggctaccagagctactgcaccatctgttgcggcggaagagaggtgctgatgtgtggaaataacaactgctgccggtgcttctgcgtggaatgcgtggacctgctggtgggccccggcgccgcccaggccgctattaaggaagatccttggaactgctacatgtgcggccacaagggcacatacggcctgctgagacggagagaggactggcctagcagactgcagatgttcttcgccaataaccacgaccaggagttcgacccccctaaggtgtaccctcccgtccccgccgagaagagaaagcccatccgggtcctgagcctgttcgatggcatcgccaccggtctgctggtgctgaaggacctgggcatccaggtggataggtacattgcctccgaggtgtgcgaggactccatcaccgtgggaatggtgcgtcatcagggcaagatcatgtacgtgggcgacgtgcggagcgtgacacagaagcatatccaggagtggggccctttcgacctggtgatcggcggcagcccttgcaatgacctgagcatcgtgaacccagcccggaagggcctgtacgagggaaccggcagactgttcttcgagttttacagactgctgcacgacgcccggcctaaggaaggcgacgaccggcccttcttttggctgttcgagaatgtggtggccatgggagtcagcgacaagcgggatattagccggttcctggagagcaaccccgtgatgatcgatgccaaggaagtgagcgccgcccaccgggccagatacttctggggcaatctgcctggcatgaacagacccctggccagcaccgtgaacgacaagctggagctgcaggagtgcctggagcacggccggatcgccaagttcagcaaggtgagaaccatcaccacccgaagcaacagcatcaaacaaggcaaggaccagcactttcctgtgttcatgaacgagaaggaggacatcctgtggtgtaccgagatggagagagtgttcgggttcccagtccactacacagatgtcagcaacatgtctagactggccagacagagactgctgggaagaagctggtccgtccctgtgatcagacacctgttcgcccctctgaaggagtacttcgcctgcgtgagcagcggcaacagcaacgccaacagccggggccccagcttctctagcggcctggtgccactgtccctgagagggagccacatgggccccatggagatctacaaaaccgtgagcgcctggaagcggcagcctgtgcgcgtgctgagcctgtttcggaatatcgataaagtcctgaaaagcctgggattcctggagagcggctctggctccggcggtggcaccctgaagtacgtggaggatgtgacaaacgtggtcagacgggatgtggagaagtggggccccttcgatctggtgtacggcagcacccaacccctgggcagctcttgtgaccggtgccctggctggtacatgtttcagttccaccggatcctgcagtacgccctgccgagacaggagtcccagcggccattcttttggattttcatggacaacttgctgctgaccgaggatgaccaggaaactaccactcggttcctgcagaccgaagccgtgaccctgcaggacgtgagaggccgggactaccagaacgccatgcgggtgtggtccaacatccctggactgaaaagcaagcacgcacctctgacccctaaagaagaggagtacctgcaggcccaggtgcggagcagaagcaagctggacgcccctaaggtggatctgctggtgaagaattgcctcctgcccctgagagagtacttcaagtatttcagccagaatagtctgcccctgggaggcagcggcggcggcgtgcaggagagcgtgaccttcaaggacgtggccgtgctgttcacccaggacgagtgggcccagctgagccccgcccagagggccctgtacagggacgtgatgctggagaactacagcaacctggtgagcctgggcctgctgggccccaagcccgacgtgttcagccagctgggcaagggcgaggagtggatgcccgaggacagcctgggcggcttctgcctggactggatgaccacccccgtgggcggcccaagcagcggcgcccctcctcccagcggcggcagcccagccggctccccaacctctaccgaggagggcacctctgagtccgccacccccgagagcggccctggcacctccaccgagcccagcgagggcagcgcacccggcagccctgccggcagccccacctccacagaggagggaaccagcaccgagcccagcgaaggcagcgccccaggcaccagcaccgagcctagtgagcaggagattaaacggatcaacaagatcagaagaagacttgtgaaagacagcaacaccaagaaggccggcaagacaggccccatgaaaaccctgctggttagagtgatgacacccgatctgagagagcggctggaaaacctgagaaagaagcctgaaaatatcccccagcccatcagcaatacatctagagccaacctgaataagctgctgaccgattacaccgaaatgaagaaggcgatcctgcatgtgtactgggaagagttccagaaggaccctgtgggcctgatgagccgggtggcccagcctgccagcaagaagatcgatcagaacaagctgaaacctgagatggacgagaagggcaacctgaccaccgccggctttgcctgctctcagtgtggccagcccctgttcgtgtacaagctggagcaggtgtctgagaagggcaaggcttacaccaactacttcggacggtgcaatgtggccgagcacgaaaagctgatcctgctggcccagctgaagcccgagaaggatagcgacgaagccgtgacatatagcctgggaaagtttgggcagagggccctggatttctacagcattcatgtgaccaaggagtccacccaccccgtgaagcccctggcccagatcgccggaaacagatacgcctccggacctgtgggaaaggccctgagcgacgcatgtatgggcacaatcgcctccttcctgtctaagtaccaggacatcatcatcgaacaccagaaggtggtgaagggcaaccagaagagactggagagcctgcgggagctggccggcaaggaaaacctggaataccctagcgtgaccctgccacctcagcctcacaccaaggagggcgttgatgcctacaacgaagtgatcgcccgggtgcgaatgtgggtgaacctgaacctgtggcagaagctgaagctaagcagagatgatgccaagcctctgctgagactgaagggattcccttcctttcctctggtcgagagacaggccaacgaagtggactggtgggacatggtgtgtaacgtgaagaagctgatcaacgagaaaaaggaggatggcaaggtgttttggcagaatctggctggctacaagagacaggaagccctgagaccatacctgagcagcgaggaagatcggaagaagggaaagaaattcgctcggtaccagctgggcgacctgctgctgcacctggaaaagaagcacggcgaggactggggaaaggtgtacgacgaggcctgggagcggattgacaagaaagtggaaggcctgagcaagcacatcaagctggaagaggaacggagaagcgaggacgcccagagcaaggccgccctgaccgactggctgcgggctaaggccagcttcgtgatcgagggcctgaaggaggccgacaaggacgagttctgcagatgcgagctgaagctgcagaagtggtacggggacctgcggggaaagcccttcgccatcgaagccgagaacagcatcctggacatcagcggcttcagcaagcagtacaactgtgccttcatctggcagaaggacggcgtgaagaagctgaacctgtacctgatcatcaactacttcaagggcggcaagctgcggttcaagaagatcaaacctgaagccttcgaagccaacagattctacaccgtgatcaacaaaaagagcggcgagatcgtgcccatggaggtgaacttcaacttcgacgaccccaacctgatcatcctgcctctggcctttggcaagagacagggcagagaattcatctggaacgacctgctgtccctggaaaccggcagcctgaagctggccaacggaagagtgatcgagaagacactgtacaacagaagaacccggcaggatgagcctgccctgttcgtggccctgaccttcgagcggcgggaggtcctggactcctccaatatcaaaccaatgaacctgatcggcgtggcaagaggcgaaaacatccccgccgtgatcgccctgaccgaccccgagggctgcccactgagccggtttaaggatagcctgggaaacccaacccacatcctgagaatcggcgagagctataaggagaagcagcggaccatccaggccaagaaggaggtggagcagcggagagccggcggctacagccggaagtacgccagcaaagccaagaatctggcagacgatatggtgagaaacaccgctagagatctgctgtactacgccgtgacccaggatgccatgctgatcttcgccaacctgagccggggcttcggccggcagggcaagcggaccttcatggccgagagacagtacacacggatggaggactggctgaccgccaagctggcctacgagggcctgagcaagacctacctgtccaagacactggcccagtacacctccaagacatgcagcaactgtgggtttaccatcaccagcgccgactacgacagggtgctggagaagctgaagaagacagcaacaggctggatgaccacaattaacggcaaggagctgaaggtggagggccagattacctactacaacagatacaagagacagaacgtagtcaaggacctgtccgtcgagctggatagactgagcgaagaatctgtgaacaacgacatctcctcctggacaaagggcagaagcggagaagctctgagcctcctgaagaaaagattctcccatagacccgtgcaggagaagttcgtgtgcctgaactgcggcttcgagacacacgcagccgagcaagccgccctgaacatcgccagatcctggctgttcctgcggagccaggagtacaagaaataccagacaaacaagacaaccggcaacaccgataagagagccttcgtcgagacctggcagtccttttaccggaagaagcttaaggaggtgtggaaacctgccgtgcggtctggcggatctggcggaggctccaccagccccaagaaaaagagaaaagtctaagctgccttctgcggggcttgccttctggccatgcccttcttctctcccttgcacctgtacctcttggtctttgaataaagcctgagtaggaaggctagcaaaaaaaaaaaaaaaaaaaaaaaaaaaaaaaaaaaaaaaaaaaaaaaaaaaaaaaaaaaaaaaaaaaaaaaaaaaaaaaa

SEQ ID NO: 13137 - RNA, 5785 nt, synthetic construct
  source 1..5785: mol_type = other RNA
aggaaataagagagaaaagaagagtaagaagaaatataagagccaccatggcccctaagaagaagcgtaaagtgagccggatggaacgcctcgtctacgaggtgcggcagaagtgcagaaacatcgaggacatctgcatctcctgcggatctctgaacgtgaccctggagcacccactgttcatcggcggcatgtgccagaactgtaaaaactgttttctggagtgtgcctatcaatacgacgatgacggctaccagagctactgcaccatctgttgcggcggaagagaggtgctgatgtgtggaaataacaactgctgccggtgcttctgcgtggaatgcgtggacctgctggtgggccccggcgccgcccaggccgctattaaggaagatccttggaactgctacatgtgcggccacaagggcacatacggcctgctgagacggagagaggactggcctagcagactgcagatgttcttcgccaataaccacgaccaggagttcgacccccctaaggtgtaccctcccgtccccgccgagaagagaaagcccatccgggtcctgagcctgttcgatggcatcgccaccggtctgctggtgctgaaggacctgggcatccaggtggataggtacattgcctccgaggtgtgcgaggactccatcaccgtgggaatggtgcgtcatcagggcaagatcatgtacgtgggcgacgtgcggagcgtgacacagaagcatatccaggagtggggccctttcgacctggtgatcggcggcagcccttgcaatgacctgagcatcgtgaacccagcccggaagggcctgtacgagggaaccggcagactgttcttcgagttttacagactgctgcacgacgcccggcctaaggaaggcgacgaccggcccttcttttggctgttcgagaatgtggtggccatgggagtcagcgacaagcgggatattagccggttcctggagagcaaccccgtgatgatcgatgccaaggaagtgagcgccgcccaccgggccagatacttctggggcaatctgcctggcatgaacagacccctggccagcaccgtgaacgacaagctggagctgcaggagtgcctggagcacggccggatcgccaagttcagcaaggtgagaaccatcaccacccgaagcaacagcatcaaacaaggcaaggaccagcactttcctgtgttcatgaacgagaaggaggacatcctgtggtgtaccgagatggagagagtgttcgggttcccagtccactacacagatgtcagcaacatgtctagactggccagacagagactgctgggaagaagctggtccgtccctgtgatcagacacctgttcgcccctctgaaggagtacttcgcctgcgtgagcagcggcaacagcaacgccaacagccggggccccagcttctctagcggcctggtgccactgtccctgagagggagccacatgggccccatggagatctacaaaaccgtgagcgcctggaagcggcagcctgtgcgcgtgctgagcctgtttcggaatatcgataaagtcctgaaaagcctgggattcctggagagcggctctggctccggcggtggcaccctgaagtacgtggaggatgtgacaaacgtggtcagacgggatgtggagaagtggggccccttcgatctggtgtacggcagcacccaacccctgggcagctcttgtgaccggtgccctggctggtacatgtttcagttccaccggatcctgcagtacgccctgccgagacaggagtcccagcggccattcttttggattttcatggacaacttgctgctgaccgaggatgaccaggaaactaccactcggttcctgcagaccgaagccgtgaccctgcaggacgtgagaggccgggactaccagaacgccatgcgggtgtggtccaacatccctggactgaaaagcaagcacgcacctctgacccctaaagaagaggagtacctgcaggcccaggtgcggagcagaagcaagctggacgcccctaaggtggatctgctggtgaagaattgcctcctgcccctgagagagtacttcaagtatttcagccagaatagtctgcccctgggaggcagcggcggcggcttccagggcagcgtgagcttcgaggacgtgaccgtgggcttcagccaggaggagtggcagcacctggaccccagccagagggccctgtacagggacgtgatgctggagaactacagcaacctggtgagcgtgggctactgcgtgcacaagcccgaggtgatcttcaggctggagcagggcgaggagccctggaggctggaggaggagttccccagccagagcttccccgaggtgtggaccgccggcggcccaagcagcggcgcccctcctcccagcggcggcagcccagccggctccccaacctctaccgaggagggcacctctgagtccgccacccccgagagcggccctggcacctccaccgagcccagcgagggcagcgcacccggcagccctgccggcagccccacctccacagaggagggaaccagcaccgagcccagcgaaggcagcgccccaggcaccagcaccgagcctagtgagcaggagattaaacggatcaacaagatcagaagaagacttgtgaaagacagcaacaccaagaaggccggcaagacaggccccatgaaaaccctgctggttagagtgatgacacccgatctgagagagcggctggaaaacctgagaaagaagcctgaaaatatcccccagcccatcagcaatacatctagagccaacctgaataagctgctgaccgattacaccgaaatgaagaaggcgatcctgcatgtgtactgggaagagttccagaaggaccctgtgggcctgatgagccgggtggcccagcctgccagcaagaagatcgatcagaacaagctgaaacctgagatggacgagaagggcaacctgaccaccgccggctttgcctgctctcagtgtggccagcccctgttcgtgtacaagctggagcaggtgtctgagaagggcaaggcttacaccaactacttcggacggtgcaatgtggccgagcacgaaaagctgatcctgctggcccagctgaagcccgagaaggatagcgacgaagccgtgacatatagcctgggaaagtttgggcagagggccctggatttctacagcattcatgtgaccaaggagtccacccaccccgtgaagcccctggcccagatcgccggaaacagatacgcctccggacctgtgggaaaggccctgagcgacgcatgtatgggcacaatcgcctccttcctgtctaagtaccaggacatcatcatcgaacaccagaaggtggtgaagggcaaccagaagagactggagagcctgcgggagctggccggcaaggaaaacctggaataccctagcgtgaccctgccacctcagcctcacaccaaggagggcgttgatgcctacaacgaagtgatcgcccgggtgcgaatgtgggtgaacctgaacctgtggcagaagctgaagctaagcagagatgatgccaagcctctgctgagactgaagggattcccttcctttcctctggtcgagagacaggccaacgaagtggactggtgggacatggtgtgtaacgtgaagaagctgatcaacgagaaaaaggaggatggcaaggtgttttggcagaatctggctggctacaagagacaggaagccctgagaccatacctgagcagcgaggaagatcggaagaagggaaagaaattcgctcggtaccagctgggcgacctgctgctgcacctggaaaagaagcacggcgaggactggggaaaggtgtacgacgaggcctgggagcggattgacaagaaagtggaaggcctgagcaagcacatcaagctggaagaggaacggagaagcgaggacgcccagagcaaggccgccctgaccgactggctgcgggctaaggccagcttcgtgatcgagggcctgaaggaggccgacaaggacgagttctgcagatgcgagctgaagctgcagaagtggtacggggacctgcggggaaagcccttcgccatcgaagccgagaacagcatcctggacatcagcggcttcagcaagcagtacaactgtgccttcatctggcagaaggacggcgtgaagaagctgaacctgtacctgatcatcaactacttcaagggcggcaagctgcggttcaagaagatcaaacctgaagccttcgaagccaacagattctacaccgtgatcaacaaaaagagcggcgagatcgtgcccatggaggtgaacttcaacttcgacgaccccaacctgatcatcctgcctctggcctttggcaagagacagggcagagaattcatctggaacgacctgctgtccctggaaaccggcagcctgaagctggccaacggaagagtgatcgagaagacactgtacaacagaagaacccggcaggatgagcctgccctgttcgtggccctgaccttcgagcggcgggaggtcctggactcctccaatatcaaaccaatgaacctgatcggcgtggcaagaggcgaaaacatccccgccgtgatcgccctgaccgaccccgagggctgcccactgagccggtttaaggatagcctgggaaacccaacccacatcctgagaatcggcgagagctataaggagaagcagcggaccatccaggccaagaaggaggtggagcagcggagagccggcggctacagccggaagtacgccagcaaagccaagaatctggcagacgatatggtgagaaacaccgctagagatctgctgtactacgccgtgacccaggatgccatgctgatcttcgccaacctgagccggggcttcggccggcagggcaagcggaccttcatggccgagagacagtacacacggatggaggactggctgaccgccaagctggcctacgagggcctgagcaagacctacctgtccaagacactggcccagtacacctccaagacatgcagcaactgtgggtttaccatcaccagcgccgactacgacagggtgctggagaagctgaagaagacagcaacaggctggatgaccacaattaacggcaaggagctgaaggtggagggccagattacctactacaacagatacaagagacagaacgtagtcaaggacctgtccgtcgagctggatagactgagcgaagaatctgtgaacaacgacatctcctcctggacaaagggcagaagcggagaagctctgagcctcctgaagaaaagattctcccatagacccgtgcaggagaagttcgtgtgcctgaactgcggcttcgagacacacgcagccgagcaagccgccctgaacatcgccagatcctggctgttcctgcggagccaggagtacaagaaataccagacaaacaagacaaccggcaacaccgataagagagccttcgtcgagacctggcagtccttttaccggaagaagcttaaggaggtgtggaaacctgccgtgcggtctggcggatctggcggaggctccaccagccccaagaaaaagagaaaagtctaagctgccttctgcggggcttgccttctggccatgcccttcttctctcccttgcacctgtacctcttggtctttgaataaagcctgagtaggaaggctagcaaaaaaaaaaaaaaaaaaaaaaaaaaaaaaaaaaaaaaaaaaaaaaaaaaaaaaaaaaaaaaaaaaaaaaaaaaaaaaaa

SEQ ID NO: 13138 - RNA, 5785 nt, synthetic construct
  source 1..5785: mol_type = other RNA
aggaaataagagagaaaagaagagtaagaagaaatataagagccaccatggcccctaagaagaagcgtaaagtgagccggatggaacgcctcgtctacgaggtgcggcagaagtgcagaaacatcgaggacatctgcatctcctgcggatctctgaacgtgaccctggagcacccactgttcatcggcggcatgtgccagaactgtaaaaactgttttctggagtgtgcctatcaatacgacgatgacggctaccagagctactgcaccatctgttgcggcggaagagaggtgctgatgtgtggaaataacaactgctgccggtgcttctgcgtggaatgcgtggacctgctggtgggccccggcgccgcccaggccgctattaaggaagatccttggaactgctacatgtgcggccacaagggcacatacggcctgctgagacggagagaggactggcctagcagactgcagatgttcttcgccaataaccacgaccaggagttcgacccccctaaggtgtaccctcccgtccccgccgagaagagaaagcccatccgggtcctgagcctgttcgatggcatcgccaccggtctgctggtgctgaaggacctgggcatccaggtggataggtacattgcctccgaggtgtgcgaggactccatcaccgtgggaatggtgcgtcatcagggcaagatcatgtacgtgggcgacgtgcggagcgtgacacagaagcatatccaggagtggggccctttcgacctggtgatcggcggcagcccttgcaatgacctgagcatcgtgaacccagcccggaagggcctgtacgagggaaccggcagactgttcttcgagttttacagactgctgcacgacgcccggcctaaggaaggcgacgaccggcccttcttttggctgttcgagaatgtggtggccatgggagtcagcgacaagcgggatattagccggttcctggagagcaaccccgtgatgatcgatgccaaggaagtgagcgccgcccaccgggccagatacttctggggcaatctgcctggcatgaacagacccctggccagcaccgtgaacgacaagctggagctgcaggagtgcctggagcacggccggatcgccaagttcagcaaggtgagaaccatcaccacccgaagcaacagcatcaaacaaggcaaggaccagcactttcctgtgttcatgaacgagaaggaggacatcctgtggtgtaccgagatggagagagtgttcgggttcccagtccactacacagatgtcagcaacatgtctagactggccagacagagactgctgggaagaagctggtccgtccctgtgatcagacacctgttcgcccctctgaaggagtacttcgcctgcgtgagcagcggcaacagcaacgccaacagccggggccccagcttctctagcggcctggtgccactgtccctgagagggagccacatgggccccatggagatctacaaaaccgtgagcgcctggaagcggcagcctgtgcgcgtgctgagcctgtttcggaatatcgataaagtcctgaaaagcctgggattcctggagagcggctctggctccggcggtggcaccctgaagtacgtggaggatgtgacaaacgtggtcagacgggatgtggagaagtggggccccttcgatctggtgtacggcagcacccaacccctgggcagctcttgtgaccggtgccctggctggtacatgtttcagttccaccggatcctgcagtacgccctgccgagacaggagtcccagcggccattcttttggattttcatggacaacttgctgctgaccgaggatgaccaggaaactaccactcggttcctgcagaccgaagccgtgaccctgcaggacgtgagaggccgggactaccagaacgccatgcgggtgtggtccaacatccctggactgaaaagcaagcacgcacctctgacccctaaagaagaggagtacctgcaggcccaggtgcggagcagaagcaagctggacgcccctaaggtggatctgctggtgaagaattgcctcctgcccctgagagagtacttcaagtatttcagccagaatagtctgcccctgggaggcagcggcggcggcgacagcgtggccttcgaggacgtggccatcaacttcacctgcgaggagtgggccctgctgggccccagccagaagagcctgtacagggacgtgatgcaggagaccatcaggaacctggactgcatcggcatgaagtggcagaacctggacatcgaggaggacgagtacaagaaccccggcaggaacctgaggtgcttcatggtggagaggagctgcgagatcaaggacaacagccagtgcggcggcggcccaagcagcggcgcccctcctcccagcggcggcagcccagccggctccccaacctctaccgaggagggcacctctgagtccgccacccccgagagcggccctggcacctccaccgagcccagcgagggcagcgcacccggcagccctgccggcagccccacctccacagaggagggaaccagcaccgagcccagcgaaggcagcgccccaggcaccagcaccgagcctagtgagcaggagattaaacggatcaacaagatcagaagaagacttgtgaaagacagcaacaccaagaaggccggcaagacaggccccatgaaaaccctgctggttagagtgatgacacccgatctgagagagcggctggaaaacctgagaaagaagcctgaaaatatcccccagcccatcagcaatacatctagagccaacctgaataagctgctgaccgattacaccgaaatgaagaaggcgatcctgcatgtgtactgggaagagttccagaaggaccctgtgggcctgatgagccgggtggcccagcctgccagcaagaagatcgatcagaacaagctgaaacctgagatggacgagaagggcaacctgaccaccgccggctttgcctgctctcagtgtggccagcccctgttcgtgtacaagctggagcaggtgtctgagaagggcaaggcttacaccaactacttcggacggtgcaatgtggccgagcacgaaaagctgatcctgctggcccagctgaagcccgagaaggatagcgacgaagccgtgacatatagcctgggaaagtttgggcagagggccctggatttctacagcattcatgtgaccaaggagtccacccaccccgtgaagcccctggcccagatcgccggaaacagatacgcctccggacctgtgggaaaggccctgagcgacgcatgtatgggcacaatcgcctccttcctgtctaagtaccaggacatcatcatcgaacaccagaaggtggtgaagggcaaccagaagagactggagagcctgcgggagctggccggcaaggaaaacctggaataccctagcgtgaccctgccacctcagcctcacaccaaggagggcgttgatgcctacaacgaagtgatcgcccgggtgcgaatgtgggtgaacctgaacctgtggcagaagctgaagctaagcagagatgatgccaagcctctgctgagactgaagggattcccttcctttcctctggtcgagagacaggccaacgaagtggactggtgggacatggtgtgtaacgtgaagaagctgatcaacgagaaaaaggaggatggcaaggtgttttggcagaatctggctggctacaagagacaggaagccctgagaccatacctgagcagcgaggaagatcggaagaagggaaagaaattcgctcggtaccagctgggcgacctgctgctgcacctggaaaagaagcacggcgaggactggggaaaggtgtacgacgaggcctgggagcggattgacaagaaagtggaaggcctgagcaagcacatcaagctggaagaggaacggagaagcgaggacgcccagagcaaggccgccctgaccgactggctgcgggctaaggccagcttcgtgatcgagggcctgaaggaggccgacaaggacgagttctgcagatgcgagctgaagctgcagaagtggtacggggacctgcggggaaagcccttcgccatcgaagccgagaacagcatcctggacatcagcggcttcagcaagcagtacaactgtgccttcatctggcagaaggacggcgtgaagaagctgaacctgtacctgatcatcaactacttcaagggcggcaagctgcggttcaagaagatcaaacctgaagccttcgaagccaacagattctacaccgtgatcaacaaaaagagcggcgagatcgtgcccatggaggtgaacttcaacttcgacgaccccaacctgatcatcctgcctctggcctttggcaagagacagggcagagaattcatctggaacgacctgctgtccctggaaaccggcagcctgaagctggccaacggaagagtgatcgagaagacactgtacaacagaagaacccggcaggatgagcctgccctgttcgtggccctgaccttcgagcggcgggaggtcctggactcctccaatatcaaaccaatgaacctgatcggcgtggcaagaggcgaaaacatccccgccgtgatcgccctgaccgaccccgagggctgcccactgagccggtttaaggatagcctgggaaacccaacccacatcctgagaatcggcgagagctataaggagaagcagcggaccatccaggccaagaaggaggtggagcagcggagagccggcggctacagccggaagtacgccagcaaagccaagaatctggcagacgatatggtgagaaacaccgctagagatctgctgtactacgccgtgacccaggatgccatgctgatcttcgccaacctgagccggggcttcggccggcagggcaagcggaccttcatggccgagagacagtacacacggatggaggactggctgaccgccaagctggcctacgagggcctgagcaagacctacctgtccaagacactggcccagtacacctccaagacatgcagcaactgtgggtttaccatcaccagcgccgactacgacagggtgctggagaagctgaagaagacagcaacaggctggatgaccacaattaacggcaaggagctgaaggtggagggccagattacctactacaacagatacaagagacagaacgtagtcaaggacctgtccgtcgagctggatagactgagcgaagaatctgtgaacaacgacatctcctcctggacaaagggcagaagcggagaagctctgagcctcctgaagaaaagattctcccatagacccgtgcaggagaagttcgtgtgcctgaactgcggcttcgagacacacgcagccgagcaagccgccctgaacatcgccagatcctggctgttcctgcggagccaggagtacaagaaataccagacaaacaagacaaccggcaacaccgataagagagccttcgtcgagacctggcagtccttttaccggaagaagcttaaggaggtgtggaaacctgccgtgcggtctggcggatctggcggaggctccaccagccccaagaaaaagagaaaagtctaagctgccttctgcggggcttgccttctggccatgcccttcttctctcccttgcacctgtacctcttggtctttgaataaagcctgagtaggaaggctagcaaaaaaaaaaaaaaaaaaaaaaaaaaaaaaaaaaaaaaaaaaaaaaaaaaaaaaaaaaaaaaaaaaaaaaaaaaaaaaaa

SEQ ID NO: 13139 - RNA, 5785 nt, synthetic construct
  source 1..5785: mol_type = other RNA
aggaaataagagagaaaagaagagtaagaagaaatataagagccaccatggcccctaagaagaagcgtaaagtgagccggatggaacgcctcgtctacgaggtgcggcagaagtgcagaaacatcgaggacatctgcatctcctgcggatctctgaacgtgaccctggagcacccactgttcatcggcggcatgtgccagaactgtaaaaactgttttctggagtgtgcctatcaatacgacgatgacggctaccagagctactgcaccatctgttgcggcggaagagaggtgctgatgtgtggaaataacaactgctgccggtgcttctgcgtggaatgcgtggacctgctggtgggccccggcgccgcccaggccgctattaaggaagatccttggaactgctacatgtgcggccacaagggcacatacggcctgctgagacggagagaggactggcctagcagactgcagatgttcttcgccaataaccacgaccaggagttcgacccccctaaggtgtaccctcccgtccccgccgagaagagaaagcccatccgggtcctgagcctgttcgatggcatcgccaccggtctgctggtgctgaaggacctgggcatccaggtggataggtacattgcctccgaggtgtgcgaggactccatcaccgtgggaatggtgcgtcatcagggcaagatcatgtacgtgggcgacgtgcggagcgtgacacagaagcatatccaggagtggggccctttcgacctggtgatcggcggcagcccttgcaatgacctgagcatcgtgaacccagcccggaagggcctgtacgagggaaccggcagactgttcttcgagttttacagactgctgcacgacgcccggcctaaggaaggcgacgaccggcccttcttttggctgttcgagaatgtggtggccatgggagtcagcgacaagcgggatattagccggttcctggagagcaaccccgtgatgatcgatgccaaggaagtgagcgccgcccaccgggccagatacttctggggcaatctgcctggcatgaacagacccctggccagcaccgtgaacgacaagctggagctgcaggagtgcctggagcacggccggatcgccaagttcagcaaggtgagaaccatcaccacccgaagcaacagcatcaaacaaggcaaggaccagcactttcctgtgttcatgaacgagaaggaggacatcctgtggtgtaccgagatggagagagtgttcgggttcccagtccactacacagatgtcagcaacatgtctagactggccagacagagactgctgggaagaagctggtccgtccctgtgatcagacacctgttcgcccctctgaaggagtacttcgcctgcgtgagcagcggcaacagcaacgccaacagccggggccccagcttctctagcggcctggtgccactgtccctgagagggagccacatgggccccatggagatctacaaaaccgtgagcgcctggaagcggcagcctgtgcgcgtgctgagcctgtttcggaatatcgataaagtcctgaaaagcctgggattcctggagagcggctctggctccggcggtggcaccctgaagtacgtggaggatgtgacaaacgtggtcagacgggatgtggagaagtggggccccttcgatctggtgtacggcagcacccaacccctgggcagctcttgtgaccggtgccctggctggtacatgtttcagttccaccggatcctgcagtacgccctgccgagacaggagtcccagcggccattcttttggattttcatggacaacttgctgctgaccgaggatgaccaggaaactaccactcggttcctgcagaccgaagccgtgaccctgcaggacgtgagaggccgggactaccagaacgccatgcgggtgtggtccaacatccctggactgaaaagcaagcacgcacctctgacccctaaagaagaggagtacctgcaggcccaggtgcggagcagaagcaagctggacgcccctaaggtggatctgctggtgaagaattgcctcctgcccctgagagagtacttcaagtatttcagccagaatagtctgcccctgggaggcagcggcggcggccacggcagcagctacgagggcagcgtgagcttcagggacgtggccatcaacttcagcagggaggagtggaggcacctggacctgagccagaggaacctgtactgggacgtgatgctggagacctacagccacctgctgagcgtgggctaccagttccccaagcccgaggtggtgatgctggagcagggcaacgagccctgggccctgcagggcgagaggcccaggcacagctgccccggcgagggcggcccaagcagcggcgcccctcctcccagcggcggcagcccagccggctccccaacctctaccgaggagggcacctctgagtccgccacccccgagagcggccctggcacctccaccgagcccagcgagggcagcgcacccggcagccctgccggcagccccacctccacagaggagggaaccagcaccgagcccagcgaaggcagcgccccaggcaccagcaccgagcctagtgagcaggagattaaacggatcaacaagatcagaagaagacttgtgaaagacagcaacaccaagaaggccggcaagacaggccccatgaaaaccctgctggttagagtgatgacacccgatctgagagagcggctggaaaacctgagaaagaagcctgaaaatatcccccagcccatcagcaatacatctagagccaacctgaataagctgctgaccgattacaccgaaatgaagaaggcgatcctgcatgtgtactgggaagagttccagaaggaccctgtgggcctgatgagccgggtggcccagcctgccagcaagaagatcgatcagaacaagctgaaacctgagatggacgagaagggcaacctgaccaccgccggctttgcctgctctcagtgtggccagcccctgttcgtgtacaagctggagcaggtgtctgagaagggcaaggcttacaccaactacttcggacggtgcaatgtggccgagcacgaaaagctgatcctgctggcccagctgaagcccgagaaggatagcgacgaagccgtgacatatagcctgggaaagtttgggcagagggccctggatttctacagcattcatgtgaccaaggagtccacccaccccgtgaagcccctggcccagatcgccggaaacagatacgcctccggacctgtgggaaaggccctgagcgacgcatgtatgggcacaatcgcctccttcctgtctaagtaccaggacatcatcatcgaacaccagaaggtggtgaagggcaaccagaagagactggagagcctgcgggagctggccggcaaggaaaacctggaataccctagcgtgaccctgccacctcagcctcacaccaaggagggcgttgatgcctacaacgaagtgatcgcccgggtgcgaatgtgggtgaacctgaacctgtggcagaagctgaagctaagcagagatgatgccaagcctctgctgagactgaagggattcccttcctttcctctggtcgagagacaggccaacgaagtggactggtgggacatggtgtgtaacgtgaagaagctgatcaacgagaaaaaggaggatggcaaggtgttttggcagaatctggctggctacaagagacaggaagccctgagaccatacctgagcagcgaggaagatcggaagaagggaaagaaattcgctcggtaccagctgggcgacctgctgctgcacctggaaaagaagcacggcgaggactggggaaaggtgtacgacgaggcctgggagcggattgacaagaaagtggaaggcctgagcaagcacatcaagctggaagaggaacggagaagcgaggacgcccagagcaaggccgccctgaccgactggctgcgggctaaggccagcttcgtgatcgagggcctgaaggaggccgacaaggacgagttctgcagatgcgagctgaagctgcagaagtggtacggggacctgcggggaaagcccttcgccatcgaagccgagaacagcatcctggacatcagcggcttcagcaagcagtacaactgtgccttcatctggcagaaggacggcgtgaagaagctgaacctgtacctgatcatcaactacttcaagggcggcaagctgcggttcaagaagatcaaacctgaagccttcgaagccaacagattctacaccgtgatcaacaaaaagagcggcgagatcgtgcccatggaggtgaacttcaacttcgacgaccccaacctgatcatcctgcctctggcctttggcaagagacagggcagagaattcatctggaacgacctgctgtccctggaaaccggcagcctgaagctggccaacggaagagtgatcgagaagacactgtacaacagaagaacccggcaggatgagcctgccctgttcgtggccctgaccttcgagcggcgggaggtcctggactcctccaatatcaaaccaatgaacctgatcggcgtggcaagaggcgaaaacatccccgccgtgatcgccctgaccgaccccgagggctgcccactgagccggtttaaggatagcctgggaaacccaacccacatcctgagaatcggcgagagctataaggagaagcagcggaccatccaggccaagaaggaggtggagcagcggagagccggcggctacagccggaagtacgccagcaaagccaagaatctggcagacgatatggtgagaaacaccgctagagatctgctgtactacgccgtgacccaggatgccatgctgatcttcgccaacctgagccggggcttcggccggcagggcaagcggaccttcatggccgagagacagtacacacggatggaggactggctgaccgccaagctggcctacgagggcctgagcaagacctacctgtccaagacactggcccagtacacctccaagacatgcagcaactgtgggtttaccatcaccagcgccgactacgacagggtgctggagaagctgaagaagacagcaacaggctggatgaccacaattaacggcaaggagctgaaggtggagggccagattacctactacaacagatacaagagacagaacgtagtcaaggacctgtccgtcgagctggatagactgagcgaagaatctgtgaacaacgacatctcctcctggacaaagggcagaagcggagaagctctgagcctcctgaagaaaagattctcccatagacccgtgcaggagaagttcgtgtgcctgaactgcggcttcgagacacacgcagccgagcaagccgccctgaacatcgccagatcctggctgttcctgcggagccaggagtacaagaaataccagacaaacaagacaaccggcaacaccgataagagagccttcgtcgagacctggcagtccttttaccggaagaagcttaaggaggtgtggaaacctgccgtgcggtctggcggatctggcggaggctccaccagccccaagaaaaagagaaaagtctaagctgccttctgcggggcttgccttctggccatgcccttcttctctcccttgcacctgtacctcttggtctttgaataaagcctgagtaggaaggctagcaaaaaaaaaaaaaaaaaaaaaaaaaaaaaaaaaaaaaaaaaaaaaaaaaaaaaaaaaaaaaaaaaaaaaaaaaaaaaaaa

SEQ ID NO: 13140 - RNA, 5785 nt, synthetic construct
  source 1..5785: mol_type = other RNA
aggaaataagagagaaaagaagagtaagaagaaatataagagccaccatggcccctaagaagaagcgtaaagtgagccggatggaacgcctcgtctacgaggtgcggcagaagtgcagaaacatcgaggacatctgcatctcctgcggatctctgaacgtgaccctggagcacccactgttcatcggcggcatgtgccagaactgtaaaaactgttttctggagtgtgcctatcaatacgacgatgacggctaccagagctactgcaccatctgttgcggcggaagagaggtgctgatgtgtggaaataacaactgctgccggtgcttctgcgtggaatgcgtggacctgctggtgggccccggcgccgcccaggccgctattaaggaagatccttggaactgctacatgtgcggccacaagggcacatacggcctgctgagacggagagaggactggcctagcagactgcagatgttcttcgccaataaccacgaccaggagttcgacccccctaaggtgtaccctcccgtccccgccgagaagagaaagcccatccgggtcctgagcctgttcgatggcatcgccaccggtctgctggtgctgaaggacctgggcatccaggtggataggtacattgcctccgaggtgtgcgaggactccatcaccgtgggaatggtgcgtcatcagggcaagatcatgtacgtgggcgacgtgcggagcgtgacacagaagcatatccaggagtggggccctttcgacctggtgatcggcggcagcccttgcaatgacctgagcatcgtgaacccagcccggaagggcctgtacgagggaaccggcagactgttcttcgagttttacagactgctgcacgacgcccggcctaaggaaggcgacgaccggcccttcttttggctgttcgagaatgtggtggccatgggagtcagcgacaagcgggatattagccggttcctggagagcaaccccgtgatgatcgatgccaaggaagtgagcgccgcccaccgggccagatacttctggggcaatctgcctggcatgaacagacccctggccagcaccgtgaacgacaagctggagctgcaggagtgcctggagcacggccggatcgccaagttcagcaaggtgagaaccatcaccacccgaagcaacagcatcaaacaaggcaaggaccagcactttcctgtgttcatgaacgagaaggaggacatcctgtggtgtaccgagatggagagagtgttcgggttcccagtccactacacagatgtcagcaacatgtctagactggccagacagagactgctgggaagaagctggtccgtccctgtgatcagacacctgttcgcccctctgaaggagtacttcgcctgcgtgagcagcggcaacagcaacgccaacagccggggccccagcttctctagcggcctggtgccactgtccctgagagggagccacatgggccccatggagatctacaaaaccgtgagcgcctggaagcggcagcctgtgcgcgtgctgagcctgtttcggaatatcgataaagtcctgaaaagcctgggattcctggagagcggctctggctccggcggtggcaccctgaagtacgtggaggatgtgacaaacgtggtcagacgggatgtggagaagtggggccccttcgatctggtgtacggcagcacccaacccctgggcagctcttgtgaccggtgccctggctggtacatgtttcagttccaccggatcctgcagtacgccctgccgagacaggagtcccagcggccattcttttggattttcatggacaacttgctgctgaccgaggatgaccaggaaactaccactcggttcctgcagaccgaagccgtgaccctgcaggacgtgagaggccgggactaccagaacgccatgcgggtgtggtccaacatccctggactgaaaagcaagcacgcacctctgacccctaaagaagaggagtacctgcaggcccaggtgcggagcagaagcaagctggacgcccctaaggtggatctgctggtgaagaattgcctcctgcccctgagagagtacttcaagtatttcagccagaatagtctgcccctgggaggcagcggcggcggccagcccggcgccgtgaggttcgccgacgtggccgtgtacttcagccccgaggagtggggctgcctgaggcccgtgcagagggccctgtacagggacgtgatgagggagacctacagccacctggtggccctgggcgtgggcggcaccaagcccaagctgatcagctgggtggaggaggaggccgagctgtggggccccgaggcccaggacctggagggcgccaagtgcctgaccgaggccaacggcggcccaagcagcggcgcccctcctcccagcggcggcagcccagccggctccccaacctctaccgaggagggcacctctgagtccgccacccccgagagcggccctggcacctccaccgagcccagcgagggcagcgcacccggcagccctgccggcagccccacctccacagaggagggaaccagcaccgagcccagcgaaggcagcgccccaggcaccagcaccgagcctagtgagcaggagattaaacggatcaacaagatcagaagaagacttgtgaaagacagcaacaccaagaaggccggcaagacaggccccatgaaaaccctgctggttagagtgatgacacccgatctgagagagcggctggaaaacctgagaaagaagcctgaaaatatcccccagcccatcagcaatacatctagagccaacctgaataagctgctgaccgattacaccgaaatgaagaaggcgatcctgcatgtgtactgggaagagttccagaaggaccctgtgggcctgatgagccgggtggcccagcctgccagcaagaagatcgatcagaacaagctgaaacctgagatggacgagaagggcaacctgaccaccgccggctttgcctgctctcagtgtggccagcccctgttcgtgtacaagctggagcaggtgtctgagaagggcaaggcttacaccaactacttcggacggtgcaatgtggccgagcacgaaaagctgatcctgctggcccagctgaagcccgagaaggatagcgacgaagccgtgacatatagcctgggaaagtttgggcagagggccctggatttctacagcattcatgtgaccaaggagtccacccaccccgtgaagcccctggcccagatcgccggaaacagatacgcctccggacctgtgggaaaggccctgagcgacgcatgtatgggcacaatcgcctccttcctgtctaagtaccaggacatcatcatcgaacaccagaaggtggtgaagggcaaccagaagagactggagagcctgcgggagctggccggcaaggaaaacctggaataccctagcgtgaccctgccacctcagcctcacaccaaggagggcgttgatgcctacaacgaagtgatcgcccgggtgcgaatgtgggtgaacctgaacctgtggcagaagctgaagctaagcagagatgatgccaagcctctgctgagactgaagggattcccttcctttcctctggtcgagagacaggccaacgaagtggactggtgggacatggtgtgtaacgtgaagaagctgatcaacgagaaaaaggaggatggcaaggtgttttggcagaatctggctggctacaagagacaggaagccctgagaccatacctgagcagcgaggaagatcggaagaagggaaagaaattcgctcggtaccagctgggcgacctgctgctgcacctggaaaagaagcacggcgaggactggggaaaggtgtacgacgaggcctgggagcggattgacaagaaagtggaaggcctgagcaagcacatcaagctggaagaggaacggagaagcgaggacgcccagagcaaggccgccctgaccgactggctgcgggctaaggccagcttcgtgatcgagggcctgaaggaggccgacaaggacgagttctgcagatgcgagctgaagctgcagaagtggtacggggacctgcggggaaagcccttcgccatcgaagccgagaacagcatcctggacatcagcggcttcagcaagcagtacaactgtgccttcatctggcagaaggacggcgtgaagaagctgaacctgtacctgatcatcaactacttcaagggcggcaagctgcggttcaagaagatcaaacctgaagccttcgaagccaacagattctacaccgtgatcaacaaaaagagcggcgagatcgtgcccatggaggtgaacttcaacttcgacgaccccaacctgatcatcctgcctctggcctttggcaagagacagggcagagaattcatctggaacgacctgctgtccctggaaaccggcagcctgaagctggccaacggaagagtgatcgagaagacactgtacaacagaagaacccggcaggatgagcctgccctgttcgtggccctgaccttcgagcggcgggaggtcctggactcctccaatatcaaaccaatgaacctgatcggcgtggcaagaggcgaaaacatccccgccgtgatcgccctgaccgaccccgagggctgcccactgagccggtttaaggatagcctgggaaacccaacccacatcctgagaatcggcgagagctataaggagaagcagcggaccatccaggccaagaaggaggtggagcagcggagagccggcggctacagccggaagtacgccagcaaagccaagaatctggcagacgatatggtgagaaacaccgctagagatctgctgtactacgccgtgacccaggatgccatgctgatcttcgccaacctgagccggggcttcggccggcagggcaagcggaccttcatggccgagagacagtacacacggatggaggactggctgaccgccaagctggcctacgagggcctgagcaagacctacctgtccaagacactggcccagtacacctccaagacatgcagcaactgtgggtttaccatcaccagcgccgactacgacagggtgctggagaagctgaagaagacagcaacaggctggatgaccacaattaacggcaaggagctgaaggtggagggccagattacctactacaacagatacaagagacagaacgtagtcaaggacctgtccgtcgagctggatagactgagcgaagaatctgtgaacaacgacatctcctcctggacaaagggcagaagcggagaagctctgagcctcctgaagaaaagattctcccatagacccgtgcaggagaagttcgtgtgcctgaactgcggcttcgagacacacgcagccgagcaagccgccctgaacatcgccagatcctggctgttcctgcggagccaggagtacaagaaataccagacaaacaagacaaccggcaacaccgataagagagccttcgtcgagacctggcagtccttttaccggaagaagcttaaggaggtgtggaaacctgccgtgcggtctggcggatctggcggaggctccaccagccccaagaaaaagagaaaagtctaagctgccttctgcggggcttgccttctggccatgcccttcttctctcccttgcacctgtacctcttggtctttgaataaagcctgagtaggaaggctagcaaaaaaaaaaaaaaaaaaaaaaaaaaaaaaaaaaaaaaaaaaaaaaaaaaaaaaaaaaaaaaaaaaaaaaaaaaaaaaaa

SEQ ID NO: 13141 - RNA, 5785 nt, synthetic construct
  source 1..5785: mol_type = other RNA
aggaaataagagagaaaagaagagtaagaagaaatataagagccaccatggcccctaagaagaagcgtaaagtgagccggatggaacgcctcgtctacgaggtgcggcagaagtgcagaaacatcgaggacatctgcatctcctgcggatctctgaacgtgaccctggagcacccactgttcatcggcggcatgtgccagaactgtaaaaactgttttctggagtgtgcctatcaatacgacgatgacggctaccagagctactgcaccatctgttgcggcggaagagaggtgctgatgtgtggaaataacaactgctgccggtgcttctgcgtggaatgcgtggacctgctggtgggccccggcgccgcccaggccgctattaaggaagatccttggaactgctacatgtgcggccacaagggcacatacggcctgctgagacggagagaggactggcctagcagactgcagatgttcttcgccaataaccacgaccaggagttcgacccccctaaggtgtaccctcccgtccccgccgagaagagaaagcccatccgggtcctgagcctgttcgatggcatcgccaccggtctgctggtgctgaaggacctgggcatccaggtggataggtacattgcctccgaggtgtgcgaggactccatcaccgtgggaatggtgcgtcatcagggcaagatcatgtacgtgggcgacgtgcggagcgtgacacagaagcatatccaggagtggggccctttcgacctggtgatcggcggcagcccttgcaatgacctgagcatcgtgaacccagcccggaagggcctgtacgagggaaccggcagactgttcttcgagttttacagactgctgcacgacgcccggcctaaggaaggcgacgaccggcccttcttttggctgttcgagaatgtggtggccatgggagtcagcgacaagcgggatattagccggttcctggagagcaaccccgtgatgatcgatgccaaggaagtgagcgccgcccaccgggccagatacttctggggcaatctgcctggcatgaacagacccctggccagcaccgtgaacgacaagctggagctgcaggagtgcctggagcacggccggatcgccaagttcagcaaggtgagaaccatcaccacccgaagcaacagcatcaaacaaggcaaggaccagcactttcctgtgttcatgaacgagaaggaggacatcctgtggtgtaccgagatggagagagtgttcgggttcccagtccactacacagatgtcagcaacatgtctagactggccagacagagactgctgggaagaagctggtccgtccctgtgatcagacacctgttcgcccctctgaaggagtacttcgcctgcgtgagcagcggcaacagcaacgccaacagccggggccccagcttctctagcggcctggtgccactgtccctgagagggagccacatgggccccatggagatctacaaaaccgtgagcgcctggaagcggcagcctgtgcgcgtgctgagcctgtttcggaatatcgataaagtcctgaaaagcctgggattcctggagagcggctctggctccggcggtggcaccctgaagtacgtggaggatgtgacaaacgtggtcagacgggatgtggagaagtggggccccttcgatctggtgtacggcagcacccaacccctgggcagctcttgtgaccggtgccctggctggtacatgtttcagttccaccggatcctgcagtacgccctgccgagacaggagtcccagcggccattcttttggattttcatggacaacttgctgctgaccgaggatgaccaggaaactaccactcggttcctgcagaccgaagccgtgaccctgcaggacgtgagaggccgggactaccagaacgccatgcgggtgtggtccaacatccctggactgaaaagcaagcacgcacctctgacccctaaagaagaggagtacctgcaggcccaggtgcggagcagaagcaagctggacgcccctaaggtggatctgctggtgaagaattgcctcctgcccctgagagagtacttcaagtatttcagccagaatagtctgcccctgggaggcagcggcggcggcttcgaggagctggtgaccttcgaggacgtgttcgtggacttcagccccgaggagctgagcagcctgagcgccgcccagaggaacctgtacagggaggtgatgctggagaactacaggaacctggtgagcctgggctaccagttcagcaagcccgacatcatcagcaggctggaggccgaggagagcagggccatggagaaggacagcaggcacaccgtgatctgccagggcgaggcccacgacggcggcccaagcagcggcgcccctcctcccagcggcggcagcccagccggctccccaacctctaccgaggagggcacctctgagtccgccacccccgagagcggccctggcacctccaccgagcccagcgagggcagcgcacccggcagccctgccggcagccccacctccacagaggagggaaccagcaccgagcccagcgaaggcagcgccccaggcaccagcaccgagcctagtgagcaggagattaaacggatcaacaagatcagaagaagacttgtgaaagacagcaacaccaagaaggccggcaagacaggccccatgaaaaccctgctggttagagtgatgacacccgatctgagagagcggctggaaaacctgagaaagaagcctgaaaatatcccccagcccatcagcaatacatctagagccaacctgaataagctgctgaccgattacaccgaaatgaagaaggcgatcctgcatgtgtactgggaagagttccagaaggaccctgtgggcctgatgagccgggtggcccagcctgccagcaagaagatcgatcagaacaagctgaaacctgagatggacgagaagggcaacctgaccaccgccggctttgcctgctctcagtgtggccagcccctgttcgtgtacaagctggagcaggtgtctgagaagggcaaggcttacaccaactacttcggacggtgcaatgtggccgagcacgaaaagctgatcctgctggcccagctgaagcccgagaaggatagcgacgaagccgtgacatatagcctgggaaagtttgggcagagggccctggatttctacagcattcatgtgaccaaggagtccacccaccccgtgaagcccctggcccagatcgccggaaacagatacgcctccggacctgtgggaaaggccctgagcgacgcatgtatgggcacaatcgcctccttcctgtctaagtaccaggacatcatcatcgaacaccagaaggtggtgaagggcaaccagaagagactggagagcctgcgggagctggccggcaaggaaaacctggaataccctagcgtgaccctgccacctcagcctcacaccaaggagggcgttgatgcctacaacgaagtgatcgcccgggtgcgaatgtgggtgaacctgaacctgtggcagaagctgaagctaagcagagatgatgccaagcctctgctgagactgaagggattcccttcctttcctctggtcgagagacaggccaacgaagtggactggtgggacatggtgtgtaacgtgaagaagctgatcaacgagaaaaaggaggatggcaaggtgttttggcagaatctggctggctacaagagacaggaagccctgagaccatacctgagcagcgaggaagatcggaagaagggaaagaaattcgctcggtaccagctgggcgacctgctgctgcacctggaaaagaagcacggcgaggactggggaaaggtgtacgacgaggcctgggagcggattgacaagaaagtggaaggcctgagcaagcacatcaagctggaagaggaacggagaagcgaggacgcccagagcaaggccgccctgaccgactggctgcgggctaaggccagcttcgtgatcgagggcctgaaggaggccgacaaggacgagttctgcagatgcgagctgaagctgcagaagtggtacggggacctgcggggaaagcccttcgccatcgaagccgagaacagcatcctggacatcagcggcttcagcaagcagtacaactgtgccttcatctggcagaaggacggcgtgaagaagctgaacctgtacctgatcatcaactacttcaagggcggcaagctgcggttcaagaagatcaaacctgaagccttcgaagccaacagattctacaccgtgatcaacaaaaagagcggcgagatcgtgcccatggaggtgaacttcaacttcgacgaccccaacctgatcatcctgcctctggcctttggcaagagacagggcagagaattcatctggaacgacctgctgtccctggaaaccggcagcctgaagctggccaacggaagagtgatcgagaagacactgtacaacagaagaacccggcaggatgagcctgccctgttcgtggccctgaccttcgagcggcgggaggtcctggactcctccaatatcaaaccaatgaacctgatcggcgtggcaagaggcgaaaacatccccgccgtgatcgccctgaccgaccccgagggctgcccactgagccggtttaaggatagcctgggaaacccaacccacatcctgagaatcggcgagagctataaggagaagcagcggaccatccaggccaagaaggaggtggagcagcggagagccggcggctacagccggaagtacgccagcaaagccaagaatctggcagacgatatggtgagaaacaccgctagagatctgctgtactacgccgtgacccaggatgccatgctgatcttcgccaacctgagccggggcttcggccggcagggcaagcggaccttcatggccgagagacagtacacacggatggaggactggctgaccgccaagctggcctacgagggcctgagcaagacctacctgtccaagacactggcccagtacacctccaagacatgcagcaactgtgggtttaccatcaccagcgccgactacgacagggtgctggagaagctgaagaagacagcaacaggctggatgaccacaattaacggcaaggagctgaaggtggagggccagattacctactacaacagatacaagagacagaacgtagtcaaggacctgtccgtcgagctggatagactgagcgaagaatctgtgaacaacgacatctcctcctggacaaagggcagaagcggagaagctctgagcctcctgaagaaaagattctcccatagacccgtgcaggagaagttcgtgtgcctgaactgcggcttcgagacacacgcagccgagcaagccgccctgaacatcgccagatcctggctgttcctgcggagccaggagtacaagaaataccagacaaacaagacaaccggcaacaccgataagagagccttcgtcgagacctggcagtccttttaccggaagaagcttaaggaggtgtggaaacctgccgtgcggtctggcggatctggcggaggctccaccagccccaagaaaaagagaaaagtctaagctgccttctgcggggcttgccttctggccatgcccttcttctctcccttgcacctgtacctcttggtctttgaataaagcctgagtaggaaggctagcaaaaaaaaaaaaaaaaaaaaaaaaaaaaaaaaaaaaaaaaaaaaaaaaaaaaaaaaaaaaaaaaaaaaaaaaaaaaaaaa

SEQ ID NO: 13142 - RNA, 5785 nt, synthetic construct
  source 1..5785: mol_type = other RNA
aggaaataagagagaaaagaagagtaagaagaaatataagagccaccatggcccctaagaagaagcgtaaagtgagccggatggaacgcctcgtctacgaggtgcggcagaagtgcagaaacatcgaggacatctgcatctcctgcggatctctgaacgtgaccctggagcacccactgttcatcggcggcatgtgccagaactgtaaaaactgttttctggagtgtgcctatcaatacgacgatgacggctaccagagctactgcaccatctgttgcggcggaagagaggtgctgatgtgtggaaataacaactgctgccggtgcttctgcgtggaatgcgtggacctgctggtgggccccggcgccgcccaggccgctattaaggaagatccttggaactgctacatgtgcggccacaagggcacatacggcctgctgagacggagagaggactggcctagcagactgcagatgttcttcgccaataaccacgaccaggagttcgacccccctaaggtgtaccctcccgtccccgccgagaagagaaagcccatccgggtcctgagcctgttcgatggcatcgccaccggtctgctggtgctgaaggacctgggcatccaggtggataggtacattgcctccgaggtgtgcgaggactccatcaccgtgggaatggtgcgtcatcagggcaagatcatgtacgtgggcgacgtgcggagcgtgacacagaagcatatccaggagtggggccctttcgacctggtgatcggcggcagcccttgcaatgacctgagcatcgtgaacccagcccggaagggcctgtacgagggaaccggcagactgttcttcgagttttacagactgctgcacgacgcccggcctaaggaaggcgacgaccggcccttcttttggctgttcgagaatgtggtggccatgggagtcagcgacaagcgggatattagccggttcctggagagcaaccccgtgatgatcgatgccaaggaagtgagcgccgcccaccgggccagatacttctggggcaatctgcctggcatgaacagacccctggccagcaccgtgaacgacaagctggagctgcaggagtgcctggagcacggccggatcgccaagttcagcaaggtgagaaccatcaccacccgaagcaacagcatcaaacaaggcaaggaccagcactttcctgtgttcatgaacgagaaggaggacatcctgtggtgtaccgagatggagagagtgttcgggttcccagtccactacacagatgtcagcaacatgtctagactggccagacagagactgctgggaagaagctggtccgtccctgtgatcagacacctgttcgcccctctgaaggagtacttcgcctgcgtgagcagcggcaacagcaacgccaacagccggggccccagcttctctagcggcctggtgccactgtccctgagagggagccacatgggccccatggagatctacaaaaccgtgagcgcctggaagcggcagcctgtgcgcgtgctgagcctgtttcggaatatcgataaagtcctgaaaagcctgggattcctggagagcggctctggctccggcggtggcaccctgaagtacgtggaggatgtgacaaacgtggtcagacgggatgtggagaagtggggccccttcgatctggtgtacggcagcacccaacccctgggcagctcttgtgaccggtgccctggctggtacatgtttcagttccaccggatcctgcagtacgccctgccgagacaggagtcccagcggccattcttttggattttcatggacaacttgctgctgaccgaggatgaccaggaaactaccactcggttcctgcagaccgaagccgtgaccctgcaggacgtgagaggccgggactaccagaacgccatgcgggtgtggtccaacatccctggactgaaaagcaagcacgcacctctgacccctaaagaagaggagtacctgcaggcccaggtgcggagcagaagcaagctggacgcccctaaggtggatctgctggtgaagaattgcctcctgcccctgagagagtacttcaagtatttcagccagaatagtctgcccctgggaggcagcggcggcggccagccccaggaggccctgaccttcaaggacgtggaggtgaccttcagccaggacgagtggggctggctggacgccagccagaggaacctgtacagggacgtgatgctggagaactacggcaacatcgccagcctgatgggccccttcaccaagcccgccctgatcagctggctggagaccagggagccctgggtgctgaacgtgcagggcgcccagcccgagggcaaccccggcgccgacgtgggcggcccaagcagcggcgcccctcctcccagcggcggcagcccagccggctccccaacctctaccgaggagggcacctctgagtccgccacccccgagagcggccctggcacctccaccgagcccagcgagggcagcgcacccggcagccctgccggcagccccacctccacagaggagggaaccagcaccgagcccagcgaaggcagcgccccaggcaccagcaccgagcctagtgagcaggagattaaacggatcaacaagatcagaagaagacttgtgaaagacagcaacaccaagaaggccggcaagacaggccccatgaaaaccctgctggttagagtgatgacacccgatctgagagagcggctggaaaacctgagaaagaagcctgaaaatatcccccagcccatcagcaatacatctagagccaacctgaataagctgctgaccgattacaccgaaatgaagaaggcgatcctgcatgtgtactgggaagagttccagaaggaccctgtgggcctgatgagccgggtggcccagcctgccagcaagaagatcgatcagaacaagctgaaacctgagatggacgagaagggcaacctgaccaccgccggctttgcctgctctcagtgtggccagcccctgttcgtgtacaagctggagcaggtgtctgagaagggcaaggcttacaccaactacttcggacggtgcaatgtggccgagcacgaaaagctgatcctgctggcccagctgaagcccgagaaggatagcgacgaagccgtgacatatagcctgggaaagtttgggcagagggccctggatttctacagcattcatgtgaccaaggagtccacccaccccgtgaagcccctggcccagatcgccggaaacagatacgcctccggacctgtgggaaaggccctgagcgacgcatgtatgggcacaatcgcctccttcctgtctaagtaccaggacatcatcatcgaacaccagaaggtggtgaagggcaaccagaagagactggagagcctgcgggagctggccggcaaggaaaacctggaataccctagcgtgaccctgccacctcagcctcacaccaaggagggcgttgatgcctacaacgaagtgatcgcccgggtgcgaatgtgggtgaacctgaacctgtggcagaagctgaagctaagcagagatgatgccaagcctctgctgagactgaagggattcccttcctttcctctggtcgagagacaggccaacgaagtggactggtgggacatggtgtgtaacgtgaagaagctgatcaacgagaaaaaggaggatggcaaggtgttttggcagaatctggctggctacaagagacaggaagccctgagaccatacctgagcagcgaggaagatcggaagaagggaaagaaattcgctcggtaccagctgggcgacctgctgctgcacctggaaaagaagcacggcgaggactggggaaaggtgtacgacgaggcctgggagcggattgacaagaaagtggaaggcctgagcaagcacatcaagctggaagaggaacggagaagcgaggacgcccagagcaaggccgccctgaccgactggctgcgggctaaggccagcttcgtgatcgagggcctgaaggaggccgacaaggacgagttctgcagatgcgagctgaagctgcagaagtggtacggggacctgcggggaaagcccttcgccatcgaagccgagaacagcatcctggacatcagcggcttcagcaagcagtacaactgtgccttcatctggcagaaggacggcgtgaagaagctgaacctgtacctgatcatcaactacttcaagggcggcaagctgcggttcaagaagatcaaacctgaagccttcgaagccaacagattctacaccgtgatcaacaaaaagagcggcgagatcgtgcccatggaggtgaacttcaacttcgacgaccccaacctgatcatcctgcctctggcctttggcaagagacagggcagagaattcatctggaacgacctgctgtccctggaaaccggcagcctgaagctggccaacggaagagtgatcgagaagacactgtacaacagaagaacccggcaggatgagcctgccctgttcgtggccctgaccttcgagcggcgggaggtcctggactcctccaatatcaaaccaatgaacctgatcggcgtggcaagaggcgaaaacatccccgccgtgatcgccctgaccgaccccgagggctgcccactgagccggtttaaggatagcctgggaaacccaacccacatcctgagaatcggcgagagctataaggagaagcagcggaccatccaggccaagaaggaggtggagcagcggagagccggcggctacagccggaagtacgccagcaaagccaagaatctggcagacgatatggtgagaaacaccgctagagatctgctgtactacgccgtgacccaggatgccatgctgatcttcgccaacctgagccggggcttcggccggcagggcaagcggaccttcatggccgagagacagtacacacggatggaggactggctgaccgccaagctggcctacgagggcctgagcaagacctacctgtccaagacactggcccagtacacctccaagacatgcagcaactgtgggtttaccatcaccagcgccgactacgacagggtgctggagaagctgaagaagacagcaacaggctggatgaccacaattaacggcaaggagctgaaggtggagggccagattacctactacaacagatacaagagacagaacgtagtcaaggacctgtccgtcgagctggatagactgagcgaagaatctgtgaacaacgacatctcctcctggacaaagggcagaagcggagaagctctgagcctcctgaagaaaagattctcccatagacccgtgcaggagaagttcgtgtgcctgaactgcggcttcgagacacacgcagccgagcaagccgccctgaacatcgccagatcctggctgttcctgcggagccaggagtacaagaaataccagacaaacaagacaaccggcaacaccgataagagagccttcgtcgagacctggcagtccttttaccggaagaagcttaaggaggtgtggaaacctgccgtgcggtctggcggatctggcggaggctccaccagccccaagaaaaagagaaaagtctaagctgccttctgcggggcttgccttctggccatgcccttcttctctcccttgcacctgtacctcttggtctttgaataaagcctgagtaggaaggctagcaaaaaaaaaaaaaaaaaaaaaaaaaaaaaaaaaaaaaaaaaaaaaaaaaaaaaaaaaaaaaaaaaaaaaaaaaaaaaaaa

SEQ ID NO: 13143 - RNA, 5785 nt, synthetic construct
  source 1..5785: mol_type = other RNA
aggaaataagagagaaaagaagagtaagaagaaatataagagccaccatggcccctaagaagaagcgtaaagtgagccggatggaacgcctcgtctacgaggtgcggcagaagtgcagaaacatcgaggacatctgcatctcctgcggatctctgaacgtgaccctggagcacccactgttcatcggcggcatgtgccagaactgtaaaaactgttttctggagtgtgcctatcaatacgacgatgacggctaccagagctactgcaccatctgttgcggcggaagagaggtgctgatgtgtggaaataacaactgctgccggtgcttctgcgtggaatgcgtggacctgctggtgggccccggcgccgcccaggccgctattaaggaagatccttggaactgctacatgtgcggccacaagggcacatacggcctgctgagacggagagaggactggcctagcagactgcagatgttcttcgccaataaccacgaccaggagttcgacccccctaaggtgtaccctcccgtccccgccgagaagagaaagcccatccgggtcctgagcctgttcgatggcatcgccaccggtctgctggtgctgaaggacctgggcatccaggtggataggtacattgcctccgaggtgtgcgaggactccatcaccgtgggaatggtgcgtcatcagggcaagatcatgtacgtgggcgacgtgcggagcgtgacacagaagcatatccaggagtggggccctttcgacctggtgatcggcggcagcccttgcaatgacctgagcatcgtgaacccagcccggaagggcctgtacgagggaaccggcagactgttcttcgagttttacagactgctgcacgacgcccggcctaaggaaggcgacgaccggcccttcttttggctgttcgagaatgtggtggccatgggagtcagcgacaagcgggatattagccggttcctggagagcaaccccgtgatgatcgatgccaaggaagtgagcgccgcccaccgggccagatacttctggggcaatctgcctggcatgaacagacccctggccagcaccgtgaacgacaagctggagctgcaggagtgcctggagcacggccggatcgccaagttcagcaaggtgagaaccatcaccacccgaagcaacagcatcaaacaaggcaaggaccagcactttcctgtgttcatgaacgagaaggaggacatcctgtggtgtaccgagatggagagagtgttcgggttcccagtccactacacagatgtcagcaacatgtctagactggccagacagagactgctgggaagaagctggtccgtccctgtgatcagacacctgttcgcccctctgaaggagtacttcgcctgcgtgagcagcggcaacagcaacgccaacagccggggccccagcttctctagcggcctggtgccactgtccctgagagggagccacatgggccccatggagatctacaaaaccgtgagcgcctggaagcggcagcctgtgcgcgtgctgagcctgtttcggaatatcgataaagtcctgaaaagcctgggattcctggagagcggctctggctccggcggtggcaccctgaagtacgtggaggatgtgacaaacgtggtcagacgggatgtggagaagtggggccccttcgatctggtgtacggcagcacccaacccctgggcagctcttgtgaccggtgccctggctggtacatgtttcagttccaccggatcctgcagtacgccctgccgagacaggagtcccagcggccattcttttggattttcatggacaacttgctgctgaccgaggatgaccaggaaactaccactcggttcctgcagaccgaagccgtgaccctgcaggacgtgagaggccgggactaccagaacgccatgcgggtgtggtccaacatccctggactgaaaagcaagcacgcacctctgacccctaaagaagaggagtacctgcaggcccaggtgcggagcagaagcaagctggacgcccctaaggtggatctgctggtgaagaattgcctcctgcccctgagagagtacttcaagtatttcagccagaatagtctgcccctgggaggcagcggcggcggcccccagaagagcgtgaccttcgaggacgtggccgtgtacttcacccagaccgagtgggacggcctgagccccgcccagagggccctgtacagggacgtgatgctggagaactacggcaacgtggccagcctgggcttccccctgctgaagcccaccgtgatcagccagctggagggcggcggcgagctggagggccccagccccctgaccagcggcaccggcaccggccaccagggcctgtggggcggcccaagcagcggcgcccctcctcccagcggcggcagcccagccggctccccaacctctaccgaggagggcacctctgagtccgccacccccgagagcggccctggcacctccaccgagcccagcgagggcagcgcacccggcagccctgccggcagccccacctccacagaggagggaaccagcaccgagcccagcgaaggcagcgccccaggcaccagcaccgagcctagtgagcaggagattaaacggatcaacaagatcagaagaagacttgtgaaagacagcaacaccaagaaggccggcaagacaggccccatgaaaaccctgctggttagagtgatgacacccgatctgagagagcggctggaaaacctgagaaagaagcctgaaaatatcccccagcccatcagcaatacatctagagccaacctgaataagctgctgaccgattacaccgaaatgaagaaggcgatcctgcatgtgtactgggaagagttccagaaggaccctgtgggcctgatgagccgggtggcccagcctgccagcaagaagatcgatcagaacaagctgaaacctgagatggacgagaagggcaacctgaccaccgccggctttgcctgctctcagtgtggccagcccctgttcgtgtacaagctggagcaggtgtctgagaagggcaaggcttacaccaactacttcggacggtgcaatgtggccgagcacgaaaagctgatcctgctggcccagctgaagcccgagaaggatagcgacgaagccgtgacatatagcctgggaaagtttgggcagagggccctggatttctacagcattcatgtgaccaaggagtccacccaccccgtgaagcccctggcccagatcgccggaaacagatacgcctccggacctgtgggaaaggccctgagcgacgcatgtatgggcacaatcgcctccttcctgtctaagtaccaggacatcatcatcgaacaccagaaggtggtgaagggcaaccagaagagactggagagcctgcgggagctggccggcaaggaaaacctggaataccctagcgtgaccctgccacctcagcctcacaccaaggagggcgttgatgcctacaacgaagtgatcgcccgggtgcgaatgtgggtgaacctgaacctgtggcagaagctgaagctaagcagagatgatgccaagcctctgctgagactgaagggattcccttcctttcctctggtcgagagacaggccaacgaagtggactggtgggacatggtgtgtaacgtgaagaagctgatcaacgagaaaaaggaggatggcaaggtgttttggcagaatctggctggctacaagagacaggaagccctgagaccatacctgagcagcgaggaagatcggaagaagggaaagaaattcgctcggtaccagctgggcgacctgctgctgcacctggaaaagaagcacggcgaggactggggaaaggtgtacgacgaggcctgggagcggattgacaagaaagtggaaggcctgagcaagcacatcaagctggaagaggaacggagaagcgaggacgcccagagcaaggccgccctgaccgactggctgcgggctaaggccagcttcgtgatcgagggcctgaaggaggccgacaaggacgagttctgcagatgcgagctgaagctgcagaagtggtacggggacctgcggggaaagcccttcgccatcgaagccgagaacagcatcctggacatcagcggcttcagcaagcagtacaactgtgccttcatctggcagaaggacggcgtgaagaagctgaacctgtacctgatcatcaactacttcaagggcggcaagctgcggttcaagaagatcaaacctgaagccttcgaagccaacagattctacaccgtgatcaacaaaaagagcggcgagatcgtgcccatggaggtgaacttcaacttcgacgaccccaacctgatcatcctgcctctggcctttggcaagagacagggcagagaattcatctggaacgacctgctgtccctggaaaccggcagcctgaagctggccaacggaagagtgatcgagaagacactgtacaacagaagaacccggcaggatgagcctgccctgttcgtggccctgaccttcgagcggcgggaggtcctggactcctccaatatcaaaccaatgaacctgatcggcgtggcaagaggcgaaaacatccccgccgtgatcgccctgaccgaccccgagggctgcccactgagccggtttaaggatagcctgggaaacccaacccacatcctgagaatcggcgagagctataaggagaagcagcggaccatccaggccaagaaggaggtggagcagcggagagccggcggctacagccggaagtacgccagcaaagccaagaatctggcagacgatatggtgagaaacaccgctagagatctgctgtactacgccgtgacccaggatgccatgctgatcttcgccaacctgagccggggcttcggccggcagggcaagcggaccttcatggccgagagacagtacacacggatggaggactggctgaccgccaagctggcctacgagggcctgagcaagacctacctgtccaagacactggcccagtacacctccaagacatgcagcaactgtgggtttaccatcaccagcgccgactacgacagggtgctggagaagctgaagaagacagcaacaggctggatgaccacaattaacggcaaggagctgaaggtggagggccagattacctactacaacagatacaagagacagaacgtagtcaaggacctgtccgtcgagctggatagactgagcgaagaatctgtgaacaacgacatctcctcctggacaaagggcagaagcggagaagctctgagcctcctgaagaaaagattctcccatagacccgtgcaggagaagttcgtgtgcctgaactgcggcttcgagacacacgcagccgagcaagccgccctgaacatcgccagatcctggctgttcctgcggagccaggagtacaagaaataccagacaaacaagacaaccggcaacaccgataagagagccttcgtcgagacctggcagtccttttaccggaagaagcttaaggaggtgtggaaacctgccgtgcggtctggcggatctggcggaggctccaccagccccaagaaaaagagaaaagtctaagctgccttctgcggggcttgccttctggccatgcccttcttctctcccttgcacctgtacctcttggtctttgaataaagcctgagtaggaaggctagcaaaaaaaaaaaaaaaaaaaaaaaaaaaaaaaaaaaaaaaaaaaaaaaaaaaaaaaaaaaaaaaaaaaaaaaaaaaaaaaa

SEQ ID NO: 13144 - RNA, 5785 nt, synthetic construct
  source 1..5785: mol_type = other RNA
aggaaataagagagaaaagaagagtaagaagaaatataagagccaccatggcccctaagaagaagcgtaaagtgagccggatggaacgcctcgtctacgaggtgcggcagaagtgcagaaacatcgaggacatctgcatctcctgcggatctctgaacgtgaccctggagcacccactgttcatcggcggcatgtgccagaactgtaaaaactgttttctggagtgtgcctatcaatacgacgatgacggctaccagagctactgcaccatctgttgcggcggaagagaggtgctgatgtgtggaaataacaactgctgccggtgcttctgcgtggaatgcgtggacctgctggtgggccccggcgccgcccaggccgctattaaggaagatccttggaactgctacatgtgcggccacaagggcacatacggcctgctgagacggagagaggactggcctagcagactgcagatgttcttcgccaataaccacgaccaggagttcgacccccctaaggtgtaccctcccgtccccgccgagaagagaaagcccatccgggtcctgagcctgttcgatggcatcgccaccggtctgctggtgctgaaggacctgggcatccaggtggataggtacattgcctccgaggtgtgcgaggactccatcaccgtgggaatggtgcgtcatcagggcaagatcatgtacgtgggcgacgtgcggagcgtgacacagaagcatatccaggagtggggccctttcgacctggtgatcggcggcagcccttgcaatgacctgagcatcgtgaacccagcccggaagggcctgtacgagggaaccggcagactgttcttcgagttttacagactgctgcacgacgcccggcctaaggaaggcgacgaccggcccttcttttggctgttcgagaatgtggtggccatgggagtcagcgacaagcgggatattagccggttcctggagagcaaccccgtgatgatcgatgccaaggaagtgagcgccgcccaccgggccagatacttctggggcaatctgcctggcatgaacagacccctggccagcaccgtgaacgacaagctggagctgcaggagtgcctggagcacggccggatcgccaagttcagcaaggtgagaaccatcaccacccgaagcaacagcatcaaacaaggcaaggaccagcactttcctgtgttcatgaacgagaaggaggacatcctgtggtgtaccgagatggagagagtgttcgggttcccagtccactacacagatgtcagcaacatgtctagactggccagacagagactgctgggaagaagctggtccgtccctgtgatcagacacctgttcgcccctctgaaggagtacttcgcctgcgtgagcagcggcaacagcaacgccaacagccggggccccagcttctctagcggcctggtgccactgtccctgagagggagccacatgggccccatggagatctacaaaaccgtgagcgcctggaagcggcagcctgtgcgcgtgctgagcctgtttcggaatatcgataaagtcctgaaaagcctgggattcctggagagcggctctggctccggcggtggcaccctgaagtacgtggaggatgtgacaaacgtggtcagacgggatgtggagaagtggggccccttcgatctggtgtacggcagcacccaacccctgggcagctcttgtgaccggtgccctggctggtacatgtttcagttccaccggatcctgcagtacgccctgccgagacaggagtcccagcggccattcttttggattttcatggacaacttgctgctgaccgaggatgaccaggaaactaccactcggttcctgcagaccgaagccgtgaccctgcaggacgtgagaggccgggactaccagaacgccatgcgggtgtggtccaacatccctggactgaaaagcaagcacgcacctctgacccctaaagaagaggagtacctgcaggcccaggtgcggagcagaagcaagctggacgcccctaaggtggatctgctggtgaagaattgcctcctgcccctgagagagtacttcaagtatttcagccagaatagtctgcccctgggaggcagcggcggcggcagccagatccccctgaccttccaggacgtggccgtggacttcacctgggaggagtggggcctgctggagcccagccagaaggacatgtactgggacgtgatgctggagaactacgagaacttcgtgagcctgggcggcctgcccatctgcctgcccgacgtgatcagcaggatggagaggatcgaggccccctggatggccgagggcggcgtgctggtgagcaccttcctgggcagcctgagcggcggcccaagcagcggcgcccctcctcccagcggcggcagcccagccggctccccaacctctaccgaggagggcacctctgagtccgccacccccgagagcggccctggcacctccaccgagcccagcgagggcagcgcacccggcagccctgccggcagccccacctccacagaggagggaaccagcaccgagcccagcgaaggcagcgccccaggcaccagcaccgagcctagtgagcaggagattaaacggatcaacaagatcagaagaagacttgtgaaagacagcaacaccaagaaggccggcaagacaggccccatgaaaaccctgctggttagagtgatgacacccgatctgagagagcggctggaaaacctgagaaagaagcctgaaaatatcccccagcccatcagcaatacatctagagccaacctgaataagctgctgaccgattacaccgaaatgaagaaggcgatcctgcatgtgtactgggaagagttccagaaggaccctgtgggcctgatgagccgggtggcccagcctgccagcaagaagatcgatcagaacaagctgaaacctgagatggacgagaagggcaacctgaccaccgccggctttgcctgctctcagtgtggccagcccctgttcgtgtacaagctggagcaggtgtctgagaagggcaaggcttacaccaactacttcggacggtgcaatgtggccgagcacgaaaagctgatcctgctggcccagctgaagcccgagaaggatagcgacgaagccgtgacatatagcctgggaaagtttgggcagagggccctggatttctacagcattcatgtgaccaaggagtccacccaccccgtgaagcccctggcccagatcgccggaaacagatacgcctccggacctgtgggaaaggccctgagcgacgcatgtatgggcacaatcgcctccttcctgtctaagtaccaggacatcatcatcgaacaccagaaggtggtgaagggcaaccagaagagactggagagcctgcgggagctggccggcaaggaaaacctggaataccctagcgtgaccctgccacctcagcctcacaccaaggagggcgttgatgcctacaacgaagtgatcgcccgggtgcgaatgtgggtgaacctgaacctgtggcagaagctgaagctaagcagagatgatgccaagcctctgctgagactgaagggattcccttcctttcctctggtcgagagacaggccaacgaagtggactggtgggacatggtgtgtaacgtgaagaagctgatcaacgagaaaaaggaggatggcaaggtgttttggcagaatctggctggctacaagagacaggaagccctgagaccatacctgagcagcgaggaagatcggaagaagggaaagaaattcgctcggtaccagctgggcgacctgctgctgcacctggaaaagaagcacggcgaggactggggaaaggtgtacgacgaggcctgggagcggattgacaagaaagtggaaggcctgagcaagcacatcaagctggaagaggaacggagaagcgaggacgcccagagcaaggccgccctgaccgactggctgcgggctaaggccagcttcgtgatcgagggcctgaaggaggccgacaaggacgagttctgcagatgcgagctgaagctgcagaagtggtacggggacctgcggggaaagcccttcgccatcgaagccgagaacagcatcctggacatcagcggcttcagcaagcagtacaactgtgccttcatctggcagaaggacggcgtgaagaagctgaacctgtacctgatcatcaactacttcaagggcggcaagctgcggttcaagaagatcaaacctgaagccttcgaagccaacagattctacaccgtgatcaacaaaaagagcggcgagatcgtgcccatggaggtgaacttcaacttcgacgaccccaacctgatcatcctgcctctggcctttggcaagagacagggcagagaattcatctggaacgacctgctgtccctggaaaccggcagcctgaagctggccaacggaagagtgatcgagaagacactgtacaacagaagaacccggcaggatgagcctgccctgttcgtggccctgaccttcgagcggcgggaggtcctggactcctccaatatcaaaccaatgaacctgatcggcgtggcaagaggcgaaaacatccccgccgtgatcgccctgaccgaccccgagggctgcccactgagccggtttaaggatagcctgggaaacccaacccacatcctgagaatcggcgagagctataaggagaagcagcggaccatccaggccaagaaggaggtggagcagcggagagccggcggctacagccggaagtacgccagcaaagccaagaatctggcagacgatatggtgagaaacaccgctagagatctgctgtactacgccgtgacccaggatgccatgctgatcttcgccaacctgagccggggcttcggccggcagggcaagcggaccttcatggccgagagacagtacacacggatggaggactggctgaccgccaagctggcctacgagggcctgagcaagacctacctgtccaagacactggcccagtacacctccaagacatgcagcaactgtgggtttaccatcaccagcgccgactacgacagggtgctggagaagctgaagaagacagcaacaggctggatgaccacaattaacggcaaggagctgaaggtggagggccagattacctactacaacagatacaagagacagaacgtagtcaaggacctgtccgtcgagctggatagactgagcgaagaatctgtgaacaacgacatctcctcctggacaaagggcagaagcggagaagctctgagcctcctgaagaaaagattctcccatagacccgtgcaggagaagttcgtgtgcctgaactgcggcttcgagacacacgcagccgagcaagccgccctgaacatcgccagatcctggctgttcctgcggagccaggagtacaagaaataccagacaaacaagacaaccggcaacaccgataagagagccttcgtcgagacctggcagtccttttaccggaagaagcttaaggaggtgtggaaacctgccgtgcggtctggcggatctggcggaggctccaccagccccaagaaaaagagaaaagtctaagctgccttctgcggggcttgccttctggccatgcccttcttctctcccttgcacctgtacctcttggtctttgaataaagcctgagtaggaaggctagcaaaaaaaaaaaaaaaaaaaaaaaaaaaaaaaaaaaaaaaaaaaaaaaaaaaaaaaaaaaaaaaaaaaaaaaaaaaaaaaa

SEQ ID NO: 13145 - RNA, 5785 nt, synthetic construct
  source 1..5785: mol_type = other RNA
aggaaataagagagaaaagaagagtaagaagaaatataagagccaccatggcccctaagaagaagcgtaaagtgagccggatggaacgcctcgtctacgaggtgcggcagaagtgcagaaacatcgaggacatctgcatctcctgcggatctctgaacgtgaccctggagcacccactgttcatcggcggcatgtgccagaactgtaaaaactgttttctggagtgtgcctatcaatacgacgatgacggctaccagagctactgcaccatctgttgcggcggaagagaggtgctgatgtgtggaaataacaactgctgccggtgcttctgcgtggaatgcgtggacctgctggtgggccccggcgccgcccaggccgctattaaggaagatccttggaactgctacatgtgcggccacaagggcacatacggcctgctgagacggagagaggactggcctagcagactgcagatgttcttcgccaataaccacgaccaggagttcgacccccctaaggtgtaccctcccgtccccgccgagaagagaaagcccatccgggtcctgagcctgttcgatggcatcgccaccggtctgctggtgctgaaggacctgggcatccaggtggataggtacattgcctccgaggtgtgcgaggactccatcaccgtgggaatggtgcgtcatcagggcaagatcatgtacgtgggcgacgtgcggagcgtgacacagaagcatatccaggagtggggccctttcgacctggtgatcggcggcagcccttgcaatgacctgagcatcgtgaacccagcccggaagggcctgtacgagggaaccggcagactgttcttcgagttttacagactgctgcacgacgcccggcctaaggaaggcgacgaccggcccttcttttggctgttcgagaatgtggtggccatgggagtcagcgacaagcgggatattagccggttcctggagagcaaccccgtgatgatcgatgccaaggaagtgagcgccgcccaccgggccagatacttctggggcaatctgcctggcatgaacagacccctggccagcaccgtgaacgacaagctggagctgcaggagtgcctggagcacggccggatcgccaagttcagcaaggtgagaaccatcaccacccgaagcaacagcatcaaacaaggcaaggaccagcactttcctgtgttcatgaacgagaaggaggacatcctgtggtgtaccgagatggagagagtgttcgggttcccagtccactacacagatgtcagcaacatgtctagactggccagacagagactgctgggaagaagctggtccgtccctgtgatcagacacctgttcgcccctctgaaggagtacttcgcctgcgtgagcagcggcaacagcaacgccaacagccggggccccagcttctctagcggcctggtgccactgtccctgagagggagccacatgggccccatggagatctacaaaaccgtgagcgcctggaagcggcagcctgtgcgcgtgctgagcctgtttcggaatatcgataaagtcctgaaaagcctgggattcctggagagcggctctggctccggcggtggcaccctgaagtacgtggaggatgtgacaaacgtggtcagacgggatgtggagaagtggggccccttcgatctggtgtacggcagcacccaacccctgggcagctcttgtgaccggtgccctggctggtacatgtttcagttccaccggatcctgcagtacgccctgccgagacaggagtcccagcggccattcttttggattttcatggacaacttgctgctgaccgaggatgaccaggaaactaccactcggttcctgcagaccgaagccgtgaccctgcaggacgtgagaggccgggactaccagaacgccatgcgggtgtggtccaacatccctggactgaaaagcaagcacgcacctctgacccctaaagaagaggagtacctgcaggcccaggtgcggagcagaagcaagctggacgcccctaaggtggatctgctggtgaagaattgcctcctgcccctgagagagtacttcaagtatttcagccagaatagtctgcccctgggaggcagcggcggcggctgccaggagctggtgaccttcgaggacgtggccgtgtacttcagcctggaggagtgggagaggctggaggccgaccagaggggcctgtaccaggaggtgatgcaggagaactacggcatcctggtgagcctgggctaccccatccccaagcccgacctgatcttcaggctggagcagggcgaggagccctgggtgcccgacagccccaggcccgaggagggcgacatcgtgaccggcgtgtacggcggcccaagcagcggcgcccctcctcccagcggcggcagcccagccggctccccaacctctaccgaggagggcacctctgagtccgccacccccgagagcggccctggcacctccaccgagcccagcgagggcagcgcacccggcagccctgccggcagccccacctccacagaggagggaaccagcaccgagcccagcgaaggcagcgccccaggcaccagcaccgagcctagtgagcaggagattaaacggatcaacaagatcagaagaagacttgtgaaagacagcaacaccaagaaggccggcaagacaggccccatgaaaaccctgctggttagagtgatgacacccgatctgagagagcggctggaaaacctgagaaagaagcctgaaaatatcccccagcccatcagcaatacatctagagccaacctgaataagctgctgaccgattacaccgaaatgaagaaggcgatcctgcatgtgtactgggaagagttccagaaggaccctgtgggcctgatgagccgggtggcccagcctgccagcaagaagatcgatcagaacaagctgaaacctgagatggacgagaagggcaacctgaccaccgccggctttgcctgctctcagtgtggccagcccctgttcgtgtacaagctggagcaggtgtctgagaagggcaaggcttacaccaactacttcggacggtgcaatgtggccgagcacgaaaagctgatcctgctggcccagctgaagcccgagaaggatagcgacgaagccgtgacatatagcctgggaaagtttgggcagagggccctggatttctacagcattcatgtgaccaaggagtccacccaccccgtgaagcccctggcccagatcgccggaaacagatacgcctccggacctgtgggaaaggccctgagcgacgcatgtatgggcacaatcgcctccttcctgtctaagtaccaggacatcatcatcgaacaccagaaggtggtgaagggcaaccagaagagactggagagcctgcgggagctggccggcaaggaaaacctggaataccctagcgtgaccctgccacctcagcctcacaccaaggagggcgttgatgcctacaacgaagtgatcgcccgggtgcgaatgtgggtgaacctgaacctgtggcagaagctgaagctaagcagagatgatgccaagcctctgctgagactgaagggattcccttcctttcctctggtcgagagacaggccaacgaagtggactggtgggacatggtgtgtaacgtgaagaagctgatcaacgagaaaaaggaggatggcaaggtgttttggcagaatctggctggctacaagagacaggaagccctgagaccatacctgagcagcgaggaagatcggaagaagggaaagaaattcgctcggtaccagctgggcgacctgctgctgcacctggaaaagaagcacggcgaggactggggaaaggtgtacgacgaggcctgggagcggattgacaagaaagtggaaggcctgagcaagcacatcaagctggaagaggaacggagaagcgaggacgcccagagcaaggccgccctgaccgactggctgcgggctaaggccagcttcgtgatcgagggcctgaaggaggccgacaaggacgagttctgcagatgcgagctgaagctgcagaagtggtacggggacctgcggggaaagcccttcgccatcgaagccgagaacagcatcctggacatcagcggcttcagcaagcagtacaactgtgccttcatctggcagaaggacggcgtgaagaagctgaacctgtacctgatcatcaactacttcaagggcggcaagctgcggttcaagaagatcaaacctgaagccttcgaagccaacagattctacaccgtgatcaacaaaaagagcggcgagatcgtgcccatggaggtgaacttcaacttcgacgaccccaacctgatcatcctgcctctggcctttggcaagagacagggcagagaattcatctggaacgacctgctgtccctggaaaccggcagcctgaagctggccaacggaagagtgatcgagaagacactgtacaacagaagaacccggcaggatgagcctgccctgttcgtggccctgaccttcgagcggcgggaggtcctggactcctccaatatcaaaccaatgaacctgatcggcgtggcaagaggcgaaaacatccccgccgtgatcgccctgaccgaccccgagggctgcccactgagccggtttaaggatagcctgggaaacccaacccacatcctgagaatcggcgagagctataaggagaagcagcggaccatccaggccaagaaggaggtggagcagcggagagccggcggctacagccggaagtacgccagcaaagccaagaatctggcagacgatatggtgagaaacaccgctagagatctgctgtactacgccgtgacccaggatgccatgctgatcttcgccaacctgagccggggcttcggccggcagggcaagcggaccttcatggccgagagacagtacacacggatggaggactggctgaccgccaagctggcctacgagggcctgagcaagacctacctgtccaagacactggcccagtacacctccaagacatgcagcaactgtgggtttaccatcaccagcgccgactacgacagggtgctggagaagctgaagaagacagcaacaggctggatgaccacaattaacggcaaggagctgaaggtggagggccagattacctactacaacagatacaagagacagaacgtagtcaaggacctgtccgtcgagctggatagactgagcgaagaatctgtgaacaacgacatctcctcctggacaaagggcagaagcggagaagctctgagcctcctgaagaaaagattctcccatagacccgtgcaggagaagttcgtgtgcctgaactgcggcttcgagacacacgcagccgagcaagccgccctgaacatcgccagatcctggctgttcctgcggagccaggagtacaagaaataccagacaaacaagacaaccggcaacaccgataagagagccttcgtcgagacctggcagtccttttaccggaagaagcttaaggaggtgtggaaacctgccgtgcggtctggcggatctggcggaggctccaccagccccaagaaaaagagaaaagtctaagctgccttctgcggggcttgccttctggccatgcccttcttctctcccttgcacctgtacctcttggtctttgaataaagcctgagtaggaaggctagcaaaaaaaaaaaaaaaaaaaaaaaaaaaaaaaaaaaaaaaaaaaaaaaaaaaaaaaaaaaaaaaaaaaaaaaaaaaaaaaa

SEQ ID NO: 13146 - RNA, 5785 nt, synthetic construct
  source 1..5785: mol_type = other RNA
aggaaataagagagaaaagaagagtaagaagaaatataagagccaccatggcccctaagaagaagcgtaaagtgagccggatggaacgcctcgtctacgaggtgcggcagaagtgcagaaacatcgaggacatctgcatctcctgcggatctctgaacgtgaccctggagcacccactgttcatcggcggcatgtgccagaactgtaaaaactgttttctggagtgtgcctatcaatacgacgatgacggctaccagagctactgcaccatctgttgcggcggaagagaggtgctgatgtgtggaaataacaactgctgccggtgcttctgcgtggaatgcgtggacctgctggtgggccccggcgccgcccaggccgctattaaggaagatccttggaactgctacatgtgcggccacaagggcacatacggcctgctgagacggagagaggactggcctagcagactgcagatgttcttcgccaataaccacgaccaggagttcgacccccctaaggtgtaccctcccgtccccgccgagaagagaaagcccatccgggtcctgagcctgttcgatggcatcgccaccggtctgctggtgctgaaggacctgggcatccaggtggataggtacattgcctccgaggtgtgcgaggactccatcaccgtgggaatggtgcgtcatcagggcaagatcatgtacgtgggcgacgtgcggagcgtgacacagaagcatatccaggagtggggccctttcgacctggtgatcggcggcagcccttgcaatgacctgagcatcgtgaacccagcccggaagggcctgtacgagggaaccggcagactgttcttcgagttttacagactgctgcacgacgcccggcctaaggaaggcgacgaccggcccttcttttggctgttcgagaatgtggtggccatgggagtcagcgacaagcgggatattagccggttcctggagagcaaccccgtgatgatcgatgccaaggaagtgagcgccgcccaccgggccagatacttctggggcaatctgcctggcatgaacagacccctggccagcaccgtgaacgacaagctggagctgcaggagtgcctggagcacggccggatcgccaagttcagcaaggtgagaaccatcaccacccgaagcaacagcatcaaacaaggcaaggaccagcactttcctgtgttcatgaacgagaaggaggacatcctgtggtgtaccgagatggagagagtgttcgggttcccagtccactacacagatgtcagcaacatgtctagactggccagacagagactgctgggaagaagctggtccgtccctgtgatcagacacctgttcgcccctctgaaggagtacttcgcctgcgtgagcagcggcaacagcaacgccaacagccggggccccagcttctctagcggcctggtgccactgtccctgagagggagccacatgggccccatggagatctacaaaaccgtgagcgcctggaagcggcagcctgtgcgcgtgctgagcctgtttcggaatatcgataaagtcctgaaaagcctgggattcctggagagcggctctggctccggcggtggcaccctgaagtacgtggaggatgtgacaaacgtggtcagacgggatgtggagaagtggggccccttcgatctggtgtacggcagcacccaacccctgggcagctcttgtgaccggtgccctggctggtacatgtttcagttccaccggatcctgcagtacgccctgccgagacaggagtcccagcggccattcttttggattttcatggacaacttgctgctgaccgaggatgaccaggaaactaccactcggttcctgcagaccgaagccgtgaccctgcaggacgtgagaggccgggactaccagaacgccatgcgggtgtggtccaacatccctggactgaaaagcaagcacgcacctctgacccctaaagaagaggagtacctgcaggcccaggtgcggagcagaagcaagctggacgcccctaaggtggatctgctggtgaagaattgcctcctgcccctgagagagtacttcaagtatttcagccagaatagtctgcccctgggaggcagcggcggcggcatgagccagggcctggtgaccttcagggacgtggccatcgacttcagccaggaggagtggaagtggctgcagcccgcccagagggacctgtacaggtgcgtgatgctggagaactacggccacctggtgagcctgggcctgagcatcagcaagcccgacgtggtgagcctgctggagcagggcaaggagccctggctgggcaagagggaggtgaagagggacctgttcagcgtgagcgagagcggcggcccaagcagcggcgcccctcctcccagcggcggcagcccagccggctccccaacctctaccgaggagggcacctctgagtccgccacccccgagagcggccctggcacctccaccgagcccagcgagggcagcgcacccggcagccctgccggcagccccacctccacagaggagggaaccagcaccgagcccagcgaaggcagcgccccaggcaccagcaccgagcctagtgagcaggagattaaacggatcaacaagatcagaagaagacttgtgaaagacagcaacaccaagaaggccggcaagacaggccccatgaaaaccctgctggttagagtgatgacacccgatctgagagagcggctggaaaacctgagaaagaagcctgaaaatatcccccagcccatcagcaatacatctagagccaacctgaataagctgctgaccgattacaccgaaatgaagaaggcgatcctgcatgtgtactgggaagagttccagaaggaccctgtgggcctgatgagccgggtggcccagcctgccagcaagaagatcgatcagaacaagctgaaacctgagatggacgagaagggcaacctgaccaccgccggctttgcctgctctcagtgtggccagcccctgttcgtgtacaagctggagcaggtgtctgagaagggcaaggcttacaccaactacttcggacggtgcaatgtggccgagcacgaaaagctgatcctgctggcccagctgaagcccgagaaggatagcgacgaagccgtgacatatagcctgggaaagtttgggcagagggccctggatttctacagcattcatgtgaccaaggagtccacccaccccgtgaagcccctggcccagatcgccggaaacagatacgcctccggacctgtgggaaaggccctgagcgacgcatgtatgggcacaatcgcctccttcctgtctaagtaccaggacatcatcatcgaacaccagaaggtggtgaagggcaaccagaagagactggagagcctgcgggagctggccggcaaggaaaacctggaataccctagcgtgaccctgccacctcagcctcacaccaaggagggcgttgatgcctacaacgaagtgatcgcccgggtgcgaatgtgggtgaacctgaacctgtggcagaagctgaagctaagcagagatgatgccaagcctctgctgagactgaagggattcccttcctttcctctggtcgagagacaggccaacgaagtggactggtgggacatggtgtgtaacgtgaagaagctgatcaacgagaaaaaggaggatggcaaggtgttttggcagaatctggctggctacaagagacaggaagccctgagaccatacctgagcagcgaggaagatcggaagaagggaaagaaattcgctcggtaccagctgggcgacctgctgctgcacctggaaaagaagcacggcgaggactggggaaaggtgtacgacgaggcctgggagcggattgacaagaaagtggaaggcctgagcaagcacatcaagctggaagaggaacggagaagcgaggacgcccagagcaaggccgccctgaccgactggctgcgggctaaggccagcttcgtgatcgagggcctgaaggaggccgacaaggacgagttctgcagatgcgagctgaagctgcagaagtggtacggggacctgcggggaaagcccttcgccatcgaagccgagaacagcatcctggacatcagcggcttcagcaagcagtacaactgtgccttcatctggcagaaggacggcgtgaagaagctgaacctgtacctgatcatcaactacttcaagggcggcaagctgcggttcaagaagatcaaacctgaagccttcgaagccaacagattctacaccgtgatcaacaaaaagagcggcgagatcgtgcccatggaggtgaacttcaacttcgacgaccccaacctgatcatcctgcctctggcctttggcaagagacagggcagagaattcatctggaacgacctgctgtccctggaaaccggcagcctgaagctggccaacggaagagtgatcgagaagacactgtacaacagaagaacccggcaggatgagcctgccctgttcgtggccctgaccttcgagcggcgggaggtcctggactcctccaatatcaaaccaatgaacctgatcggcgtggcaagaggcgaaaacatccccgccgtgatcgccctgaccgaccccgagggctgcccactgagccggtttaaggatagcctgggaaacccaacccacatcctgagaatcggcgagagctataaggagaagcagcggaccatccaggccaagaaggaggtggagcagcggagagccggcggctacagccggaagtacgccagcaaagccaagaatctggcagacgatatggtgagaaacaccgctagagatctgctgtactacgccgtgacccaggatgccatgctgatcttcgccaacctgagccggggcttcggccggcagggcaagcggaccttcatggccgagagacagtacacacggatggaggactggctgaccgccaagctggcctacgagggcctgagcaagacctacctgtccaagacactggcccagtacacctccaagacatgcagcaactgtgggtttaccatcaccagcgccgactacgacagggtgctggagaagctgaagaagacagcaacaggctggatgaccacaattaacggcaaggagctgaaggtggagggccagattacctactacaacagatacaagagacagaacgtagtcaaggacctgtccgtcgagctggatagactgagcgaagaatctgtgaacaacgacatctcctcctggacaaagggcagaagcggagaagctctgagcctcctgaagaaaagattctcccatagacccgtgcaggagaagttcgtgtgcctgaactgcggcttcgagacacacgcagccgagcaagccgccctgaacatcgccagatcctggctgttcctgcggagccaggagtacaagaaataccagacaaacaagacaaccggcaacaccgataagagagccttcgtcgagacctggcagtccttttaccggaagaagcttaaggaggtgtggaaacctgccgtgcggtctggcggatctggcggaggctccaccagccccaagaaaaagagaaaagtctaagctgccttctgcggggcttgccttctggccatgcccttcttctctcccttgcacctgtacctcttggtctttgaataaagcctgagtaggaaggctagcaaaaaaaaaaaaaaaaaaaaaaaaaaaaaaaaaaaaaaaaaaaaaaaaaaaaaaaaaaaaaaaaaaaaaaaaaaaaaaaa

SEQ ID NO: 13147 - RNA, 5785 nt, synthetic construct
  source 1..5785: mol_type = other RNA
aggaaataagagagaaaagaagagtaagaagaaatataagagccaccatggcccctaagaagaagcgtaaagtgagccggatggaacgcctcgtctacgaggtgcggcagaagtgcagaaacatcgaggacatctgcatctcctgcggatctctgaacgtgaccctggagcacccactgttcatcggcggcatgtgccagaactgtaaaaactgttttctggagtgtgcctatcaatacgacgatgacggctaccagagctactgcaccatctgttgcggcggaagagaggtgctgatgtgtggaaataacaactgctgccggtgcttctgcgtggaatgcgtggacctgctggtgggccccggcgccgcccaggccgctattaaggaagatccttggaactgctacatgtgcggccacaagggcacatacggcctgctgagacggagagaggactggcctagcagactgcagatgttcttcgccaataaccacgaccaggagttcgacccccctaaggtgtaccctcccgtccccgccgagaagagaaagcccatccgggtcctgagcctgttcgatggcatcgccaccggtctgctggtgctgaaggacctgggcatccaggtggataggtacattgcctccgaggtgtgcgaggactccatcaccgtgggaatggtgcgtcatcagggcaagatcatgtacgtgggcgacgtgcggagcgtgacacagaagcatatccaggagtggggccctttcgacctggtgatcggcggcagcccttgcaatgacctgagcatcgtgaacccagcccggaagggcctgtacgagggaaccggcagactgttcttcgagttttacagactgctgcacgacgcccggcctaaggaaggcgacgaccggcccttcttttggctgttcgagaatgtggtggccatgggagtcagcgacaagcgggatattagccggttcctggagagcaaccccgtgatgatcgatgccaaggaagtgagcgccgcccaccgggccagatacttctggggcaatctgcctggcatgaacagacccctggccagcaccgtgaacgacaagctggagctgcaggagtgcctggagcacggccggatcgccaagttcagcaaggtgagaaccatcaccacccgaagcaacagcatcaaacaaggcaaggaccagcactttcctgtgttcatgaacgagaaggaggacatcctgtggtgtaccgagatggagagagtgttcgggttcccagtccactacacagatgtcagcaacatgtctagactggccagacagagactgctgggaagaagctggtccgtccctgtgatcagacacctgttcgcccctctgaaggagtacttcgcctgcgtgagcagcggcaacagcaacgccaacagccggggccccagcttctctagcggcctggtgccactgtccctgagagggagccacatgggccccatggagatctacaaaaccgtgagcgcctggaagcggcagcctgtgcgcgtgctgagcctgtttcggaatatcgataaagtcctgaaaagcctgggattcctggagagcggctctggctccggcggtggcaccctgaagtacgtggaggatgtgacaaacgtggtcagacgggatgtggagaagtggggccccttcgatctggtgtacggcagcacccaacccctgggcagctcttgtgaccggtgccctggctggtacatgtttcagttccaccggatcctgcagtacgccctgccgagacaggagtcccagcggccattcttttggattttcatggacaacttgctgctgaccgaggatgaccaggaaactaccactcggttcctgcagaccgaagccgtgaccctgcaggacgtgagaggccgggactaccagaacgccatgcgggtgtggtccaacatccctggactgaaaagcaagcacgcacctctgacccctaaagaagaggagtacctgcaggcccaggtgcggagcagaagcaagctggacgcccctaaggtggatctgctggtgaagaattgcctcctgcccctgagagagtacttcaagtatttcagccagaatagtctgcccctgggaggcagcggcggcggcagccaggagcccgtgaccttcgccgacgtggccgtggtgttcacccccgaggagtgggtgttcctggacagcacccagaggagcctgtacagggacgtgatgctggagaactacaggaacctggccagcgtggccgaccagctgtgcaagcccaacgccctgagctacctggaggagaggggcgagcagtggaccaccgacaggggcatcctgagcgacacctgcgccgagccccagtgccagggcggcccaagcagcggcgcccctcctcccagcggcggcagcccagccggctccccaacctctaccgaggagggcacctctgagtccgccacccccgagagcggccctggcacctccaccgagcccagcgagggcagcgcacccggcagccctgccggcagccccacctccacagaggagggaaccagcaccgagcccagcgaaggcagcgccccaggcaccagcaccgagcctagtgagcaggagattaaacggatcaacaagatcagaagaagacttgtgaaagacagcaacaccaagaaggccggcaagacaggccccatgaaaaccctgctggttagagtgatgacacccgatctgagagagcggctggaaaacctgagaaagaagcctgaaaatatcccccagcccatcagcaatacatctagagccaacctgaataagctgctgaccgattacaccgaaatgaagaaggcgatcctgcatgtgtactgggaagagttccagaaggaccctgtgggcctgatgagccgggtggcccagcctgccagcaagaagatcgatcagaacaagctgaaacctgagatggacgagaagggcaacctgaccaccgccggctttgcctgctctcagtgtggccagcccctgttcgtgtacaagctggagcaggtgtctgagaagggcaaggcttacaccaactacttcggacggtgcaatgtggccgagcacgaaaagctgatcctgctggcccagctgaagcccgagaaggatagcgacgaagccgtgacatatagcctgggaaagtttgggcagagggccctggatttctacagcattcatgtgaccaaggagtccacccaccccgtgaagcccctggcccagatcgccggaaacagatacgcctccggacctgtgggaaaggccctgagcgacgcatgtatgggcacaatcgcctccttcctgtctaagtaccaggacatcatcatcgaacaccagaaggtggtgaagggcaaccagaagagactggagagcctgcgggagctggccggcaaggaaaacctggaataccctagcgtgaccctgccacctcagcctcacaccaaggagggcgttgatgcctacaacgaagtgatcgcccgggtgcgaatgtgggtgaacctgaacctgtggcagaagctgaagctaagcagagatgatgccaagcctctgctgagactgaagggattcccttcctttcctctggtcgagagacaggccaacgaagtggactggtgggacatggtgtgtaacgtgaagaagctgatcaacgagaaaaaggaggatggcaaggtgttttggcagaatctggctggctacaagagacaggaagccctgagaccatacctgagcagcgaggaagatcggaagaagggaaagaaattcgctcggtaccagctgggcgacctgctgctgcacctggaaaagaagcacggcgaggactggggaaaggtgtacgacgaggcctgggagcggattgacaagaaagtggaaggcctgagcaagcacatcaagctggaagaggaacggagaagcgaggacgcccagagcaaggccgccctgaccgactggctgcgggctaaggccagcttcgtgatcgagggcctgaaggaggccgacaaggacgagttctgcagatgcgagctgaagctgcagaagtggtacggggacctgcggggaaagcccttcgccatcgaagccgagaacagcatcctggacatcagcggcttcagcaagcagtacaactgtgccttcatctggcagaaggacggcgtgaagaagctgaacctgtacctgatcatcaactacttcaagggcggcaagctgcggttcaagaagatcaaacctgaagccttcgaagccaacagattctacaccgtgatcaacaaaaagagcggcgagatcgtgcccatggaggtgaacttcaacttcgacgaccccaacctgatcatcctgcctctggcctttggcaagagacagggcagagaattcatctggaacgacctgctgtccctggaaaccggcagcctgaagctggccaacggaagagtgatcgagaagacactgtacaacagaagaacccggcaggatgagcctgccctgttcgtggccctgaccttcgagcggcgggaggtcctggactcctccaatatcaaaccaatgaacctgatcggcgtggcaagaggcgaaaacatccccgccgtgatcgccctgaccgaccccgagggctgcccactgagccggtttaaggatagcctgggaaacccaacccacatcctgagaatcggcgagagctataaggagaagcagcggaccatccaggccaagaaggaggtggagcagcggagagccggcggctacagccggaagtacgccagcaaagccaagaatctggcagacgatatggtgagaaacaccgctagagatctgctgtactacgccgtgacccaggatgccatgctgatcttcgccaacctgagccggggcttcggccggcagggcaagcggaccttcatggccgagagacagtacacacggatggaggactggctgaccgccaagctggcctacgagggcctgagcaagacctacctgtccaagacactggcccagtacacctccaagacatgcagcaactgtgggtttaccatcaccagcgccgactacgacagggtgctggagaagctgaagaagacagcaacaggctggatgaccacaattaacggcaaggagctgaaggtggagggccagattacctactacaacagatacaagagacagaacgtagtcaaggacctgtccgtcgagctggatagactgagcgaagaatctgtgaacaacgacatctcctcctggacaaagggcagaagcggagaagctctgagcctcctgaagaaaagattctcccatagacccgtgcaggagaagttcgtgtgcctgaactgcggcttcgagacacacgcagccgagcaagccgccctgaacatcgccagatcctggctgttcctgcggagccaggagtacaagaaataccagacaaacaagacaaccggcaacaccgataagagagccttcgtcgagacctggcagtccttttaccggaagaagcttaaggaggtgtggaaacctgccgtgcggtctggcggatctggcggaggctccaccagccccaagaaaaagagaaaagtctaagctgccttctgcggggcttgccttctggccatgcccttcttctctcccttgcacctgtacctcttggtctttgaataaagcctgagtaggaaggctagcaaaaaaaaaaaaaaaaaaaaaaaaaaaaaaaaaaaaaaaaaaaaaaaaaaaaaaaaaaaaaaaaaaaaaaaaaaaaaaaa

SEQ ID NO: 13148 - RNA, 5809 nt, synthetic construct
  source 1..5809: mol_type = other RNA
aggaaataagagagaaaagaagagtaagaagaaatataagagccaccatggcccctaagaagaagcgtaaagtgagccggatggaacgcctcgtctacgaggtgcggcagaagtgcagaaacatcgaggacatctgcatctcctgcggatctctgaacgtgaccctggagcacccactgttcatcggcggcatgtgccagaactgtaaaaactgttttctggagtgtgcctatcaatacgacgatgacggctaccagagctactgcaccatctgttgcggcggaagagaggtgctgatgtgtggaaataacaactgctgccggtgcttctgcgtggaatgcgtggacctgctggtgggccccggcgccgcccaggccgctattaaggaagatccttggaactgctacatgtgcggccacaagggcacatacggcctgctgagacggagagaggactggcctagcagactgcagatgttcttcgccaataaccacgaccaggagttcgacccccctaaggtgtaccctcccgtccccgccgagaagagaaagcccatccgggtcctgagcctgttcgatggcatcgccaccggtctgctggtgctgaaggacctgggcatccaggtggataggtacattgcctccgaggtgtgcgaggactccatcaccgtgggaatggtgcgtcatcagggcaagatcatgtacgtgggcgacgtgcggagcgtgacacagaagcatatccaggagtggggccctttcgacctggtgatcggcggcagcccttgcaatgacctgagcatcgtgaacccagcccggaagggcctgtacgagggaaccggcagactgttcttcgagttttacagactgctgcacgacgcccggcctaaggaaggcgacgaccggcccttcttttggctgttcgagaatgtggtggccatgggagtcagcgacaagcgggatattagccggttcctggagagcaaccccgtgatgatcgatgccaaggaagtgagcgccgcccaccgggccagatacttctggggcaatctgcctggcatgaacagacccctggccagcaccgtgaacgacaagctggagctgcaggagtgcctggagcacggccggatcgccaagttcagcaaggtgagaaccatcaccacccgaagcaacagcatcaaacaaggcaaggaccagcactttcctgtgttcatgaacgagaaggaggacatcctgtggtgtaccgagatggagagagtgttcgggttcccagtccactacacagatgtcagcaacatgtctagactggccagacagagactgctgggaagaagctggtccgtccctgtgatcagacacctgttcgcccctctgaaggagtacttcgcctgcgtgagcagcggcaacagcaacgccaacagccggggccccagcttctctagcggcctggtgccactgtccctgagagggagccacatgggccccatggagatctacaaaaccgtgagcgcctggaagcggcagcctgtgcgcgtgctgagcctgtttcggaatatcgataaagtcctgaaaagcctgggattcctggagagcggctctggctccggcggtggcaccctgaagtacgtggaggatgtgacaaacgtggtcagacgggatgtggagaagtggggccccttcgatctggtgtacggcagcacccaacccctgggcagctcttgtgaccggtgccctggctggtacatgtttcagttccaccggatcctgcagtacgccctgccgagacaggagtcccagcggccattcttttggattttcatggacaacttgctgctgaccgaggatgaccaggaaactaccactcggttcctgcagaccgaagccgtgaccctgcaggacgtgagaggccgggactaccagaacgccatgcgggtgtggtccaacatccctggactgaaaagcaagcacgcacctctgacccctaaagaagaggagtacctgcaggcccaggtgcggagcagaagcaagctggacgcccctaaggtggatctgctggtgaagaattgcctcctgcccctgagagagtacttcaagtatttcagccagaatagtctgcccctgggaggcagcggcggcggcgtggtgttcgaggacgtggccgtgaacttcaccctggaggagtgggccctgctggacagcagccagaaggagctgtacagggacgtgatgctggagaccttcaggaacctggccagcgtggacggcgagacccagtacaaggccaacggcagcgtgagccagcaggacatctacaggaacaagatcagcaaggagcacaagatcagcaagttcaccggcaacgacagctggcccttcgtgctgggcaagatctgggaggagctgagcggcggcccaagcagcggcgcccctcctcccagcggcggcagcccagccggctccccaacctctaccgaggagggcacctctgagtccgccacccccgagagcggccctggcacctccaccgagcccagcgagggcagcgcacccggcagccctgccggcagccccacctccacagaggagggaaccagcaccgagcccagcgaaggcagcgccccaggcaccagcaccgagcctagtgagcaggagattaaacggatcaacaagatcagaagaagacttgtgaaagacagcaacaccaagaaggccggcaagacaggccccatgaaaaccctgctggttagagtgatgacacccgatctgagagagcggctggaaaacctgagaaagaagcctgaaaatatcccccagcccatcagcaatacatctagagccaacctgaataagctgctgaccgattacaccgaaatgaagaaggcgatcctgcatgtgtactgggaagagttccagaaggaccctgtgggcctgatgagccgggtggcccagcctgccagcaagaagatcgatcagaacaagctgaaacctgagatggacgagaagggcaacctgaccaccgccggctttgcctgctctcagtgtggccagcccctgttcgtgtacaagctggagcaggtgtctgagaagggcaaggcttacaccaactacttcggacggtgcaatgtggccgagcacgaaaagctgatcctgctggcccagctgaagcccgagaaggatagcgacgaagccgtgacatatagcctgggaaagtttgggcagagggccctggatttctacagcattcatgtgaccaaggagtccacccaccccgtgaagcccctggcccagatcgccggaaacagatacgcctccggacctgtgggaaaggccctgagcgacgcatgtatgggcacaatcgcctccttcctgtctaagtaccaggacatcatcatcgaacaccagaaggtggtgaagggcaaccagaagagactggagagcctgcgggagctggccggcaaggaaaacctggaataccctagcgtgaccctgccacctcagcctcacaccaaggagggcgttgatgcctacaacgaagtgatcgcccgggtgcgaatgtgggtgaacctgaacctgtggcagaagctgaagctaagcagagatgatgccaagcctctgctgagactgaagggattcccttcctttcctctggtcgagagacaggccaacgaagtggactggtgggacatggtgtgtaacgtgaagaagctgatcaacgagaaaaaggaggatggcaaggtgttttggcagaatctggctggctacaagagacaggaagccctgagaccatacctgagcagcgaggaagatcggaagaagggaaagaaattcgctcggtaccagctgggcgacctgctgctgcacctggaaaagaagcacggcgaggactggggaaaggtgtacgacgaggcctgggagcggattgacaagaaagtggaaggcctgagcaagcacatcaagctggaagaggaacggagaagcgaggacgcccagagcaaggccgccctgaccgactggctgcgggctaaggccagcttcgtgatcgagggcctgaaggaggccgacaaggacgagttctgcagatgcgagctgaagctgcagaagtggtacggggacctgcggggaaagcccttcgccatcgaagccgagaacagcatcctggacatcagcggcttcagcaagcagtacaactgtgccttcatctggcagaaggacggcgtgaagaagctgaacctgtacctgatcatcaactacttcaagggcggcaagctgcggttcaagaagatcaaacctgaagccttcgaagccaacagattctacaccgtgatcaacaaaaagagcggcgagatcgtgcccatggaggtgaacttcaacttcgacgaccccaacctgatcatcctgcctctggcctttggcaagagacagggcagagaattcatctggaacgacctgctgtccctggaaaccggcagcctgaagctggccaacggaagagtgatcgagaagacactgtacaacagaagaacccggcaggatgagcctgccctgttcgtggccctgaccttcgagcggcgggaggtcctggactcctccaatatcaaaccaatgaacctgatcggcgtggcaagaggcgaaaacatccccgccgtgatcgccctgaccgaccccgagggctgcccactgagccggtttaaggatagcctgggaaacccaacccacatcctgagaatcggcgagagctataaggagaagcagcggaccatccaggccaagaaggaggtggagcagcggagagccggcggctacagccggaagtacgccagcaaagccaagaatctggcagacgatatggtgagaaacaccgctagagatctgctgtactacgccgtgacccaggatgccatgctgatcttcgccaacctgagccggggcttcggccggcagggcaagcggaccttcatggccgagagacagtacacacggatggaggactggctgaccgccaagctggcctacgagggcctgagcaagacctacctgtccaagacactggcccagtacacctccaagacatgcagcaactgtgggtttaccatcaccagcgccgactacgacagggtgctggagaagctgaagaagacagcaacaggctggatgaccacaattaacggcaaggagctgaaggtggagggccagattacctactacaacagatacaagagacagaacgtagtcaaggacctgtccgtcgagctggatagactgagcgaagaatctgtgaacaacgacatctcctcctggacaaagggcagaagcggagaagctctgagcctcctgaagaaaagattctcccatagacccgtgcaggagaagttcgtgtgcctgaactgcggcttcgagacacacgcagccgagcaagccgccctgaacatcgccagatcctggctgttcctgcggagccaggagtacaagaaataccagacaaacaagacaaccggcaacaccgataagagagccttcgtcgagacctggcagtccttttaccggaagaagcttaaggaggtgtggaaacctgccgtgcggtctggcggatctggcggaggctccaccagccccaagaaaaagagaaaagtctaagctgccttctgcggggcttgccttctggccatgcccttcttctctcccttgcacctgtacctcttggtctttgaataaagcctgagtaggaaggctagcaaaaaaaaaaaaaaaaaaaaaaaaaaaaaaaaaaaaaaaaaaaaaaaaaaaaaaaaaaaaaaaaaaaaaaaaaaaaaaaa

SEQ ID NO: 13149 - RNA, 5785 nt, synthetic construct
  source 1..5785: mol_type = other RNA
aggaaataagagagaaaagaagagtaagaagaaatataagagccaccatggcccctaagaagaagcgtaaagtgagccggatggaacgcctcgtctacgaggtgcggcagaagtgcagaaacatcgaggacatctgcatctcctgcggatctctgaacgtgaccctggagcacccactgttcatcggcggcatgtgccagaactgtaaaaactgttttctggagtgtgcctatcaatacgacgatgacggctaccagagctactgcaccatctgttgcggcggaagagaggtgctgatgtgtggaaataacaactgctgccggtgcttctgcgtggaatgcgtggacctgctggtgggccccggcgccgcccaggccgctattaaggaagatccttggaactgctacatgtgcggccacaagggcacatacggcctgctgagacggagagaggactggcctagcagactgcagatgttcttcgccaataaccacgaccaggagttcgacccccctaaggtgtaccctcccgtccccgccgagaagagaaagcccatccgggtcctgagcctgttcgatggcatcgccaccggtctgctggtgctgaaggacctgggcatccaggtggataggtacattgcctccgaggtgtgcgaggactccatcaccgtgggaatggtgcgtcatcagggcaagatcatgtacgtgggcgacgtgcggagcgtgacacagaagcatatccaggagtggggccctttcgacctggtgatcggcggcagcccttgcaatgacctgagcatcgtgaacccagcccggaagggcctgtacgagggaaccggcagactgttcttcgagttttacagactgctgcacgacgcccggcctaaggaaggcgacgaccggcccttcttttggctgttcgagaatgtggtggccatgggagtcagcgacaagcgggatattagccggttcctggagagcaaccccgtgatgatcgatgccaaggaagtgagcgccgcccaccgggccagatacttctggggcaatctgcctggcatgaacagacccctggccagcaccgtgaacgacaagctggagctgcaggagtgcctggagcacggccggatcgccaagttcagcaaggtgagaaccatcaccacccgaagcaacagcatcaaacaaggcaaggaccagcactttcctgtgttcatgaacgagaaggaggacatcctgtggtgtaccgagatggagagagtgttcgggttcccagtccactacacagatgtcagcaacatgtctagactggccagacagagactgctgggaagaagctggtccgtccctgtgatcagacacctgttcgcccctctgaaggagtacttcgcctgcgtgagcagcggcaacagcaacgccaacagccggggccccagcttctctagcggcctggtgccactgtccctgagagggagccacatgggccccatggagatctacaaaaccgtgagcgcctggaagcggcagcctgtgcgcgtgctgagcctgtttcggaatatcgataaagtcctgaaaagcctgggattcctggagagcggctctggctccggcggtggcaccctgaagtacgtggaggatgtgacaaacgtggtcagacgggatgtggagaagtggggccccttcgatctggtgtacggcagcacccaacccctgggcagctcttgtgaccggtgccctggctggtacatgtttcagttccaccggatcctgcagtacgccctgccgagacaggagtcccagcggccattcttttggattttcatggacaacttgctgctgaccgaggatgaccaggaaactaccactcggttcctgcagaccgaagccgtgaccctgcaggacgtgagaggccgggactaccagaacgccatgcgggtgtggtccaacatccctggactgaaaagcaagcacgcacctctgacccctaaagaagaggagtacctgcaggcccaggtgcggagcagaagcaagctggacgcccctaaggtggatctgctggtgaagaattgcctcctgcccctgagagagtacttcaagtatttcagccagaatagtctgcccctgggaggcagcggcggcggcgccgacatcaccctgatgagccaggcccaggacagcaggagcatcctgttccaggagagcgtgaccttcgaggacgtggccgtgaacttcaccaacagggagtggcagtgcctgacctacgcccagaggcacctgtacaaggacgtgatgctggagaactacaggaacatggccagcctgggcttccccttccccaagccccccctgatcagccacctggagagggaggtggacccctgcgtgggcggcccaagcagcggcgcccctcctcccagcggcggcagcccagccggctccccaacctctaccgaggagggcacctctgagtccgccacccccgagagcggccctggcacctccaccgagcccagcgagggcagcgcacccggcagccctgccggcagccccacctccacagaggagggaaccagcaccgagcccagcgaaggcagcgccccaggcaccagcaccgagcctagtgagcaggagattaaacggatcaacaagatcagaagaagacttgtgaaagacagcaacaccaagaaggccggcaagacaggccccatgaaaaccctgctggttagagtgatgacacccgatctgagagagcggctggaaaacctgagaaagaagcctgaaaatatcccccagcccatcagcaatacatctagagccaacctgaataagctgctgaccgattacaccgaaatgaagaaggcgatcctgcatgtgtactgggaagagttccagaaggaccctgtgggcctgatgagccgggtggcccagcctgccagcaagaagatcgatcagaacaagctgaaacctgagatggacgagaagggcaacctgaccaccgccggctttgcctgctctcagtgtggccagcccctgttcgtgtacaagctggagcaggtgtctgagaagggcaaggcttacaccaactacttcggacggtgcaatgtggccgagcacgaaaagctgatcctgctggcccagctgaagcccgagaaggatagcgacgaagccgtgacatatagcctgggaaagtttgggcagagggccctggatttctacagcattcatgtgaccaaggagtccacccaccccgtgaagcccctggcccagatcgccggaaacagatacgcctccggacctgtgggaaaggccctgagcgacgcatgtatgggcacaatcgcctccttcctgtctaagtaccaggacatcatcatcgaacaccagaaggtggtgaagggcaaccagaagagactggagagcctgcgggagctggccggcaaggaaaacctggaataccctagcgtgaccctgccacctcagcctcacaccaaggagggcgttgatgcctacaacgaagtgatcgcccgggtgcgaatgtgggtgaacctgaacctgtggcagaagctgaagctaagcagagatgatgccaagcctctgctgagactgaagggattcccttcctttcctctggtcgagagacaggccaacgaagtggactggtgggacatggtgtgtaacgtgaagaagctgatcaacgagaaaaaggaggatggcaaggtgttttggcagaatctggctggctacaagagacaggaagccctgagaccatacctgagcagcgaggaagatcggaagaagggaaagaaattcgctcggtaccagctgggcgacctgctgctgcacctggaaaagaagcacggcgaggactggggaaaggtgtacgacgaggcctgggagcggattgacaagaaagtggaaggcctgagcaagcacatcaagctggaagaggaacggagaagcgaggacgcccagagcaaggccgccctgaccgactggctgcgggctaaggccagcttcgtgatcgagggcctgaaggaggccgacaaggacgagttctgcagatgcgagctgaagctgcagaagtggtacggggacctgcggggaaagcccttcgccatcgaagccgagaacagcatcctggacatcagcggcttcagcaagcagtacaactgtgccttcatctggcagaaggacggcgtgaagaagctgaacctgtacctgatcatcaactacttcaagggcggcaagctgcggttcaagaagatcaaacctgaagccttcgaagccaacagattctacaccgtgatcaacaaaaagagcggcgagatcgtgcccatggaggtgaacttcaacttcgacgaccccaacctgatcatcctgcctctggcctttggcaagagacagggcagagaattcatctggaacgacctgctgtccctggaaaccggcagcctgaagctggccaacggaagagtgatcgagaagacactgtacaacagaagaacccggcaggatgagcctgccctgttcgtggccctgaccttcgagcggcgggaggtcctggactcctccaatatcaaaccaatgaacctgatcggcgtggcaagaggcgaaaacatccccgccgtgatcgccctgaccgaccccgagggctgcccactgagccggtttaaggatagcctgggaaacccaacccacatcctgagaatcggcgagagctataaggagaagcagcggaccatccaggccaagaaggaggtggagcagcggagagccggcggctacagccggaagtacgccagcaaagccaagaatctggcagacgatatggtgagaaacaccgctagagatctgctgtactacgccgtgacccaggatgccatgctgatcttcgccaacctgagccggggcttcggccggcagggcaagcggaccttcatggccgagagacagtacacacggatggaggactggctgaccgccaagctggcctacgagggcctgagcaagacctacctgtccaagacactggcccagtacacctccaagacatgcagcaactgtgggtttaccatcaccagcgccgactacgacagggtgctggagaagctgaagaagacagcaacaggctggatgaccacaattaacggcaaggagctgaaggtggagggccagattacctactacaacagatacaagagacagaacgtagtcaaggacctgtccgtcgagctggatagactgagcgaagaatctgtgaacaacgacatctcctcctggacaaagggcagaagcggagaagctctgagcctcctgaagaaaagattctcccatagacccgtgcaggagaagttcgtgtgcctgaactgcggcttcgagacacacgcagccgagcaagccgccctgaacatcgccagatcctggctgttcctgcggagccaggagtacaagaaataccagacaaacaagacaaccggcaacaccgataagagagccttcgtcgagacctggcagtccttttaccggaagaagcttaaggaggtgtggaaacctgccgtgcggtctggcggatctggcggaggctccaccagccccaagaaaaagagaaaagtctaagctgccttctgcggggcttgccttctggccatgcccttcttctctcccttgcacctgtacctcttggtctttgaataaagcctgagtaggaaggctagcaaaaaaaaaaaaaaaaaaaaaaaaaaaaaaaaaaaaaaaaaaaaaaaaaaaaaaaaaaaaaaaaaaaaaaaaaaaaaaaa

SEQ ID NO: 13150 - RNA, 5785 nt, synthetic construct
  source 1..5785: mol_type = other RNA
aggaaataagagagaaaagaagagtaagaagaaatataagagccaccatggcccctaagaagaagcgtaaagtgagccggatggaacgcctcgtctacgaggtgcggcagaagtgcagaaacatcgaggacatctgcatctcctgcggatctctgaacgtgaccctggagcacccactgttcatcggcggcatgtgccagaactgtaaaaactgttttctggagtgtgcctatcaatacgacgatgacggctaccagagctactgcaccatctgttgcggcggaagagaggtgctgatgtgtggaaataacaactgctgccggtgcttctgcgtggaatgcgtggacctgctggtgggccccggcgccgcccaggccgctattaaggaagatccttggaactgctacatgtgcggccacaagggcacatacggcctgctgagacggagagaggactggcctagcagactgcagatgttcttcgccaataaccacgaccaggagttcgacccccctaaggtgtaccctcccgtccccgccgagaagagaaagcccatccgggtcctgagcctgttcgatggcatcgccaccggtctgctggtgctgaaggacctgggcatccaggtggataggtacattgcctccgaggtgtgcgaggactccatcaccgtgggaatggtgcgtcatcagggcaagatcatgtacgtgggcgacgtgcggagcgtgacacagaagcatatccaggagtggggccctttcgacctggtgatcggcggcagcccttgcaatgacctgagcatcgtgaacccagcccggaagggcctgtacgagggaaccggcagactgttcttcgagttttacagactgctgcacgacgcccggcctaaggaaggcgacgaccggcccttcttttggctgttcgagaatgtggtggccatgggagtcagcgacaagcgggatattagccggttcctggagagcaaccccgtgatgatcgatgccaaggaagtgagcgccgcccaccgggccagatacttctggggcaatctgcctggcatgaacagacccctggccagcaccgtgaacgacaagctggagctgcaggagtgcctggagcacggccggatcgccaagttcagcaaggtgagaaccatcaccacccgaagcaacagcatcaaacaaggcaaggaccagcactttcctgtgttcatgaacgagaaggaggacatcctgtggtgtaccgagatggagagagtgttcgggttcccagtccactacacagatgtcagcaacatgtctagactggccagacagagactgctgggaagaagctggtccgtccctgtgatcagacacctgttcgcccctctgaaggagtacttcgcctgcgtgagcagcggcaacagcaacgccaacagccggggccccagcttctctagcggcctggtgccactgtccctgagagggagccacatgggccccatggagatctacaaaaccgtgagcgcctggaagcggcagcctgtgcgcgtgctgagcctgtttcggaatatcgataaagtcctgaaaagcctgggattcctggagagcggctctggctccggcggtggcaccctgaagtacgtggaggatgtgacaaacgtggtcagacgggatgtggagaagtggggccccttcgatctggtgtacggcagcacccaacccctgggcagctcttgtgaccggtgccctggctggtacatgtttcagttccaccggatcctgcagtacgccctgccgagacaggagtcccagcggccattcttttggattttcatggacaacttgctgctgaccgaggatgaccaggaaactaccactcggttcctgcagaccgaagccgtgaccctgcaggacgtgagaggccgggactaccagaacgccatgcgggtgtggtccaacatccctggactgaaaagcaagcacgcacctctgacccctaaagaagaggagtacctgcaggcccaggtgcggagcagaagcaagctggacgcccctaaggtggatctgctggtgaagaattgcctcctgcccctgagagagtacttcaagtatttcagccagaatagtctgcccctgggaggcagcggcggcggcgagatggagccccacagccacgccgtgccctgccagcccagcatgagcttcaaggacgtggccgtgaccttcacccaggaggagtggggccagctgaacctggcccagaggaggctgtacaggaacgtgaccctggagacctggagccacctggtgagcctgggcctgctgctgagcaagcccgacgtgatcagctggctggagcagggccaggacccctggagggccgagcagggcccccccggcggcccaagcagcggcgcccctcctcccagcggcggcagcccagccggctccccaacctctaccgaggagggcacctctgagtccgccacccccgagagcggccctggcacctccaccgagcccagcgagggcagcgcacccggcagccctgccggcagccccacctccacagaggagggaaccagcaccgagcccagcgaaggcagcgccccaggcaccagcaccgagcctagtgagcaggagattaaacggatcaacaagatcagaagaagacttgtgaaagacagcaacaccaagaaggccggcaagacaggccccatgaaaaccctgctggttagagtgatgacacccgatctgagagagcggctggaaaacctgagaaagaagcctgaaaatatcccccagcccatcagcaatacatctagagccaacctgaataagctgctgaccgattacaccgaaatgaagaaggcgatcctgcatgtgtactgggaagagttccagaaggaccctgtgggcctgatgagccgggtggcccagcctgccagcaagaagatcgatcagaacaagctgaaacctgagatggacgagaagggcaacctgaccaccgccggctttgcctgctctcagtgtggccagcccctgttcgtgtacaagctggagcaggtgtctgagaagggcaaggcttacaccaactacttcggacggtgcaatgtggccgagcacgaaaagctgatcctgctggcccagctgaagcccgagaaggatagcgacgaagccgtgacatatagcctgggaaagtttgggcagagggccctggatttctacagcattcatgtgaccaaggagtccacccaccccgtgaagcccctggcccagatcgccggaaacagatacgcctccggacctgtgggaaaggccctgagcgacgcatgtatgggcacaatcgcctccttcctgtctaagtaccaggacatcatcatcgaacaccagaaggtggtgaagggcaaccagaagagactggagagcctgcgggagctggccggcaaggaaaacctggaataccctagcgtgaccctgccacctcagcctcacaccaaggagggcgttgatgcctacaacgaagtgatcgcccgggtgcgaatgtgggtgaacctgaacctgtggcagaagctgaagctaagcagagatgatgccaagcctctgctgagactgaagggattcccttcctttcctctggtcgagagacaggccaacgaagtggactggtgggacatggtgtgtaacgtgaagaagctgatcaacgagaaaaaggaggatggcaaggtgttttggcagaatctggctggctacaagagacaggaagccctgagaccatacctgagcagcgaggaagatcggaagaagggaaagaaattcgctcggtaccagctgggcgacctgctgctgcacctggaaaagaagcacggcgaggactggggaaaggtgtacgacgaggcctgggagcggattgacaagaaagtggaaggcctgagcaagcacatcaagctggaagaggaacggagaagcgaggacgcccagagcaaggccgccctgaccgactggctgcgggctaaggccagcttcgtgatcgagggcctgaaggaggccgacaaggacgagttctgcagatgcgagctgaagctgcagaagtggtacggggacctgcggggaaagcccttcgccatcgaagccgagaacagcatcctggacatcagcggcttcagcaagcagtacaactgtgccttcatctggcagaaggacggcgtgaagaagctgaacctgtacctgatcatcaactacttcaagggcggcaagctgcggttcaagaagatcaaacctgaagccttcgaagccaacagattctacaccgtgatcaacaaaaagagcggcgagatcgtgcccatggaggtgaacttcaacttcgacgaccccaacctgatcatcctgcctctggcctttggcaagagacagggcagagaattcatctggaacgacctgctgtccctggaaaccggcagcctgaagctggccaacggaagagtgatcgagaagacactgtacaacagaagaacccggcaggatgagcctgccctgttcgtggccctgaccttcgagcggcgggaggtcctggactcctccaatatcaaaccaatgaacctgatcggcgtggcaagaggcgaaaacatccccgccgtgatcgccctgaccgaccccgagggctgcccactgagccggtttaaggatagcctgggaaacccaacccacatcctgagaatcggcgagagctataaggagaagcagcggaccatccaggccaagaaggaggtggagcagcggagagccggcggctacagccggaagtacgccagcaaagccaagaatctggcagacgatatggtgagaaacaccgctagagatctgctgtactacgccgtgacccaggatgccatgctgatcttcgccaacctgagccggggcttcggccggcagggcaagcggaccttcatggccgagagacagtacacacggatggaggactggctgaccgccaagctggcctacgagggcctgagcaagacctacctgtccaagacactggcccagtacacctccaagacatgcagcaactgtgggtttaccatcaccagcgccgactacgacagggtgctggagaagctgaagaagacagcaacaggctggatgaccacaattaacggcaaggagctgaaggtggagggccagattacctactacaacagatacaagagacagaacgtagtcaaggacctgtccgtcgagctggatagactgagcgaagaatctgtgaacaacgacatctcctcctggacaaagggcagaagcggagaagctctgagcctcctgaagaaaagattctcccatagacccgtgcaggagaagttcgtgtgcctgaactgcggcttcgagacacacgcagccgagcaagccgccctgaacatcgccagatcctggctgttcctgcggagccaggagtacaagaaataccagacaaacaagacaaccggcaacaccgataagagagccttcgtcgagacctggcagtccttttaccggaagaagcttaaggaggtgtggaaacctgccgtgcggtctggcggatctggcggaggctccaccagccccaagaaaaagagaaaagtctaagctgccttctgcggggcttgccttctggccatgcccttcttctctcccttgcacctgtacctcttggtctttgaataaagcctgagtaggaaggctagcaaaaaaaaaaaaaaaaaaaaaaaaaaaaaaaaaaaaaaaaaaaaaaaaaaaaaaaaaaaaaaaaaaaaaaaaaaaaaaaa

SEQ ID NO: 13151 - RNA, 5785 nt, synthetic construct
  source 1..5785: mol_type = other RNA
aggaaataagagagaaaagaagagtaagaagaaatataagagccaccatggcccctaagaagaagcgtaaagtgagccggatggaacgcctcgtctacgaggtgcggcagaagtgcagaaacatcgaggacatctgcatctcctgcggatctctgaacgtgaccctggagcacccactgttcatcggcggcatgtgccagaactgtaaaaactgttttctggagtgtgcctatcaatacgacgatgacggctaccagagctactgcaccatctgttgcggcggaagagaggtgctgatgtgtggaaataacaactgctgccggtgcttctgcgtggaatgcgtggacctgctggtgggccccggcgccgcccaggccgctattaaggaagatccttggaactgctacatgtgcggccacaagggcacatacggcctgctgagacggagagaggactggcctagcagactgcagatgttcttcgccaataaccacgaccaggagttcgacccccctaaggtgtaccctcccgtccccgccgagaagagaaagcccatccgggtcctgagcctgttcgatggcatcgccaccggtctgctggtgctgaaggacctgggcatccaggtggataggtacattgcctccgaggtgtgcgaggactccatcaccgtgggaatggtgcgtcatcagggcaagatcatgtacgtgggcgacgtgcggagcgtgacacagaagcatatccaggagtggggccctttcgacctggtgatcggcggcagcccttgcaatgacctgagcatcgtgaacccagcccggaagggcctgtacgagggaaccggcagactgttcttcgagttttacagactgctgcacgacgcccggcctaaggaaggcgacgaccggcccttcttttggctgttcgagaatgtggtggccatgggagtcagcgacaagcgggatattagccggttcctggagagcaaccccgtgatgatcgatgccaaggaagtgagcgccgcccaccgggccagatacttctggggcaatctgcctggcatgaacagacccctggccagcaccgtgaacgacaagctggagctgcaggagtgcctggagcacggccggatcgccaagttcagcaaggtgagaaccatcaccacccgaagcaacagcatcaaacaaggcaaggaccagcactttcctgtgttcatgaacgagaaggaggacatcctgtggtgtaccgagatggagagagtgttcgggttcccagtccactacacagatgtcagcaacatgtctagactggccagacagagactgctgggaagaagctggtccgtccctgtgatcagacacctgttcgcccctctgaaggagtacttcgcctgcgtgagcagcggcaacagcaacgccaacagccggggccccagcttctctagcggcctggtgccactgtccctgagagggagccacatgggccccatggagatctacaaaaccgtgagcgcctggaagcggcagcctgtgcgcgtgctgagcctgtttcggaatatcgataaagtcctgaaaagcctgggattcctggagagcggctctggctccggcggtggcaccctgaagtacgtggaggatgtgacaaacgtggtcagacgggatgtggagaagtggggccccttcgatctggtgtacggcagcacccaacccctgggcagctcttgtgaccggtgccctggctggtacatgtttcagttccaccggatcctgcagtacgccctgccgagacaggagtcccagcggccattcttttggattttcatggacaacttgctgctgaccgaggatgaccaggaaactaccactcggttcctgcagaccgaagccgtgaccctgcaggacgtgagaggccgggactaccagaacgccatgcgggtgtggtccaacatccctggactgaaaagcaagcacgcacctctgacccctaaagaagaggagtacctgcaggcccaggtgcggagcagaagcaagctggacgcccctaaggtggatctgctggtgaagaattgcctcctgcccctgagagagtacttcaagtatttcagccagaatagtctgcccctgggaggcagcggcggcggccaccaggaggtggtgaccttcgaggacgtggccgtgtacttcacccagaccgagtgggccggcctgagccccgcccagagggccctgtacaggagcgtgatgctggagatctacggcaacctgaccagcctgggctaccccgtgcccaagcccgccctggtgagcctgctggagaggggcgagctgccctggggcctggagaccagggacgacccccccgcccagggcaccaaggacatctgcggcggcccaagcagcggcgcccctcctcccagcggcggcagcccagccggctccccaacctctaccgaggagggcacctctgagtccgccacccccgagagcggccctggcacctccaccgagcccagcgagggcagcgcacccggcagccctgccggcagccccacctccacagaggagggaaccagcaccgagcccagcgaaggcagcgccccaggcaccagcaccgagcctagtgagcaggagattaaacggatcaacaagatcagaagaagacttgtgaaagacagcaacaccaagaaggccggcaagacaggccccatgaaaaccctgctggttagagtgatgacacccgatctgagagagcggctggaaaacctgagaaagaagcctgaaaatatcccccagcccatcagcaatacatctagagccaacctgaataagctgctgaccgattacaccgaaatgaagaaggcgatcctgcatgtgtactgggaagagttccagaaggaccctgtgggcctgatgagccgggtggcccagcctgccagcaagaagatcgatcagaacaagctgaaacctgagatggacgagaagggcaacctgaccaccgccggctttgcctgctctcagtgtggccagcccctgttcgtgtacaagctggagcaggtgtctgagaagggcaaggcttacaccaactacttcggacggtgcaatgtggccgagcacgaaaagctgatcctgctggcccagctgaagcccgagaaggatagcgacgaagccgtgacatatagcctgggaaagtttgggcagagggccctggatttctacagcattcatgtgaccaaggagtccacccaccccgtgaagcccctggcccagatcgccggaaacagatacgcctccggacctgtgggaaaggccctgagcgacgcatgtatgggcacaatcgcctccttcctgtctaagtaccaggacatcatcatcgaacaccagaaggtggtgaagggcaaccagaagagactggagagcctgcgggagctggccggcaaggaaaacctggaataccctagcgtgaccctgccacctcagcctcacaccaaggagggcgttgatgcctacaacgaagtgatcgcccgggtgcgaatgtgggtgaacctgaacctgtggcagaagctgaagctaagcagagatgatgccaagcctctgctgagactgaagggattcccttcctttcctctggtcgagagacaggccaacgaagtggactggtgggacatggtgtgtaacgtgaagaagctgatcaacgagaaaaaggaggatggcaaggtgttttggcagaatctggctggctacaagagacaggaagccctgagaccatacctgagcagcgaggaagatcggaagaagggaaagaaattcgctcggtaccagctgggcgacctgctgctgcacctggaaaagaagcacggcgaggactggggaaaggtgtacgacgaggcctgggagcggattgacaagaaagtggaaggcctgagcaagcacatcaagctggaagaggaacggagaagcgaggacgcccagagcaaggccgccctgaccgactggctgcgggctaaggccagcttcgtgatcgagggcctgaaggaggccgacaaggacgagttctgcagatgcgagctgaagctgcagaagtggtacggggacctgcggggaaagcccttcgccatcgaagccgagaacagcatcctggacatcagcggcttcagcaagcagtacaactgtgccttcatctggcagaaggacggcgtgaagaagctgaacctgtacctgatcatcaactacttcaagggcggcaagctgcggttcaagaagatcaaacctgaagccttcgaagccaacagattctacaccgtgatcaacaaaaagagcggcgagatcgtgcccatggaggtgaacttcaacttcgacgaccccaacctgatcatcctgcctctggcctttggcaagagacagggcagagaattcatctggaacgacctgctgtccctggaaaccggcagcctgaagctggccaacggaagagtgatcgagaagacactgtacaacagaagaacccggcaggatgagcctgccctgttcgtggccctgaccttcgagcggcgggaggtcctggactcctccaatatcaaaccaatgaacctgatcggcgtggcaagaggcgaaaacatccccgccgtgatcgccctgaccgaccccgagggctgcccactgagccggtttaaggatagcctgggaaacccaacccacatcctgagaatcggcgagagctataaggagaagcagcggaccatccaggccaagaaggaggtggagcagcggagagccggcggctacagccggaagtacgccagcaaagccaagaatctggcagacgatatggtgagaaacaccgctagagatctgctgtactacgccgtgacccaggatgccatgctgatcttcgccaacctgagccggggcttcggccggcagggcaagcggaccttcatggccgagagacagtacacacggatggaggactggctgaccgccaagctggcctacgagggcctgagcaagacctacctgtccaagacactggcccagtacacctccaagacatgcagcaactgtgggtttaccatcaccagcgccgactacgacagggtgctggagaagctgaagaagacagcaacaggctggatgaccacaattaacggcaaggagctgaaggtggagggccagattacctactacaacagatacaagagacagaacgtagtcaaggacctgtccgtcgagctggatagactgagcgaagaatctgtgaacaacgacatctcctcctggacaaagggcagaagcggagaagctctgagcctcctgaagaaaagattctcccatagacccgtgcaggagaagttcgtgtgcctgaactgcggcttcgagacacacgcagccgagcaagccgccctgaacatcgccagatcctggctgttcctgcggagccaggagtacaagaaataccagacaaacaagacaaccggcaacaccgataagagagccttcgtcgagacctggcagtccttttaccggaagaagcttaaggaggtgtggaaacctgccgtgcggtctggcggatctggcggaggctccaccagccccaagaaaaagagaaaagtctaagctgccttctgcggggcttgccttctggccatgcccttcttctctcccttgcacctgtacctcttggtctttgaataaagcctgagtaggaaggctagcaaaaaaaaaaaaaaaaaaaaaaaaaaaaaaaaaaaaaaaaaaaaaaaaaaaaaaaaaaaaaaaaaaaaaaaaaaaaaaaa

SEQ ID NO: 13152 - RNA, 5785 nt, synthetic construct
  source 1..5785: mol_type = other RNA
aggaaataagagagaaaagaagagtaagaagaaatataagagccaccatggcccctaagaagaagcgtaaagtgagccggatggaacgcctcgtctacgaggtgcggcagaagtgcagaaacatcgaggacatctgcatctcctgcggatctctgaacgtgaccctggagcacccactgttcatcggcggcatgtgccagaactgtaaaaactgttttctggagtgtgcctatcaatacgacgatgacggctaccagagctactgcaccatctgttgcggcggaagagaggtgctgatgtgtggaaataacaactgctgccggtgcttctgcgtggaatgcgtggacctgctggtgggccccggcgccgcccaggccgctattaaggaagatccttggaactgctacatgtgcggccacaagggcacatacggcctgctgagacggagagaggactggcctagcagactgcagatgttcttcgccaataaccacgaccaggagttcgacccccctaaggtgtaccctcccgtccccgccgagaagagaaagcccatccgggtcctgagcctgttcgatggcatcgccaccggtctgctggtgctgaaggacctgggcatccaggtggataggtacattgcctccgaggtgtgcgaggactccatcaccgtgggaatggtgcgtcatcagggcaagatcatgtacgtgggcgacgtgcggagcgtgacacagaagcatatccaggagtggggccctttcgacctggtgatcggcggcagcccttgcaatgacctgagcatcgtgaacccagcccggaagggcctgtacgagggaaccggcagactgttcttcgagttttacagactgctgcacgacgcccggcctaaggaaggcgacgaccggcccttcttttggctgttcgagaatgtggtggccatgggagtcagcgacaagcgggatattagccggttcctggagagcaaccccgtgatgatcgatgccaaggaagtgagcgccgcccaccgggccagatacttctggggcaatctgcctggcatgaacagacccctggccagcaccgtgaacgacaagctggagctgcaggagtgcctggagcacggccggatcgccaagttcagcaaggtgagaaccatcaccacccgaagcaacagcatcaaacaaggcaaggaccagcactttcctgtgttcatgaacgagaaggaggacatcctgtggtgtaccgagatggagagagtgttcgggttcccagtccactacacagatgtcagcaacatgtctagactggccagacagagactgctgggaagaagctggtccgtccctgtgatcagacacctgttcgcccctctgaaggagtacttcgcctgcgtgagcagcggcaacagcaacgccaacagccggggccccagcttctctagcggcctggtgccactgtccctgagagggagccacatgggccccatggagatctacaaaaccgtgagcgcctggaagcggcagcctgtgcgcgtgctgagcctgtttcggaatatcgataaagtcctgaaaagcctgggattcctggagagcggctctggctccggcggtggcaccctgaagtacgtggaggatgtgacaaacgtggtcagacgggatgtggagaagtggggccccttcgatctggtgtacggcagcacccaacccctgggcagctcttgtgaccggtgccctggctggtacatgtttcagttccaccggatcctgcagtacgccctgccgagacaggagtcccagcggccattcttttggattttcatggacaacttgctgctgaccgaggatgaccaggaaactaccactcggttcctgcagaccgaagccgtgaccctgcaggacgtgagaggccgggactaccagaacgccatgcgggtgtggtccaacatccctggactgaaaagcaagcacgcacctctgacccctaaagaagaggagtacctgcaggcccaggtgcggagcagaagcaagctggacgcccctaaggtggatctgctggtgaagaattgcctcctgcccctgagagagtacttcaagtatttcagccagaatagtctgcccctgggaggcagcggcggcggcatggccaccgccctgaccgaccccgcccaggtgagcgtgaccttcgacgacgtggccgtgaccttcacccaggaggagtggggccagctggacctggcccagaggaccctgtaccaggaggtgatgctggagaactgcggcctgctggtgagcctgggctgccccgtgcccaggcccgagctgatctaccacctggagcacggccaggagccctggaccaggaaggaggacctgagccagggcggcggcccaagcagcggcgcccctcctcccagcggcggcagcccagccggctccccaacctctaccgaggagggcacctctgagtccgccacccccgagagcggccctggcacctccaccgagcccagcgagggcagcgcacccggcagccctgccggcagccccacctccacagaggagggaaccagcaccgagcccagcgaaggcagcgccccaggcaccagcaccgagcctagtgagcaggagattaaacggatcaacaagatcagaagaagacttgtgaaagacagcaacaccaagaaggccggcaagacaggccccatgaaaaccctgctggttagagtgatgacacccgatctgagagagcggctggaaaacctgagaaagaagcctgaaaatatcccccagcccatcagcaatacatctagagccaacctgaataagctgctgaccgattacaccgaaatgaagaaggcgatcctgcatgtgtactgggaagagttccagaaggaccctgtgggcctgatgagccgggtggcccagcctgccagcaagaagatcgatcagaacaagctgaaacctgagatggacgagaagggcaacctgaccaccgccggctttgcctgctctcagtgtggccagcccctgttcgtgtacaagctggagcaggtgtctgagaagggcaaggcttacaccaactacttcggacggtgcaatgtggccgagcacgaaaagctgatcctgctggcccagctgaagcccgagaaggatagcgacgaagccgtgacatatagcctgggaaagtttgggcagagggccctggatttctacagcattcatgtgaccaaggagtccacccaccccgtgaagcccctggcccagatcgccggaaacagatacgcctccggacctgtgggaaaggccctgagcgacgcatgtatgggcacaatcgcctccttcctgtctaagtaccaggacatcatcatcgaacaccagaaggtggtgaagggcaaccagaagagactggagagcctgcgggagctggccggcaaggaaaacctggaataccctagcgtgaccctgccacctcagcctcacaccaaggagggcgttgatgcctacaacgaagtgatcgcccgggtgcgaatgtgggtgaacctgaacctgtggcagaagctgaagctaagcagagatgatgccaagcctctgctgagactgaagggattcccttcctttcctctggtcgagagacaggccaacgaagtggactggtgggacatggtgtgtaacgtgaagaagctgatcaacgagaaaaaggaggatggcaaggtgttttggcagaatctggctggctacaagagacaggaagccctgagaccatacctgagcagcgaggaagatcggaagaagggaaagaaattcgctcggtaccagctgggcgacctgctgctgcacctggaaaagaagcacggcgaggactggggaaaggtgtacgacgaggcctgggagcggattgacaagaaagtggaaggcctgagcaagcacatcaagctggaagaggaacggagaagcgaggacgcccagagcaaggccgccctgaccgactggctgcgggctaaggccagcttcgtgatcgagggcctgaaggaggccgacaaggacgagttctgcagatgcgagctgaagctgcagaagtggtacggggacctgcggggaaagcccttcgccatcgaagccgagaacagcatcctggacatcagcggcttcagcaagcagtacaactgtgccttcatctggcagaaggacggcgtgaagaagctgaacctgtacctgatcatcaactacttcaagggcggcaagctgcggttcaagaagatcaaacctgaagccttcgaagccaacagattctacaccgtgatcaacaaaaagagcggcgagatcgtgcccatggaggtgaacttcaacttcgacgaccccaacctgatcatcctgcctctggcctttggcaagagacagggcagagaattcatctggaacgacctgctgtccctggaaaccggcagcctgaagctggccaacggaagagtgatcgagaagacactgtacaacagaagaacccggcaggatgagcctgccctgttcgtggccctgaccttcgagcggcgggaggtcctggactcctccaatatcaaaccaatgaacctgatcggcgtggcaagaggcgaaaacatccccgccgtgatcgccctgaccgaccccgagggctgcccactgagccggtttaaggatagcctgggaaacccaacccacatcctgagaatcggcgagagctataaggagaagcagcggaccatccaggccaagaaggaggtggagcagcggagagccggcggctacagccggaagtacgccagcaaagccaagaatctggcagacgatatggtgagaaacaccgctagagatctgctgtactacgccgtgacccaggatgccatgctgatcttcgccaacctgagccggggcttcggccggcagggcaagcggaccttcatggccgagagacagtacacacggatggaggactggctgaccgccaagctggcctacgagggcctgagcaagacctacctgtccaagacactggcccagtacacctccaagacatgcagcaactgtgggtttaccatcaccagcgccgactacgacagggtgctggagaagctgaagaagacagcaacaggctggatgaccacaattaacggcaaggagctgaaggtggagggccagattacctactacaacagatacaagagacagaacgtagtcaaggacctgtccgtcgagctggatagactgagcgaagaatctgtgaacaacgacatctcctcctggacaaagggcagaagcggagaagctctgagcctcctgaagaaaagattctcccatagacccgtgcaggagaagttcgtgtgcctgaactgcggcttcgagacacacgcagccgagcaagccgccctgaacatcgccagatcctggctgttcctgcggagccaggagtacaagaaataccagacaaacaagacaaccggcaacaccgataagagagccttcgtcgagacctggcagtccttttaccggaagaagcttaaggaggtgtggaaacctgccgtgcggtctggcggatctggcggaggctccaccagccccaagaaaaagagaaaagtctaagctgccttctgcggggcttgccttctggccatgcccttcttctctcccttgcacctgtacctcttggtctttgaataaagcctgagtaggaaggctagcaaaaaaaaaaaaaaaaaaaaaaaaaaaaaaaaaaaaaaaaaaaaaaaaaaaaaaaaaaaaaaaaaaaaaaaaaaaaaaaa

SEQ ID NO: 13153 - RNA, 5782 nt, synthetic construct
  source 1..5782: mol_type = other RNA
aggaaataagagagaaaagaagagtaagaagaaatataagagccaccatggcccctaagaagaagcgtaaagtgagccggatggaacgcctcgtctacgaggtgcggcagaagtgcagaaacatcgaggacatctgcatctcctgcggatctctgaacgtgaccctggagcacccactgttcatcggcggcatgtgccagaactgtaaaaactgttttctggagtgtgcctatcaatacgacgatgacggctaccagagctactgcaccatctgttgcggcggaagagaggtgctgatgtgtggaaataacaactgctgccggtgcttctgcgtggaatgcgtggacctgctggtgggccccggcgccgcccaggccgctattaaggaagatccttggaactgctacatgtgcggccacaagggcacatacggcctgctgagacggagagaggactggcctagcagactgcagatgttcttcgccaataaccacgaccaggagttcgacccccctaaggtgtaccctcccgtccccgccgagaagagaaagcccatccgggtcctgagcctgttcgatggcatcgccaccggtctgctggtgctgaaggacctgggcatccaggtggataggtacattgcctccgaggtgtgcgaggactccatcaccgtgggaatggtgcgtcatcagggcaagatcatgtacgtgggcgacgtgcggagcgtgacacagaagcatatccaggagtggggccctttcgacctggtgatcggcggcagcccttgcaatgacctgagcatcgtgaacccagcccggaagggcctgtacgagggaaccggcagactgttcttcgagttttacagactgctgcacgacgcccggcctaaggaaggcgacgaccggcccttcttttggctgttcgagaatgtggtggccatgggagtcagcgacaagcgggatattagccggttcctggagagcaaccccgtgatgatcgatgccaaggaagtgagcgccgcccaccgggccagatacttctggggcaatctgcctggcatgaacagacccctggccagcaccgtgaacgacaagctggagctgcaggagtgcctggagcacggccggatcgccaagttcagcaaggtgagaaccatcaccacccgaagcaacagcatcaaacaaggcaaggaccagcactttcctgtgttcatgaacgagaaggaggacatcctgtggtgtaccgagatggagagagtgttcgggttcccagtccactacacagatgtcagcaacatgtctagactggccagacagagactgctgggaagaagctggtccgtccctgtgatcagacacctgttcgcccctctgaaggagtacttcgcctgcgtgagcagcggcaacagcaacgccaacagccggggccccagcttctctagcggcctggtgccactgtccctgagagggagccacatgggccccatggagatctacaaaaccgtgagcgcctggaagcggcagcctgtgcgcgtgctgagcctgtttcggaatatcgataaagtcctgaaaagcctgggattcctggagagcggctctggctccggcggtggcaccctgaagtacgtggaggatgtgacaaacgtggtcagacgggatgtggagaagtggggccccttcgatctggtgtacggcagcacccaacccctgggcagctcttgtgaccggtgccctggctggtacatgtttcagttccaccggatcctgcagtacgccctgccgagacaggagtcccagcggccattcttttggattttcatggacaacttgctgctgaccgaggatgaccaggaaactaccactcggttcctgcagaccgaagccgtgaccctgcaggacgtgagaggccgggactaccagaacgccatgcgggtgtggtccaacatccctggactgaaaagcaagcacgcacctctgacccctaaagaagaggagtacctgcaggcccaggtgcggagcagaagcaagctggacgcccctaaggtggatctgctggtgaagaattgcctcctgcccctgagagagtacttcaagtatttcagccagaatagtctgcccctgggaggcagcggcggcggcggcagcctggaggagggcagaagagccaccggcctgcccgccgcccaggtgcaggagcccgtgaccttcaaggacgtggccgtggacttcacccaggaggagtggggccagctggacctggtgcagagaaccctgtacagagacgtgatgctggagacctacggccacctgctgagcgtgggcaaccagatcgccaagcccgaggtgatcagcctgctggagcagggcgaggagccctggggcggcccaagcagcggcgcccctcctcccagcggcggcagcccagccggctccccaacctctaccgaggagggcacctctgagtccgccacccccgagagcggccctggcacctccaccgagcccagcgagggcagcgcacccggcagccctgccggcagccccacctccacagaggagggaaccagcaccgagcccagcgaaggcagcgccccaggcaccagcaccgagcctagtgagcaggagattaaacggatcaacaagatcagaagaagacttgtgaaagacagcaacaccaagaaggccggcaagacaggccccatgaaaaccctgctggttagagtgatgacacccgatctgagagagcggctggaaaacctgagaaagaagcctgaaaatatcccccagcccatcagcaatacatctagagccaacctgaataagctgctgaccgattacaccgaaatgaagaaggcgatcctgcatgtgtactgggaagagttccagaaggaccctgtgggcctgatgagccgggtggcccagcctgccagcaagaagatcgatcagaacaagctgaaacctgagatggacgagaagggcaacctgaccaccgccggctttgcctgctctcagtgtggccagcccctgttcgtgtacaagctggagcaggtgtctgagaagggcaaggcttacaccaactacttcggacggtgcaatgtggccgagcacgaaaagctgatcctgctggcccagctgaagcccgagaaggatagcgacgaagccgtgacatatagcctgggaaagtttgggcagagggccctggatttctacagcattcatgtgaccaaggagtccacccaccccgtgaagcccctggcccagatcgccggaaacagatacgcctccggacctgtgggaaaggccctgagcgacgcatgtatgggcacaatcgcctccttcctgtctaagtaccaggacatcatcatcgaacaccagaaggtggtgaagggcaaccagaagagactggagagcctgcgggagctggccggcaaggaaaacctggaataccctagcgtgaccctgccacctcagcctcacaccaaggagggcgttgatgcctacaacgaagtgatcgcccgggtgcgaatgtgggtgaacctgaacctgtggcagaagctgaagctaagcagagatgatgccaagcctctgctgagactgaagggattcccttcctttcctctggtcgagagacaggccaacgaagtggactggtgggacatggtgtgtaacgtgaagaagctgatcaacgagaaaaaggaggatggcaaggtgttttggcagaatctggctggctacaagagacaggaagccctgagaccatacctgagcagcgaggaagatcggaagaagggaaagaaattcgctcggtaccagctgggcgacctgctgctgcacctggaaaagaagcacggcgaggactggggaaaggtgtacgacgaggcctgggagcggattgacaagaaagtggaaggcctgagcaagcacatcaagctggaagaggaacggagaagcgaggacgcccagagcaaggccgccctgaccgactggctgcgggctaaggccagcttcgtgatcgagggcctgaaggaggccgacaaggacgagttctgcagatgcgagctgaagctgcagaagtggtacggggacctgcggggaaagcccttcgccatcgaagccgagaacagcatcctggacatcagcggcttcagcaagcagtacaactgtgccttcatctggcagaaggacggcgtgaagaagctgaacctgtacctgatcatcaactacttcaagggcggcaagctgcggttcaagaagatcaaacctgaagccttcgaagccaacagattctacaccgtgatcaacaaaaagagcggcgagatcgtgcccatggaggtgaacttcaacttcgacgaccccaacctgatcatcctgcctctggcctttggcaagagacagggcagagaattcatctggaacgacctgctgtccctggaaaccggcagcctgaagctggccaacggaagagtgatcgagaagacactgtacaacagaagaacccggcaggatgagcctgccctgttcgtggccctgaccttcgagcggcgggaggtcctggactcctccaatatcaaaccaatgaacctgatcggcgtggcaagaggcgaaaacatccccgccgtgatcgccctgaccgaccccgagggctgcccactgagccggtttaaggatagcctgggaaacccaacccacatcctgagaatcggcgagagctataaggagaagcagcggaccatccaggccaagaaggaggtggagcagcggagagccggcggctacagccggaagtacgccagcaaagccaagaatctggcagacgatatggtgagaaacaccgctagagatctgctgtactacgccgtgacccaggatgccatgctgatcttcgccaacctgagccggggcttcggccggcagggcaagcggaccttcatggccgagagacagtacacacggatggaggactggctgaccgccaagctggcctacgagggcctgagcaagacctacctgtccaagacactggcccagtacacctccaagacatgcagcaactgtgggtttaccatcaccagcgccgactacgacagggtgctggagaagctgaagaagacagcaacaggctggatgaccacaattaacggcaaggagctgaaggtggagggccagattacctactacaacagatacaagagacagaacgtagtcaaggacctgtccgtcgagctggatagactgagcgaagaatctgtgaacaacgacatctcctcctggacaaagggcagaagcggagaagctctgagcctcctgaagaaaagattctcccatagacccgtgcaggagaagttcgtgtgcctgaactgcggcttcgagacacacgcagccgagcaagccgccctgaacatcgccagatcctggctgttcctgcggagccaggagtacaagaaataccagacaaacaagacaaccggcaacaccgataagagagccttcgtcgagacctggcagtccttttaccggaagaagcttaaggaggtgtggaaacctgccgtgcggtctggcggatctggcggaggctccaccagccccaagaaaaagagaaaagtctaagctgccttctgcggggcttgccttctggccatgcccttcttctctcccttgcacctgtacctcttggtctttgaataaagcctgagtaggaaggctagcaaaaaaaaaaaaaaaaaaaaaaaaaaaaaaaaaaaaaaaaaaaaaaaaaaaaaaaaaaaaaaaaaaaaaaaaaaaaaaaa

SEQ ID NO: 13154 - RNA, 5785 nt, synthetic construct
  source 1..5785: mol_type = other RNA
aggaaataagagagaaaagaagagtaagaagaaatataagagccaccatggcccctaagaagaagcgtaaagtgagccggatggaacgcctcgtctacgaggtgcggcagaagtgcagaaacatcgaggacatctgcatctcctgcggatctctgaacgtgaccctggagcacccactgttcatcggcggcatgtgccagaactgtaaaaactgttttctggagtgtgcctatcaatacgacgatgacggctaccagagctactgcaccatctgttgcggcggaagagaggtgctgatgtgtggaaataacaactgctgccggtgcttctgcgtggaatgcgtggacctgctggtgggccccggcgccgcccaggccgctattaaggaagatccttggaactgctacatgtgcggccacaagggcacatacggcctgctgagacggagagaggactggcctagcagactgcagatgttcttcgccaataaccacgaccaggagttcgacccccctaaggtgtaccctcccgtccccgccgagaagagaaagcccatccgggtcctgagcctgttcgatggcatcgccaccggtctgctggtgctgaaggacctgggcatccaggtggataggtacattgcctccgaggtgtgcgaggactccatcaccgtgggaatggtgcgtcatcagggcaagatcatgtacgtgggcgacgtgcggagcgtgacacagaagcatatccaggagtggggccctttcgacctggtgatcggcggcagcccttgcaatgacctgagcatcgtgaacccagcccggaagggcctgtacgagggaaccggcagactgttcttcgagttttacagactgctgcacgacgcccggcctaaggaaggcgacgaccggcccttcttttggctgttcgagaatgtggtggccatgggagtcagcgacaagcgggatattagccggttcctggagagcaaccccgtgatgatcgatgccaaggaagtgagcgccgcccaccgggccagatacttctggggcaatctgcctggcatgaacagacccctggccagcaccgtgaacgacaagctggagctgcaggagtgcctggagcacggccggatcgccaagttcagcaaggtgagaaccatcaccacccgaagcaacagcatcaaacaaggcaaggaccagcactttcctgtgttcatgaacgagaaggaggacatcctgtggtgtaccgagatggagagagtgttcgggttcccagtccactacacagatgtcagcaacatgtctagactggccagacagagactgctgggaagaagctggtccgtccctgtgatcagacacctgttcgcccctctgaaggagtacttcgcctgcgtgagcagcggcaacagcaacgccaacagccggggccccagcttctctagcggcctggtgccactgtccctgagagggagccacatgggccccatggagatctacaaaaccgtgagcgcctggaagcggcagcctgtgcgcgtgctgagcctgtttcggaatatcgataaagtcctgaaaagcctgggattcctggagagcggctctggctccggcggtggcaccctgaagtacgtggaggatgtgacaaacgtggtcagacgggatgtggagaagtggggccccttcgatctggtgtacggcagcacccaacccctgggcagctcttgtgaccggtgccctggctggtacatgtttcagttccaccggatcctgcagtacgccctgccgagacaggagtcccagcggccattcttttggattttcatggacaacttgctgctgaccgaggatgaccaggaaactaccactcggttcctgcagaccgaagccgtgaccctgcaggacgtgagaggccgggactaccagaacgccatgcgggtgtggtccaacatccctggactgaaaagcaagcacgcacctctgacccctaaagaagaggagtacctgcaggcccaggtgcggagcagaagcaagctggacgcccctaaggtggatctgctggtgaagaattgcctcctgcccctgagagagtacttcaagtatttcagccagaatagtctgcccctgggaggcagcggcggcggcggccccctgaccttcagggacgtggccatcgagttcagccaggaggagtggaagagcctggaccccgtgcagaaggccctgtactgggacgtgatgctggagaactacaggaacctggtgttcctgggcatcctgcccaagtgcatgaccaaggagctgccccccatcggcaacagcaacaccggcgagaagtgccagaccgtgatgctggagaggcacgagtgctacgacgtggagaacttcggcggcccaagcagcggcgcccctcctcccagcggcggcagcccagccggctccccaacctctaccgaggagggcacctctgagtccgccacccccgagagcggccctggcacctccaccgagcccagcgagggcagcgcacccggcagccctgccggcagccccacctccacagaggagggaaccagcaccgagcccagcgaaggcagcgccccaggcaccagcaccgagcctagtgagcaggagattaaacggatcaacaagatcagaagaagacttgtgaaagacagcaacaccaagaaggccggcaagacaggccccatgaaaaccctgctggttagagtgatgacacccgatctgagagagcggctggaaaacctgagaaagaagcctgaaaatatcccccagcccatcagcaatacatctagagccaacctgaataagctgctgaccgattacaccgaaatgaagaaggcgatcctgcatgtgtactgggaagagttccagaaggaccctgtgggcctgatgagccgggtggcccagcctgccagcaagaagatcgatcagaacaagctgaaacctgagatggacgagaagggcaacctgaccaccgccggctttgcctgctctcagtgtggccagcccctgttcgtgtacaagctggagcaggtgtctgagaagggcaaggcttacaccaactacttcggacggtgcaatgtggccgagcacgaaaagctgatcctgctggcccagctgaagcccgagaaggatagcgacgaagccgtgacatatagcctgggaaagtttgggcagagggccctggatttctacagcattcatgtgaccaaggagtccacccaccccgtgaagcccctggcccagatcgccggaaacagatacgcctccggacctgtgggaaaggccctgagcgacgcatgtatgggcacaatcgcctccttcctgtctaagtaccaggacatcatcatcgaacaccagaaggtggtgaagggcaaccagaagagactggagagcctgcgggagctggccggcaaggaaaacctggaataccctagcgtgaccctgccacctcagcctcacaccaaggagggcgttgatgcctacaacgaagtgatcgcccgggtgcgaatgtgggtgaacctgaacctgtggcagaagctgaagctaagcagagatgatgccaagcctctgctgagactgaagggattcccttcctttcctctggtcgagagacaggccaacgaagtggactggtgggacatggtgtgtaacgtgaagaagctgatcaacgagaaaaaggaggatggcaaggtgttttggcagaatctggctggctacaagagacaggaagccctgagaccatacctgagcagcgaggaagatcggaagaagggaaagaaattcgctcggtaccagctgggcgacctgctgctgcacctggaaaagaagcacggcgaggactggggaaaggtgtacgacgaggcctgggagcggattgacaagaaagtggaaggcctgagcaagcacatcaagctggaagaggaacggagaagcgaggacgcccagagcaaggccgccctgaccgactggctgcgggctaaggccagcttcgtgatcgagggcctgaaggaggccgacaaggacgagttctgcagatgcgagctgaagctgcagaagtggtacggggacctgcggggaaagcccttcgccatcgaagccgagaacagcatcctggacatcagcggcttcagcaagcagtacaactgtgccttcatctggcagaaggacggcgtgaagaagctgaacctgtacctgatcatcaactacttcaagggcggcaagctgcggttcaagaagatcaaacctgaagccttcgaagccaacagattctacaccgtgatcaacaaaaagagcggcgagatcgtgcccatggaggtgaacttcaacttcgacgaccccaacctgatcatcctgcctctggcctttggcaagagacagggcagagaattcatctggaacgacctgctgtccctggaaaccggcagcctgaagctggccaacggaagagtgatcgagaagacactgtacaacagaagaacccggcaggatgagcctgccctgttcgtggccctgaccttcgagcggcgggaggtcctggactcctccaatatcaaaccaatgaacctgatcggcgtggcaagaggcgaaaacatccccgccgtgatcgccctgaccgaccccgagggctgcccactgagccggtttaaggatagcctgggaaacccaacccacatcctgagaatcggcgagagctataaggagaagcagcggaccatccaggccaagaaggaggtggagcagcggagagccggcggctacagccggaagtacgccagcaaagccaagaatctggcagacgatatggtgagaaacaccgctagagatctgctgtactacgccgtgacccaggatgccatgctgatcttcgccaacctgagccggggcttcggccggcagggcaagcggaccttcatggccgagagacagtacacacggatggaggactggctgaccgccaagctggcctacgagggcctgagcaagacctacctgtccaagacactggcccagtacacctccaagacatgcagcaactgtgggtttaccatcaccagcgccgactacgacagggtgctggagaagctgaagaagacagcaacaggctggatgaccacaattaacggcaaggagctgaaggtggagggccagattacctactacaacagatacaagagacagaacgtagtcaaggacctgtccgtcgagctggatagactgagcgaagaatctgtgaacaacgacatctcctcctggacaaagggcagaagcggagaagctctgagcctcctgaagaaaagattctcccatagacccgtgcaggagaagttcgtgtgcctgaactgcggcttcgagacacacgcagccgagcaagccgccctgaacatcgccagatcctggctgttcctgcggagccaggagtacaagaaataccagacaaacaagacaaccggcaacaccgataagagagccttcgtcgagacctggcagtccttttaccggaagaagcttaaggaggtgtggaaacctgccgtgcggtctggcggatctggcggaggctccaccagccccaagaaaaagagaaaagtctaagctgccttctgcggggcttgccttctggccatgcccttcttctctcccttgcacctgtacctcttggtctttgaataaagcctgagtaggaaggctagcaaaaaaaaaaaaaaaaaaaaaaaaaaaaaaaaaaaaaaaaaaaaaaaaaaaaaaaaaaaaaaaaaaaaaaaaaaaaaaaa

SEQ ID NO: 13155 - RNA, 5785 nt, synthetic construct
  source 1..5785: mol_type = other RNA
aggaaataagagagaaaagaagagtaagaagaaatataagagccaccatggcccctaagaagaagcgtaaagtgagccggatggaacgcctcgtctacgaggtgcggcagaagtgcagaaacatcgaggacatctgcatctcctgcggatctctgaacgtgaccctggagcacccactgttcatcggcggcatgtgccagaactgtaaaaactgttttctggagtgtgcctatcaatacgacgatgacggctaccagagctactgcaccatctgttgcggcggaagagaggtgctgatgtgtggaaataacaactgctgccggtgcttctgcgtggaatgcgtggacctgctggtgggccccggcgccgcccaggccgctattaaggaagatccttggaactgctacatgtgcggccacaagggcacatacggcctgctgagacggagagaggactggcctagcagactgcagatgttcttcgccaataaccacgaccaggagttcgacccccctaaggtgtaccctcccgtccccgccgagaagagaaagcccatccgggtcctgagcctgttcgatggcatcgccaccggtctgctggtgctgaaggacctgggcatccaggtggataggtacattgcctccgaggtgtgcgaggactccatcaccgtgggaatggtgcgtcatcagggcaagatcatgtacgtgggcgacgtgcggagcgtgacacagaagcatatccaggagtggggccctttcgacctggtgatcggcggcagcccttgcaatgacctgagcatcgtgaacccagcccggaagggcctgtacgagggaaccggcagactgttcttcgagttttacagactgctgcacgacgcccggcctaaggaaggcgacgaccggcccttcttttggctgttcgagaatgtggtggccatgggagtcagcgacaagcgggatattagccggttcctggagagcaaccccgtgatgatcgatgccaaggaagtgagcgccgcccaccgggccagatacttctggggcaatctgcctggcatgaacagacccctggccagcaccgtgaacgacaagctggagctgcaggagtgcctggagcacggccggatcgccaagttcagcaaggtgagaaccatcaccacccgaagcaacagcatcaaacaaggcaaggaccagcactttcctgtgttcatgaacgagaaggaggacatcctgtggtgtaccgagatggagagagtgttcgggttcccagtccactacacagatgtcagcaacatgtctagactggccagacagagactgctgggaagaagctggtccgtccctgtgatcagacacctgttcgcccctctgaaggagtacttcgcctgcgtgagcagcggcaacagcaacgccaacagccggggccccagcttctctagcggcctggtgccactgtccctgagagggagccacatgggccccatggagatctacaaaaccgtgagcgcctggaagcggcagcctgtgcgcgtgctgagcctgtttcggaatatcgataaagtcctgaaaagcctgggattcctggagagcggctctggctccggcggtggcaccctgaagtacgtggaggatgtgacaaacgtggtcagacgggatgtggagaagtggggccccttcgatctggtgtacggcagcacccaacccctgggcagctcttgtgaccggtgccctggctggtacatgtttcagttccaccggatcctgcagtacgccctgccgagacaggagtcccagcggccattcttttggattttcatggacaacttgctgctgaccgaggatgaccaggaaactaccactcggttcctgcagaccgaagccgtgaccctgcaggacgtgagaggccgggactaccagaacgccatgcgggtgtggtccaacatccctggactgaaaagcaagcacgcacctctgacccctaaagaagaggagtacctgcaggcccaggtgcggagcagaagcaagctggacgcccctaaggtggatctgctggtgaagaattgcctcctgcccctgagagagtacttcaagtatttcagccagaatagtctgcccctgggaggcagcggcggcggcgcccaggacgccctgaccttccaggacgtggccgtggacttcacctgggaggagtggggccagctggaccccgcccagcagaacctgtacagggacgtgatgctggagaactaccagaacctgatcagcctgggcttccccgtgagcaagcccgaggtgatcagccagctggagcagggcgaggtgccctgggccctgaagagggccgtggccgagggcagctgccccgactgggaggccaggggcggcccaagcagcggcgcccctcctcccagcggcggcagcccagccggctccccaacctctaccgaggagggcacctctgagtccgccacccccgagagcggccctggcacctccaccgagcccagcgagggcagcgcacccggcagccctgccggcagccccacctccacagaggagggaaccagcaccgagcccagcgaaggcagcgccccaggcaccagcaccgagcctagtgagcaggagattaaacggatcaacaagatcagaagaagacttgtgaaagacagcaacaccaagaaggccggcaagacaggccccatgaaaaccctgctggttagagtgatgacacccgatctgagagagcggctggaaaacctgagaaagaagcctgaaaatatcccccagcccatcagcaatacatctagagccaacctgaataagctgctgaccgattacaccgaaatgaagaaggcgatcctgcatgtgtactgggaagagttccagaaggaccctgtgggcctgatgagccgggtggcccagcctgccagcaagaagatcgatcagaacaagctgaaacctgagatggacgagaagggcaacctgaccaccgccggctttgcctgctctcagtgtggccagcccctgttcgtgtacaagctggagcaggtgtctgagaagggcaaggcttacaccaactacttcggacggtgcaatgtggccgagcacgaaaagctgatcctgctggcccagctgaagcccgagaaggatagcgacgaagccgtgacatatagcctgggaaagtttgggcagagggccctggatttctacagcattcatgtgaccaaggagtccacccaccccgtgaagcccctggcccagatcgccggaaacagatacgcctccggacctgtgggaaaggccctgagcgacgcatgtatgggcacaatcgcctccttcctgtctaagtaccaggacatcatcatcgaacaccagaaggtggtgaagggcaaccagaagagactggagagcctgcgggagctggccggcaaggaaaacctggaataccctagcgtgaccctgccacctcagcctcacaccaaggagggcgttgatgcctacaacgaagtgatcgcccgggtgcgaatgtgggtgaacctgaacctgtggcagaagctgaagctaagcagagatgatgccaagcctctgctgagactgaagggattcccttcctttcctctggtcgagagacaggccaacgaagtggactggtgggacatggtgtgtaacgtgaagaagctgatcaacgagaaaaaggaggatggcaaggtgttttggcagaatctggctggctacaagagacaggaagccctgagaccatacctgagcagcgaggaagatcggaagaagggaaagaaattcgctcggtaccagctgggcgacctgctgctgcacctggaaaagaagcacggcgaggactggggaaaggtgtacgacgaggcctgggagcggattgacaagaaagtggaaggcctgagcaagcacatcaagctggaagaggaacggagaagcgaggacgcccagagcaaggccgccctgaccgactggctgcgggctaaggccagcttcgtgatcgagggcctgaaggaggccgacaaggacgagttctgcagatgcgagctgaagctgcagaagtggtacggggacctgcggggaaagcccttcgccatcgaagccgagaacagcatcctggacatcagcggcttcagcaagcagtacaactgtgccttcatctggcagaaggacggcgtgaagaagctgaacctgtacctgatcatcaactacttcaagggcggcaagctgcggttcaagaagatcaaacctgaagccttcgaagccaacagattctacaccgtgatcaacaaaaagagcggcgagatcgtgcccatggaggtgaacttcaacttcgacgaccccaacctgatcatcctgcctctggcctttggcaagagacagggcagagaattcatctggaacgacctgctgtccctggaaaccggcagcctgaagctggccaacggaagagtgatcgagaagacactgtacaacagaagaacccggcaggatgagcctgccctgttcgtggccctgaccttcgagcggcgggaggtcctggactcctccaatatcaaaccaatgaacctgatcggcgtggcaagaggcgaaaacatccccgccgtgatcgccctgaccgaccccgagggctgcccactgagccggtttaaggatagcctgggaaacccaacccacatcctgagaatcggcgagagctataaggagaagcagcggaccatccaggccaagaaggaggtggagcagcggagagccggcggctacagccggaagtacgccagcaaagccaagaatctggcagacgatatggtgagaaacaccgctagagatctgctgtactacgccgtgacccaggatgccatgctgatcttcgccaacctgagccggggcttcggccggcagggcaagcggaccttcatggccgagagacagtacacacggatggaggactggctgaccgccaagctggcctacgagggcctgagcaagacctacctgtccaagacactggcccagtacacctccaagacatgcagcaactgtgggtttaccatcaccagcgccgactacgacagggtgctggagaagctgaagaagacagcaacaggctggatgaccacaattaacggcaaggagctgaaggtggagggccagattacctactacaacagatacaagagacagaacgtagtcaaggacctgtccgtcgagctggatagactgagcgaagaatctgtgaacaacgacatctcctcctggacaaagggcagaagcggagaagctctgagcctcctgaagaaaagattctcccatagacccgtgcaggagaagttcgtgtgcctgaactgcggcttcgagacacacgcagccgagcaagccgccctgaacatcgccagatcctggctgttcctgcggagccaggagtacaagaaataccagacaaacaagacaaccggcaacaccgataagagagccttcgtcgagacctggcagtccttttaccggaagaagcttaaggaggtgtggaaacctgccgtgcggtctggcggatctggcggaggctccaccagccccaagaaaaagagaaaagtctaagctgccttctgcggggcttgccttctggccatgcccttcttctctcccttgcacctgtacctcttggtctttgaataaagcctgagtaggaaggctagcaaaaaaaaaaaaaaaaaaaaaaaaaaaaaaaaaaaaaaaaaaaaaaaaaaaaaaaaaaaaaaaaaaaaaaaaaaaaaaaa

SEQ ID NO: 13156 - RNA, 5785 nt, synthetic construct
  source 1..5785: mol_type = other RNA
aggaaataagagagaaaagaagagtaagaagaaatataagagccaccatggcccctaagaagaagcgtaaagtgagccggatggaacgcctcgtctacgaggtgcggcagaagtgcagaaacatcgaggacatctgcatctcctgcggatctctgaacgtgaccctggagcacccactgttcatcggcggcatgtgccagaactgtaaaaactgttttctggagtgtgcctatcaatacgacgatgacggctaccagagctactgcaccatctgttgcggcggaagagaggtgctgatgtgtggaaataacaactgctgccggtgcttctgcgtggaatgcgtggacctgctggtgggccccggcgccgcccaggccgctattaaggaagatccttggaactgctacatgtgcggccacaagggcacatacggcctgctgagacggagagaggactggcctagcagactgcagatgttcttcgccaataaccacgaccaggagttcgacccccctaaggtgtaccctcccgtccccgccgagaagagaaagcccatccgggtcctgagcctgttcgatggcatcgccaccggtctgctggtgctgaaggacctgggcatccaggtggataggtacattgcctccgaggtgtgcgaggactccatcaccgtgggaatggtgcgtcatcagggcaagatcatgtacgtgggcgacgtgcggagcgtgacacagaagcatatccaggagtggggccctttcgacctggtgatcggcggcagcccttgcaatgacctgagcatcgtgaacccagcccggaagggcctgtacgagggaaccggcagactgttcttcgagttttacagactgctgcacgacgcccggcctaaggaaggcgacgaccggcccttcttttggctgttcgagaatgtggtggccatgggagtcagcgacaagcgggatattagccggttcctggagagcaaccccgtgatgatcgatgccaaggaagtgagcgccgcccaccgggccagatacttctggggcaatctgcctggcatgaacagacccctggccagcaccgtgaacgacaagctggagctgcaggagtgcctggagcacggccggatcgccaagttcagcaaggtgagaaccatcaccacccgaagcaacagcatcaaacaaggcaaggaccagcactttcctgtgttcatgaacgagaaggaggacatcctgtggtgtaccgagatggagagagtgttcgggttcccagtccactacacagatgtcagcaacatgtctagactggccagacagagactgctgggaagaagctggtccgtccctgtgatcagacacctgttcgcccctctgaaggagtacttcgcctgcgtgagcagcggcaacagcaacgccaacagccggggccccagcttctctagcggcctggtgccactgtccctgagagggagccacatgggccccatggagatctacaaaaccgtgagcgcctggaagcggcagcctgtgcgcgtgctgagcctgtttcggaatatcgataaagtcctgaaaagcctgggattcctggagagcggctctggctccggcggtggcaccctgaagtacgtggaggatgtgacaaacgtggtcagacgggatgtggagaagtggggccccttcgatctggtgtacggcagcacccaacccctgggcagctcttgtgaccggtgccctggctggtacatgtttcagttccaccggatcctgcagtacgccctgccgagacaggagtcccagcggccattcttttggattttcatggacaacttgctgctgaccgaggatgaccaggaaactaccactcggttcctgcagaccgaagccgtgaccctgcaggacgtgagaggccgggactaccagaacgccatgcgggtgtggtccaacatccctggactgaaaagcaagcacgcacctctgacccctaaagaagaggagtacctgcaggcccaggtgcggagcagaagcaagctggacgcccctaaggtggatctgctggtgaagaattgcctcctgcccctgagagagtacttcaagtatttcagccagaatagtctgcccctgggaggcagcggcggcggccaggtgcccgtgatcttcgaggacgtggccgtgtacttctgggaggaggagtgggagatgctggaggagtggcagaaggagctgtacaaggagaccatgaaggagaactacaagaccctggtgagcctgggcatggagctgcccaccgagaagcccgacctgatcgtgaggatcgagagggaggagaacccctgcgtgaaggcccagtgggacagcagggacaagaccaggtggaggaacagcggcggcccaagcagcggcgcccctcctcccagcggcggcagcccagccggctccccaacctctaccgaggagggcacctctgagtccgccacccccgagagcggccctggcacctccaccgagcccagcgagggcagcgcacccggcagccctgccggcagccccacctccacagaggagggaaccagcaccgagcccagcgaaggcagcgccccaggcaccagcaccgagcctagtgagcaggagattaaacggatcaacaagatcagaagaagacttgtgaaagacagcaacaccaagaaggccggcaagacaggccccatgaaaaccctgctggttagagtgatgacacccgatctgagagagcggctggaaaacctgagaaagaagcctgaaaatatcccccagcccatcagcaatacatctagagccaacctgaataagctgctgaccgattacaccgaaatgaagaaggcgatcctgcatgtgtactgggaagagttccagaaggaccctgtgggcctgatgagccgggtggcccagcctgccagcaagaagatcgatcagaacaagctgaaacctgagatggacgagaagggcaacctgaccaccgccggctttgcctgctctcagtgtggccagcccctgttcgtgtacaagctggagcaggtgtctgagaagggcaaggcttacaccaactacttcggacggtgcaatgtggccgagcacgaaaagctgatcctgctggcccagctgaagcccgagaaggatagcgacgaagccgtgacatatagcctgggaaagtttgggcagagggccctggatttctacagcattcatgtgaccaaggagtccacccaccccgtgaagcccctggcccagatcgccggaaacagatacgcctccggacctgtgggaaaggccctgagcgacgcatgtatgggcacaatcgcctccttcctgtctaagtaccaggacatcatcatcgaacaccagaaggtggtgaagggcaaccagaagagactggagagcctgcgggagctggccggcaaggaaaacctggaataccctagcgtgaccctgccacctcagcctcacaccaaggagggcgttgatgcctacaacgaagtgatcgcccgggtgcgaatgtgggtgaacctgaacctgtggcagaagctgaagctaagcagagatgatgccaagcctctgctgagactgaagggattcccttcctttcctctggtcgagagacaggccaacgaagtggactggtgggacatggtgtgtaacgtgaagaagctgatcaacgagaaaaaggaggatggcaaggtgttttggcagaatctggctggctacaagagacaggaagccctgagaccatacctgagcagcgaggaagatcggaagaagggaaagaaattcgctcggtaccagctgggcgacctgctgctgcacctggaaaagaagcacggcgaggactggggaaaggtgtacgacgaggcctgggagcggattgacaagaaagtggaaggcctgagcaagcacatcaagctggaagaggaacggagaagcgaggacgcccagagcaaggccgccctgaccgactggctgcgggctaaggccagcttcgtgatcgagggcctgaaggaggccgacaaggacgagttctgcagatgcgagctgaagctgcagaagtggtacggggacctgcggggaaagcccttcgccatcgaagccgagaacagcatcctggacatcagcggcttcagcaagcagtacaactgtgccttcatctggcagaaggacggcgtgaagaagctgaacctgtacctgatcatcaactacttcaagggcggcaagctgcggttcaagaagatcaaacctgaagccttcgaagccaacagattctacaccgtgatcaacaaaaagagcggcgagatcgtgcccatggaggtgaacttcaacttcgacgaccccaacctgatcatcctgcctctggcctttggcaagagacagggcagagaattcatctggaacgacctgctgtccctggaaaccggcagcctgaagctggccaacggaagagtgatcgagaagacactgtacaacagaagaacccggcaggatgagcctgccctgttcgtggccctgaccttcgagcggcgggaggtcctggactcctccaatatcaaaccaatgaacctgatcggcgtggcaagaggcgaaaacatccccgccgtgatcgccctgaccgaccccgagggctgcccactgagccggtttaaggatagcctgggaaacccaacccacatcctgagaatcggcgagagctataaggagaagcagcggaccatccaggccaagaaggaggtggagcagcggagagccggcggctacagccggaagtacgccagcaaagccaagaatctggcagacgatatggtgagaaacaccgctagagatctgctgtactacgccgtgacccaggatgccatgctgatcttcgccaacctgagccggggcttcggccggcagggcaagcggaccttcatggccgagagacagtacacacggatggaggactggctgaccgccaagctggcctacgagggcctgagcaagacctacctgtccaagacactggcccagtacacctccaagacatgcagcaactgtgggtttaccatcaccagcgccgactacgacagggtgctggagaagctgaagaagacagcaacaggctggatgaccacaattaacggcaaggagctgaaggtggagggccagattacctactacaacagatacaagagacagaacgtagtcaaggacctgtccgtcgagctggatagactgagcgaagaatctgtgaacaacgacatctcctcctggacaaagggcagaagcggagaagctctgagcctcctgaagaaaagattctcccatagacccgtgcaggagaagttcgtgtgcctgaactgcggcttcgagacacacgcagccgagcaagccgccctgaacatcgccagatcctggctgttcctgcggagccaggagtacaagaaataccagacaaacaagacaaccggcaacaccgataagagagccttcgtcgagacctggcagtccttttaccggaagaagcttaaggaggtgtggaaacctgccgtgcggtctggcggatctggcggaggctccaccagccccaagaaaaagagaaaagtctaagctgccttctgcggggcttgccttctggccatgcccttcttctctcccttgcacctgtacctcttggtctttgaataaagcctgagtaggaaggctagcaaaaaaaaaaaaaaaaaaaaaaaaaaaaaaaaaaaaaaaaaaaaaaaaaaaaaaaaaaaaaaaaaaaaaaaaaaaaaaaa

SEQ ID NO: 13157 - RNA, 5785 nt, synthetic construct
  source 1..5785: mol_type = other RNA
aggaaataagagagaaaagaagagtaagaagaaatataagagccaccatggcccctaagaagaagcgtaaagtgagccggatggaacgcctcgtctacgaggtgcggcagaagtgcagaaacatcgaggacatctgcatctcctgcggatctctgaacgtgaccctggagcacccactgttcatcggcggcatgtgccagaactgtaaaaactgttttctggagtgtgcctatcaatacgacgatgacggctaccagagctactgcaccatctgttgcggcggaagagaggtgctgatgtgtggaaataacaactgctgccggtgcttctgcgtggaatgcgtggacctgctggtgggccccggcgccgcccaggccgctattaaggaagatccttggaactgctacatgtgcggccacaagggcacatacggcctgctgagacggagagaggactggcctagcagactgcagatgttcttcgccaataaccacgaccaggagttcgacccccctaaggtgtaccctcccgtccccgccgagaagagaaagcccatccgggtcctgagcctgttcgatggcatcgccaccggtctgctggtgctgaaggacctgggcatccaggtggataggtacattgcctccgaggtgtgcgaggactccatcaccgtgggaatggtgcgtcatcagggcaagatcatgtacgtgggcgacgtgcggagcgtgacacagaagcatatccaggagtggggccctttcgacctggtgatcggcggcagcccttgcaatgacctgagcatcgtgaacccagcccggaagggcctgtacgagggaaccggcagactgttcttcgagttttacagactgctgcacgacgcccggcctaaggaaggcgacgaccggcccttcttttggctgttcgagaatgtggtggccatgggagtcagcgacaagcgggatattagccggttcctggagagcaaccccgtgatgatcgatgccaaggaagtgagcgccgcccaccgggccagatacttctggggcaatctgcctggcatgaacagacccctggccagcaccgtgaacgacaagctggagctgcaggagtgcctggagcacggccggatcgccaagttcagcaaggtgagaaccatcaccacccgaagcaacagcatcaaacaaggcaaggaccagcactttcctgtgttcatgaacgagaaggaggacatcctgtggtgtaccgagatggagagagtgttcgggttcccagtccactacacagatgtcagcaacatgtctagactggccagacagagactgctgggaagaagctggtccgtccctgtgatcagacacctgttcgcccctctgaaggagtacttcgcctgcgtgagcagcggcaacagcaacgccaacagccggggccccagcttctctagcggcctggtgccactgtccctgagagggagccacatgggccccatggagatctacaaaaccgtgagcgcctggaagcggcagcctgtgcgcgtgctgagcctgtttcggaatatcgataaagtcctgaaaagcctgggattcctggagagcggctctggctccggcggtggcaccctgaagtacgtggaggatgtgacaaacgtggtcagacgggatgtggagaagtggggccccttcgatctggtgtacggcagcacccaacccctgggcagctcttgtgaccggtgccctggctggtacatgtttcagttccaccggatcctgcagtacgccctgccgagacaggagtcccagcggccattcttttggattttcatggacaacttgctgctgaccgaggatgaccaggaaactaccactcggttcctgcagaccgaagccgtgaccctgcaggacgtgagaggccgggactaccagaacgccatgcgggtgtggtccaacatccctggactgaaaagcaagcacgcacctctgacccctaaagaagaggagtacctgcaggcccaggtgcggagcagaagcaagctggacgcccctaaggtggatctgctggtgaagaattgcctcctgcccctgagagagtacttcaagtatttcagccagaatagtctgcccctgggaggcagcggcggcggcgaggagctgcccgtggccttcgaggacgtggccgtgtacttcaccagggaggagtggggcatgctggacaagaggaggaaggagctgtacagggacgtgatgaggaggaactacgagctgctggccagcctgggccccgccgccgccaagcccgacctgatcagcaagctggagaggggcgccgccccctggatcaaggaccccaacggccccaagtggggcaagggcaagaagaagatggtgggcggcccaagcagcggcgcccctcctcccagcggcggcagcccagccggctccccaacctctaccgaggagggcacctctgagtccgccacccccgagagcggccctggcacctccaccgagcccagcgagggcagcgcacccggcagccctgccggcagccccacctccacagaggagggaaccagcaccgagcccagcgaaggcagcgccccaggcaccagcaccgagcctagtgagcaggagattaaacggatcaacaagatcagaagaagacttgtgaaagacagcaacaccaagaaggccggcaagacaggccccatgaaaaccctgctggttagagtgatgacacccgatctgagagagcggctggaaaacctgagaaagaagcctgaaaatatcccccagcccatcagcaatacatctagagccaacctgaataagctgctgaccgattacaccgaaatgaagaaggcgatcctgcatgtgtactgggaagagttccagaaggaccctgtgggcctgatgagccgggtggcccagcctgccagcaagaagatcgatcagaacaagctgaaacctgagatggacgagaagggcaacctgaccaccgccggctttgcctgctctcagtgtggccagcccctgttcgtgtacaagctggagcaggtgtctgagaagggcaaggcttacaccaactacttcggacggtgcaatgtggccgagcacgaaaagctgatcctgctggcccagctgaagcccgagaaggatagcgacgaagccgtgacatatagcctgggaaagtttgggcagagggccctggatttctacagcattcatgtgaccaaggagtccacccaccccgtgaagcccctggcccagatcgccggaaacagatacgcctccggacctgtgggaaaggccctgagcgacgcatgtatgggcacaatcgcctccttcctgtctaagtaccaggacatcatcatcgaacaccagaaggtggtgaagggcaaccagaagagactggagagcctgcgggagctggccggcaaggaaaacctggaataccctagcgtgaccctgccacctcagcctcacaccaaggagggcgttgatgcctacaacgaagtgatcgcccgggtgcgaatgtgggtgaacctgaacctgtggcagaagctgaagctaagcagagatgatgccaagcctctgctgagactgaagggattcccttcctttcctctggtcgagagacaggccaacgaagtggactggtgggacatggtgtgtaacgtgaagaagctgatcaacgagaaaaaggaggatggcaaggtgttttggcagaatctggctggctacaagagacaggaagccctgagaccatacctgagcagcgaggaagatcggaagaagggaaagaaattcgctcggtaccagctgggcgacctgctgctgcacctggaaaagaagcacggcgaggactggggaaaggtgtacgacgaggcctgggagcggattgacaagaaagtggaaggcctgagcaagcacatcaagctggaagaggaacggagaagcgaggacgcccagagcaaggccgccctgaccgactggctgcgggctaaggccagcttcgtgatcgagggcctgaaggaggccgacaaggacgagttctgcagatgcgagctgaagctgcagaagtggtacggggacctgcggggaaagcccttcgccatcgaagccgagaacagcatcctggacatcagcggcttcagcaagcagtacaactgtgccttcatctggcagaaggacggcgtgaagaagctgaacctgtacctgatcatcaactacttcaagggcggcaagctgcggttcaagaagatcaaacctgaagccttcgaagccaacagattctacaccgtgatcaacaaaaagagcggcgagatcgtgcccatggaggtgaacttcaacttcgacgaccccaacctgatcatcctgcctctggcctttggcaagagacagggcagagaattcatctggaacgacctgctgtccctggaaaccggcagcctgaagctggccaacggaagagtgatcgagaagacactgtacaacagaagaacccggcaggatgagcctgccctgttcgtggccctgaccttcgagcggcgggaggtcctggactcctccaatatcaaaccaatgaacctgatcggcgtggcaagaggcgaaaacatccccgccgtgatcgccctgaccgaccccgagggctgcccactgagccggtttaaggatagcctgggaaacccaacccacatcctgagaatcggcgagagctataaggagaagcagcggaccatccaggccaagaaggaggtggagcagcggagagccggcggctacagccggaagtacgccagcaaagccaagaatctggcagacgatatggtgagaaacaccgctagagatctgctgtactacgccgtgacccaggatgccatgctgatcttcgccaacctgagccggggcttcggccggcagggcaagcggaccttcatggccgagagacagtacacacggatggaggactggctgaccgccaagctggcctacgagggcctgagcaagacctacctgtccaagacactggcccagtacacctccaagacatgcagcaactgtgggtttaccatcaccagcgccgactacgacagggtgctggagaagctgaagaagacagcaacaggctggatgaccacaattaacggcaaggagctgaaggtggagggccagattacctactacaacagatacaagagacagaacgtagtcaaggacctgtccgtcgagctggatagactgagcgaagaatctgtgaacaacgacatctcctcctggacaaagggcagaagcggagaagctctgagcctcctgaagaaaagattctcccatagacccgtgcaggagaagttcgtgtgcctgaactgcggcttcgagacacacgcagccgagcaagccgccctgaacatcgccagatcctggctgttcctgcggagccaggagtacaagaaataccagacaaacaagacaaccggcaacaccgataagagagccttcgtcgagacctggcagtccttttaccggaagaagcttaaggaggtgtggaaacctgccgtgcggtctggcggatctggcggaggctccaccagccccaagaaaaagagaaaagtctaagctgccttctgcggggcttgccttctggccatgcccttcttctctcccttgcacctgtacctcttggtctttgaataaagcctgagtaggaaggctagcaaaaaaaaaaaaaaaaaaaaaaaaaaaaaaaaaaaaaaaaaaaaaaaaaaaaaaaaaaaaaaaaaaaaaaaaaaaaaaaa

SEQ ID NO: 13158 - RNA, 5785 nt, synthetic construct
  source 1..5785: mol_type = other RNA
aggaaataagagagaaaagaagagtaagaagaaatataagagccaccatggcccctaagaagaagcgtaaagtgagccggatggaacgcctcgtctacgaggtgcggcagaagtgcagaaacatcgaggacatctgcatctcctgcggatctctgaacgtgaccctggagcacccactgttcatcggcggcatgtgccagaactgtaaaaactgttttctggagtgtgcctatcaatacgacgatgacggctaccagagctactgcaccatctgttgcggcggaagagaggtgctgatgtgtggaaataacaactgctgccggtgcttctgcgtggaatgcgtggacctgctggtgggccccggcgccgcccaggccgctattaaggaagatccttggaactgctacatgtgcggccacaagggcacatacggcctgctgagacggagagaggactggcctagcagactgcagatgttcttcgccaataaccacgaccaggagttcgacccccctaaggtgtaccctcccgtccccgccgagaagagaaagcccatccgggtcctgagcctgttcgatggcatcgccaccggtctgctggtgctgaaggacctgggcatccaggtggataggtacattgcctccgaggtgtgcgaggactccatcaccgtgggaatggtgcgtcatcagggcaagatcatgtacgtgggcgacgtgcggagcgtgacacagaagcatatccaggagtggggccctttcgacctggtgatcggcggcagcccttgcaatgacctgagcatcgtgaacccagcccggaagggcctgtacgagggaaccggcagactgttcttcgagttttacagactgctgcacgacgcccggcctaaggaaggcgacgaccggcccttcttttggctgttcgagaatgtggtggccatgggagtcagcgacaagcgggatattagccggttcctggagagcaaccccgtgatgatcgatgccaaggaagtgagcgccgcccaccgggccagatacttctggggcaatctgcctggcatgaacagacccctggccagcaccgtgaacgacaagctggagctgcaggagtgcctggagcacggccggatcgccaagttcagcaaggtgagaaccatcaccacccgaagcaacagcatcaaacaaggcaaggaccagcactttcctgtgttcatgaacgagaaggaggacatcctgtggtgtaccgagatggagagagtgttcgggttcccagtccactacacagatgtcagcaacatgtctagactggccagacagagactgctgggaagaagctggtccgtccctgtgatcagacacctgttcgcccctctgaaggagtacttcgcctgcgtgagcagcggcaacagcaacgccaacagccggggccccagcttctctagcggcctggtgccactgtccctgagagggagccacatgggccccatggagatctacaaaaccgtgagcgcctggaagcggcagcctgtgcgcgtgctgagcctgtttcggaatatcgataaagtcctgaaaagcctgggattcctggagagcggctctggctccggcggtggcaccctgaagtacgtggaggatgtgacaaacgtggtcagacgggatgtggagaagtggggccccttcgatctggtgtacggcagcacccaacccctgggcagctcttgtgaccggtgccctggctggtacatgtttcagttccaccggatcctgcagtacgccctgccgagacaggagtcccagcggccattcttttggattttcatggacaacttgctgctgaccgaggatgaccaggaaactaccactcggttcctgcagaccgaagccgtgaccctgcaggacgtgagaggccgggactaccagaacgccatgcgggtgtggtccaacatccctggactgaaaagcaagcacgcacctctgacccctaaagaagaggagtacctgcaggcccaggtgcggagcagaagcaagctggacgcccctaaggtggatctgctggtgaagaattgcctcctgcccctgagagagtacttcaagtatttcagccagaatagtctgcccctgggaggcagcggcggcggccccctggagctggtgaccttcaaggacgtggccgtggacttcagctgggaggagtggggccacctggagcccagccagaaggagctgtacagggaggtgatgctggagaactacaggaacctggtgtgcctgggcctggccatcagcaagcccgacgtgatcttccagctggagcagggcgaggccccctggatgcccgagagggagggccccaagtgcaggtgcgccgactggaagaccaggggcggcccaagcagcggcgcccctcctcccagcggcggcagcccagccggctccccaacctctaccgaggagggcacctctgagtccgccacccccgagagcggccctggcacctccaccgagcccagcgagggcagcgcacccggcagccctgccggcagccccacctccacagaggagggaaccagcaccgagcccagcgaaggcagcgccccaggcaccagcaccgagcctagtgagcaggagattaaacggatcaacaagatcagaagaagacttgtgaaagacagcaacaccaagaaggccggcaagacaggccccatgaaaaccctgctggttagagtgatgacacccgatctgagagagcggctggaaaacctgagaaagaagcctgaaaatatcccccagcccatcagcaatacatctagagccaacctgaataagctgctgaccgattacaccgaaatgaagaaggcgatcctgcatgtgtactgggaagagttccagaaggaccctgtgggcctgatgagccgggtggcccagcctgccagcaagaagatcgatcagaacaagctgaaacctgagatggacgagaagggcaacctgaccaccgccggctttgcctgctctcagtgtggccagcccctgttcgtgtacaagctggagcaggtgtctgagaagggcaaggcttacaccaactacttcggacggtgcaatgtggccgagcacgaaaagctgatcctgctggcccagctgaagcccgagaaggatagcgacgaagccgtgacatatagcctgggaaagtttgggcagagggccctggatttctacagcattcatgtgaccaaggagtccacccaccccgtgaagcccctggcccagatcgccggaaacagatacgcctccggacctgtgggaaaggccctgagcgacgcatgtatgggcacaatcgcctccttcctgtctaagtaccaggacatcatcatcgaacaccagaaggtggtgaagggcaaccagaagagactggagagcctgcgggagctggccggcaaggaaaacctggaataccctagcgtgaccctgccacctcagcctcacaccaaggagggcgttgatgcctacaacgaagtgatcgcccgggtgcgaatgtgggtgaacctgaacctgtggcagaagctgaagctaagcagagatgatgccaagcctctgctgagactgaagggattcccttcctttcctctggtcgagagacaggccaacgaagtggactggtgggacatggtgtgtaacgtgaagaagctgatcaacgagaaaaaggaggatggcaaggtgttttggcagaatctggctggctacaagagacaggaagccctgagaccatacctgagcagcgaggaagatcggaagaagggaaagaaattcgctcggtaccagctgggcgacctgctgctgcacctggaaaagaagcacggcgaggactggggaaaggtgtacgacgaggcctgggagcggattgacaagaaagtggaaggcctgagcaagcacatcaagctggaagaggaacggagaagcgaggacgcccagagcaaggccgccctgaccgactggctgcgggctaaggccagcttcgtgatcgagggcctgaaggaggccgacaaggacgagttctgcagatgcgagctgaagctgcagaagtggtacggggacctgcggggaaagcccttcgccatcgaagccgagaacagcatcctggacatcagcggcttcagcaagcagtacaactgtgccttcatctggcagaaggacggcgtgaagaagctgaacctgtacctgatcatcaactacttcaagggcggcaagctgcggttcaagaagatcaaacctgaagccttcgaagccaacagattctacaccgtgatcaacaaaaagagcggcgagatcgtgcccatggaggtgaacttcaacttcgacgaccccaacctgatcatcctgcctctggcctttggcaagagacagggcagagaattcatctggaacgacctgctgtccctggaaaccggcagcctgaagctggccaacggaagagtgatcgagaagacactgtacaacagaagaacccggcaggatgagcctgccctgttcgtggccctgaccttcgagcggcgggaggtcctggactcctccaatatcaaaccaatgaacctgatcggcgtggcaagaggcgaaaacatccccgccgtgatcgccctgaccgaccccgagggctgcccactgagccggtttaaggatagcctgggaaacccaacccacatcctgagaatcggcgagagctataaggagaagcagcggaccatccaggccaagaaggaggtggagcagcggagagccggcggctacagccggaagtacgccagcaaagccaagaatctggcagacgatatggtgagaaacaccgctagagatctgctgtactacgccgtgacccaggatgccatgctgatcttcgccaacctgagccggggcttcggccggcagggcaagcggaccttcatggccgagagacagtacacacggatggaggactggctgaccgccaagctggcctacgagggcctgagcaagacctacctgtccaagacactggcccagtacacctccaagacatgcagcaactgtgggtttaccatcaccagcgccgactacgacagggtgctggagaagctgaagaagacagcaacaggctggatgaccacaattaacggcaaggagctgaaggtggagggccagattacctactacaacagatacaagagacagaacgtagtcaaggacctgtccgtcgagctggatagactgagcgaagaatctgtgaacaacgacatctcctcctggacaaagggcagaagcggagaagctctgagcctcctgaagaaaagattctcccatagacccgtgcaggagaagttcgtgtgcctgaactgcggcttcgagacacacgcagccgagcaagccgccctgaacatcgccagatcctggctgttcctgcggagccaggagtacaagaaataccagacaaacaagacaaccggcaacaccgataagagagccttcgtcgagacctggcagtccttttaccggaagaagcttaaggaggtgtggaaacctgccgtgcggtctggcggatctggcggaggctccaccagccccaagaaaaagagaaaagtctaagctgccttctgcggggcttgccttctggccatgcccttcttctctcccttgcacctgtacctcttggtctttgaataaagcctgagtaggaaggctagcaaaaaaaaaaaaaaaaaaaaaaaaaaaaaaaaaaaaaaaaaaaaaaaaaaaaaaaaaaaaaaaaaaaaaaaaaaaaaaaa

SEQ ID NO: 13159 - RNA, 5785 nt, synthetic construct
  source 1..5785: mol_type = other RNA
aggaaataagagagaaaagaagagtaagaagaaatataagagccaccatggcccctaagaagaagcgtaaagtgagccggatggaacgcctcgtctacgaggtgcggcagaagtgcagaaacatcgaggacatctgcatctcctgcggatctctgaacgtgaccctggagcacccactgttcatcggcggcatgtgccagaactgtaaaaactgttttctggagtgtgcctatcaatacgacgatgacggctaccagagctactgcaccatctgttgcggcggaagagaggtgctgatgtgtggaaataacaactgctgccggtgcttctgcgtggaatgcgtggacctgctggtgggccccggcgccgcccaggccgctattaaggaagatccttggaactgctacatgtgcggccacaagggcacatacggcctgctgagacggagagaggactggcctagcagactgcagatgttcttcgccaataaccacgaccaggagttcgacccccctaaggtgtaccctcccgtccccgccgagaagagaaagcccatccgggtcctgagcctgttcgatggcatcgccaccggtctgctggtgctgaaggacctgggcatccaggtggataggtacattgcctccgaggtgtgcgaggactccatcaccgtgggaatggtgcgtcatcagggcaagatcatgtacgtgggcgacgtgcggagcgtgacacagaagcatatccaggagtggggccctttcgacctggtgatcggcggcagcccttgcaatgacctgagcatcgtgaacccagcccggaagggcctgtacgagggaaccggcagactgttcttcgagttttacagactgctgcacgacgcccggcctaaggaaggcgacgaccggcccttcttttggctgttcgagaatgtggtggccatgggagtcagcgacaagcgggatattagccggttcctggagagcaaccccgtgatgatcgatgccaaggaagtgagcgccgcccaccgggccagatacttctggggcaatctgcctggcatgaacagacccctggccagcaccgtgaacgacaagctggagctgcaggagtgcctggagcacggccggatcgccaagttcagcaaggtgagaaccatcaccacccgaagcaacagcatcaaacaaggcaaggaccagcactttcctgtgttcatgaacgagaaggaggacatcctgtggtgtaccgagatggagagagtgttcgggttcccagtccactacacagatgtcagcaacatgtctagactggccagacagagactgctgggaagaagctggtccgtccctgtgatcagacacctgttcgcccctctgaaggagtacttcgcctgcgtgagcagcggcaacagcaacgccaacagccggggccccagcttctctagcggcctggtgccactgtccctgagagggagccacatgggccccatggagatctacaaaaccgtgagcgcctggaagcggcagcctgtgcgcgtgctgagcctgtttcggaatatcgataaagtcctgaaaagcctgggattcctggagagcggctctggctccggcggtggcaccctgaagtacgtggaggatgtgacaaacgtggtcagacgggatgtggagaagtggggccccttcgatctggtgtacggcagcacccaacccctgggcagctcttgtgaccggtgccctggctggtacatgtttcagttccaccggatcctgcagtacgccctgccgagacaggagtcccagcggccattcttttggattttcatggacaacttgctgctgaccgaggatgaccaggaaactaccactcggttcctgcagaccgaagccgtgaccctgcaggacgtgagaggccgggactaccagaacgccatgcgggtgtggtccaacatccctggactgaaaagcaagcacgcacctctgacccctaaagaagaggagtacctgcaggcccaggtgcggagcagaagcaagctggacgcccctaaggtggatctgctggtgaagaattgcctcctgcccctgagagagtacttcaagtatttcagccagaatagtctgcccctgggaggcagcggcggcggcgagatgggcctgctgaccttcagggacatcgccatcgagttcagcctggccgagtggcagtgcctggaccacgcccagaggaacctgtacagggacgtgatgctggagaactacaggaacctggtgagcctgggcatcgccgtgagcaagcccgacctgatcacctgcctggagcagaacaaggagcccaggaacatcaagaggaacgagatggtggccaagcaccccggcagggagaagagcggcggcccaagcagcggcgcccctcctcccagcggcggcagcccagccggctccccaacctctaccgaggagggcacctctgagtccgccacccccgagagcggccctggcacctccaccgagcccagcgagggcagcgcacccggcagccctgccggcagccccacctccacagaggagggaaccagcaccgagcccagcgaaggcagcgccccaggcaccagcaccgagcctagtgagcaggagattaaacggatcaacaagatcagaagaagacttgtgaaagacagcaacaccaagaaggccggcaagacaggccccatgaaaaccctgctggttagagtgatgacacccgatctgagagagcggctggaaaacctgagaaagaagcctgaaaatatcccccagcccatcagcaatacatctagagccaacctgaataagctgctgaccgattacaccgaaatgaagaaggcgatcctgcatgtgtactgggaagagttccagaaggaccctgtgggcctgatgagccgggtggcccagcctgccagcaagaagatcgatcagaacaagctgaaacctgagatggacgagaagggcaacctgaccaccgccggctttgcctgctctcagtgtggccagcccctgttcgtgtacaagctggagcaggtgtctgagaagggcaaggcttacaccaactacttcggacggtgcaatgtggccgagcacgaaaagctgatcctgctggcccagctgaagcccgagaaggatagcgacgaagccgtgacatatagcctgggaaagtttgggcagagggccctggatttctacagcattcatgtgaccaaggagtccacccaccccgtgaagcccctggcccagatcgccggaaacagatacgcctccggacctgtgggaaaggccctgagcgacgcatgtatgggcacaatcgcctccttcctgtctaagtaccaggacatcatcatcgaacaccagaaggtggtgaagggcaaccagaagagactggagagcctgcgggagctggccggcaaggaaaacctggaataccctagcgtgaccctgccacctcagcctcacaccaaggagggcgttgatgcctacaacgaagtgatcgcccgggtgcgaatgtgggtgaacctgaacctgtggcagaagctgaagctaagcagagatgatgccaagcctctgctgagactgaagggattcccttcctttcctctggtcgagagacaggccaacgaagtggactggtgggacatggtgtgtaacgtgaagaagctgatcaacgagaaaaaggaggatggcaaggtgttttggcagaatctggctggctacaagagacaggaagccctgagaccatacctgagcagcgaggaagatcggaagaagggaaagaaattcgctcggtaccagctgggcgacctgctgctgcacctggaaaagaagcacggcgaggactggggaaaggtgtacgacgaggcctgggagcggattgacaagaaagtggaaggcctgagcaagcacatcaagctggaagaggaacggagaagcgaggacgcccagagcaaggccgccctgaccgactggctgcgggctaaggccagcttcgtgatcgagggcctgaaggaggccgacaaggacgagttctgcagatgcgagctgaagctgcagaagtggtacggggacctgcggggaaagcccttcgccatcgaagccgagaacagcatcctggacatcagcggcttcagcaagcagtacaactgtgccttcatctggcagaaggacggcgtgaagaagctgaacctgtacctgatcatcaactacttcaagggcggcaagctgcggttcaagaagatcaaacctgaagccttcgaagccaacagattctacaccgtgatcaacaaaaagagcggcgagatcgtgcccatggaggtgaacttcaacttcgacgaccccaacctgatcatcctgcctctggcctttggcaagagacagggcagagaattcatctggaacgacctgctgtccctggaaaccggcagcctgaagctggccaacggaagagtgatcgagaagacactgtacaacagaagaacccggcaggatgagcctgccctgttcgtggccctgaccttcgagcggcgggaggtcctggactcctccaatatcaaaccaatgaacctgatcggcgtggcaagaggcgaaaacatccccgccgtgatcgccctgaccgaccccgagggctgcccactgagccggtttaaggatagcctgggaaacccaacccacatcctgagaatcggcgagagctataaggagaagcagcggaccatccaggccaagaaggaggtggagcagcggagagccggcggctacagccggaagtacgccagcaaagccaagaatctggcagacgatatggtgagaaacaccgctagagatctgctgtactacgccgtgacccaggatgccatgctgatcttcgccaacctgagccggggcttcggccggcagggcaagcggaccttcatggccgagagacagtacacacggatggaggactggctgaccgccaagctggcctacgagggcctgagcaagacctacctgtccaagacactggcccagtacacctccaagacatgcagcaactgtgggtttaccatcaccagcgccgactacgacagggtgctggagaagctgaagaagacagcaacaggctggatgaccacaattaacggcaaggagctgaaggtggagggccagattacctactacaacagatacaagagacagaacgtagtcaaggacctgtccgtcgagctggatagactgagcgaagaatctgtgaacaacgacatctcctcctggacaaagggcagaagcggagaagctctgagcctcctgaagaaaagattctcccatagacccgtgcaggagaagttcgtgtgcctgaactgcggcttcgagacacacgcagccgagcaagccgccctgaacatcgccagatcctggctgttcctgcggagccaggagtacaagaaataccagacaaacaagacaaccggcaacaccgataagagagccttcgtcgagacctggcagtccttttaccggaagaagcttaaggaggtgtggaaacctgccgtgcggtctggcggatctggcggaggctccaccagccccaagaaaaagagaaaagtctaagctgccttctgcggggcttgccttctggccatgcccttcttctctcccttgcacctgtacctcttggtctttgaataaagcctgagtaggaaggctagcaaaaaaaaaaaaaaaaaaaaaaaaaaaaaaaaaaaaaaaaaaaaaaaaaaaaaaaaaaaaaaaaaaaaaaaaaaaaaaaa

SEQ ID NO: 13160 - RNA, 5785 nt, synthetic construct
  source 1..5785: mol_type = other RNA
aggaaataagagagaaaagaagagtaagaagaaatataagagccaccatggcccctaagaagaagcgtaaagtgagccggatggaacgcctcgtctacgaggtgcggcagaagtgcagaaacatcgaggacatctgcatctcctgcggatctctgaacgtgaccctggagcacccactgttcatcggcggcatgtgccagaactgtaaaaactgttttctggagtgtgcctatcaatacgacgatgacggctaccagagctactgcaccatctgttgcggcggaagagaggtgctgatgtgtggaaataacaactgctgccggtgcttctgcgtggaatgcgtggacctgctggtgggccccggcgccgcccaggccgctattaaggaagatccttggaactgctacatgtgcggccacaagggcacatacggcctgctgagacggagagaggactggcctagcagactgcagatgttcttcgccaataaccacgaccaggagttcgacccccctaaggtgtaccctcccgtccccgccgagaagagaaagcccatccgggtcctgagcctgttcgatggcatcgccaccggtctgctggtgctgaaggacctgggcatccaggtggataggtacattgcctccgaggtgtgcgaggactccatcaccgtgggaatggtgcgtcatcagggcaagatcatgtacgtgggcgacgtgcggagcgtgacacagaagcatatccaggagtggggccctttcgacctggtgatcggcggcagcccttgcaatgacctgagcatcgtgaacccagcccggaagggcctgtacgagggaaccggcagactgttcttcgagttttacagactgctgcacgacgcccggcctaaggaaggcgacgaccggcccttcttttggctgttcgagaatgtggtggccatgggagtcagcgacaagcgggatattagccggttcctggagagcaaccccgtgatgatcgatgccaaggaagtgagcgccgcccaccgggccagatacttctggggcaatctgcctggcatgaacagacccctggccagcaccgtgaacgacaagctggagctgcaggagtgcctggagcacggccggatcgccaagttcagcaaggtgagaaccatcaccacccgaagcaacagcatcaaacaaggcaaggaccagcactttcctgtgttcatgaacgagaaggaggacatcctgtggtgtaccgagatggagagagtgttcgggttcccagtccactacacagatgtcagcaacatgtctagactggccagacagagactgctgggaagaagctggtccgtccctgtgatcagacacctgttcgcccctctgaaggagtacttcgcctgcgtgagcagcggcaacagcaacgccaacagccggggccccagcttctctagcggcctggtgccactgtccctgagagggagccacatgggccccatggagatctacaaaaccgtgagcgcctggaagcggcagcctgtgcgcgtgctgagcctgtttcggaatatcgataaagtcctgaaaagcctgggattcctggagagcggctctggctccggcggtggcaccctgaagtacgtggaggatgtgacaaacgtggtcagacgggatgtggagaagtggggccccttcgatctggtgtacggcagcacccaacccctgggcagctcttgtgaccggtgccctggctggtacatgtttcagttccaccggatcctgcagtacgccctgccgagacaggagtcccagcggccattcttttggattttcatggacaacttgctgctgaccgaggatgaccaggaaactaccactcggttcctgcagaccgaagccgtgaccctgcaggacgtgagaggccgggactaccagaacgccatgcgggtgtggtccaacatccctggactgaaaagcaagcacgcacctctgacccctaaagaagaggagtacctgcaggcccaggtgcggagcagaagcaagctggacgcccctaaggtggatctgctggtgaagaattgcctcctgcccctgagagagtacttcaagtatttcagccagaatagtctgcccctgggaggcagcggcggcggcagccagggcctggtgaccttcagggacgtggccctggacttcagccaggaggagtgggagtggctggaccccagccagaaggacctgtacagggacgtgatgctggagaactacaggaacctggtgtgcctgggcctgagcatcagcaagcccaacatgatcagcctgctggagcagggcaaggagccctggatggtgcagagggagatgagcgacgacccctacaccgactgggagagctggggcggcccaagcagcggcgcccctcctcccagcggcggcagcccagccggctccccaacctctaccgaggagggcacctctgagtccgccacccccgagagcggccctggcacctccaccgagcccagcgagggcagcgcacccggcagccctgccggcagccccacctccacagaggagggaaccagcaccgagcccagcgaaggcagcgccccaggcaccagcaccgagcctagtgagcaggagattaaacggatcaacaagatcagaagaagacttgtgaaagacagcaacaccaagaaggccggcaagacaggccccatgaaaaccctgctggttagagtgatgacacccgatctgagagagcggctggaaaacctgagaaagaagcctgaaaatatcccccagcccatcagcaatacatctagagccaacctgaataagctgctgaccgattacaccgaaatgaagaaggcgatcctgcatgtgtactgggaagagttccagaaggaccctgtgggcctgatgagccgggtggcccagcctgccagcaagaagatcgatcagaacaagctgaaacctgagatggacgagaagggcaacctgaccaccgccggctttgcctgctctcagtgtggccagcccctgttcgtgtacaagctggagcaggtgtctgagaagggcaaggcttacaccaactacttcggacggtgcaatgtggccgagcacgaaaagctgatcctgctggcccagctgaagcccgagaaggatagcgacgaagccgtgacatatagcctgggaaagtttgggcagagggccctggatttctacagcattcatgtgaccaaggagtccacccaccccgtgaagcccctggcccagatcgccggaaacagatacgcctccggacctgtgggaaaggccctgagcgacgcatgtatgggcacaatcgcctccttcctgtctaagtaccaggacatcatcatcgaacaccagaaggtggtgaagggcaaccagaagagactggagagcctgcgggagctggccggcaaggaaaacctggaataccctagcgtgaccctgccacctcagcctcacaccaaggagggcgttgatgcctacaacgaagtgatcgcccgggtgcgaatgtgggtgaacctgaacctgtggcagaagctgaagctaagcagagatgatgccaagcctctgctgagactgaagggattcccttcctttcctctggtcgagagacaggccaacgaagtggactggtgggacatggtgtgtaacgtgaagaagctgatcaacgagaaaaaggaggatggcaaggtgttttggcagaatctggctggctacaagagacaggaagccctgagaccatacctgagcagcgaggaagatcggaagaagggaaagaaattcgctcggtaccagctgggcgacctgctgctgcacctggaaaagaagcacggcgaggactggggaaaggtgtacgacgaggcctgggagcggattgacaagaaagtggaaggcctgagcaagcacatcaagctggaagaggaacggagaagcgaggacgcccagagcaaggccgccctgaccgactggctgcgggctaaggccagcttcgtgatcgagggcctgaaggaggccgacaaggacgagttctgcagatgcgagctgaagctgcagaagtggtacggggacctgcggggaaagcccttcgccatcgaagccgagaacagcatcctggacatcagcggcttcagcaagcagtacaactgtgccttcatctggcagaaggacggcgtgaagaagctgaacctgtacctgatcatcaactacttcaagggcggcaagctgcggttcaagaagatcaaacctgaagccttcgaagccaacagattctacaccgtgatcaacaaaaagagcggcgagatcgtgcccatggaggtgaacttcaacttcgacgaccccaacctgatcatcctgcctctggcctttggcaagagacagggcagagaattcatctggaacgacctgctgtccctggaaaccggcagcctgaagctggccaacggaagagtgatcgagaagacactgtacaacagaagaacccggcaggatgagcctgccctgttcgtggccctgaccttcgagcggcgggaggtcctggactcctccaatatcaaaccaatgaacctgatcggcgtggcaagaggcgaaaacatccccgccgtgatcgccctgaccgaccccgagggctgcccactgagccggtttaaggatagcctgggaaacccaacccacatcctgagaatcggcgagagctataaggagaagcagcggaccatccaggccaagaaggaggtggagcagcggagagccggcggctacagccggaagtacgccagcaaagccaagaatctggcagacgatatggtgagaaacaccgctagagatctgctgtactacgccgtgacccaggatgccatgctgatcttcgccaacctgagccggggcttcggccggcagggcaagcggaccttcatggccgagagacagtacacacggatggaggactggctgaccgccaagctggcctacgagggcctgagcaagacctacctgtccaagacactggcccagtacacctccaagacatgcagcaactgtgggtttaccatcaccagcgccgactacgacagggtgctggagaagctgaagaagacagcaacaggctggatgaccacaattaacggcaaggagctgaaggtggagggccagattacctactacaacagatacaagagacagaacgtagtcaaggacctgtccgtcgagctggatagactgagcgaagaatctgtgaacaacgacatctcctcctggacaaagggcagaagcggagaagctctgagcctcctgaagaaaagattctcccatagacccgtgcaggagaagttcgtgtgcctgaactgcggcttcgagacacacgcagccgagcaagccgccctgaacatcgccagatcctggctgttcctgcggagccaggagtacaagaaataccagacaaacaagacaaccggcaacaccgataagagagccttcgtcgagacctggcagtccttttaccggaagaagcttaaggaggtgtggaaacctgccgtgcggtctggcggatctggcggaggctccaccagccccaagaaaaagagaaaagtctaagctgccttctgcggggcttgccttctggccatgcccttcttctctcccttgcacctgtacctcttggtctttgaataaagcctgagtaggaaggctagcaaaaaaaaaaaaaaaaaaaaaaaaaaaaaaaaaaaaaaaaaaaaaaaaaaaaaaaaaaaaaaaaaaaaaaaaaaaaaaaa

SEQ ID NO: 13161 - RNA, 5785 nt, synthetic construct
  source 1..5785: mol_type = other RNA
aggaaataagagagaaaagaagagtaagaagaaatataagagccaccatggcccctaagaagaagcgtaaagtgagccggatggaacgcctcgtctacgaggtgcggcagaagtgcagaaacatcgaggacatctgcatctcctgcggatctctgaacgtgaccctggagcacccactgttcatcggcggcatgtgccagaactgtaaaaactgttttctggagtgtgcctatcaatacgacgatgacggctaccagagctactgcaccatctgttgcggcggaagagaggtgctgatgtgtggaaataacaactgctgccggtgcttctgcgtggaatgcgtggacctgctggtgggccccggcgccgcccaggccgctattaaggaagatccttggaactgctacatgtgcggccacaagggcacatacggcctgctgagacggagagaggactggcctagcagactgcagatgttcttcgccaataaccacgaccaggagttcgacccccctaaggtgtaccctcccgtccccgccgagaagagaaagcccatccgggtcctgagcctgttcgatggcatcgccaccggtctgctggtgctgaaggacctgggcatccaggtggataggtacattgcctccgaggtgtgcgaggactccatcaccgtgggaatggtgcgtcatcagggcaagatcatgtacgtgggcgacgtgcggagcgtgacacagaagcatatccaggagtggggccctttcgacctggtgatcggcggcagcccttgcaatgacctgagcatcgtgaacccagcccggaagggcctgtacgagggaaccggcagactgttcttcgagttttacagactgctgcacgacgcccggcctaaggaaggcgacgaccggcccttcttttggctgttcgagaatgtggtggccatgggagtcagcgacaagcgggatattagccggttcctggagagcaaccccgtgatgatcgatgccaaggaagtgagcgccgcccaccgggccagatacttctggggcaatctgcctggcatgaacagacccctggccagcaccgtgaacgacaagctggagctgcaggagtgcctggagcacggccggatcgccaagttcagcaaggtgagaaccatcaccacccgaagcaacagcatcaaacaaggcaaggaccagcactttcctgtgttcatgaacgagaaggaggacatcctgtggtgtaccgagatggagagagtgttcgggttcccagtccactacacagatgtcagcaacatgtctagactggccagacagagactgctgggaagaagctggtccgtccctgtgatcagacacctgttcgcccctctgaaggagtacttcgcctgcgtgagcagcggcaacagcaacgccaacagccggggccccagcttctctagcggcctggtgccactgtccctgagagggagccacatgggccccatggagatctacaaaaccgtgagcgcctggaagcggcagcctgtgcgcgtgctgagcctgtttcggaatatcgataaagtcctgaaaagcctgggattcctggagagcggctctggctccggcggtggcaccctgaagtacgtggaggatgtgacaaacgtggtcagacgggatgtggagaagtggggccccttcgatctggtgtacggcagcacccaacccctgggcagctcttgtgaccggtgccctggctggtacatgtttcagttccaccggatcctgcagtacgccctgccgagacaggagtcccagcggccattcttttggattttcatggacaacttgctgctgaccgaggatgaccaggaaactaccactcggttcctgcagaccgaagccgtgaccctgcaggacgtgagaggccgggactaccagaacgccatgcgggtgtggtccaacatccctggactgaaaagcaagcacgcacctctgacccctaaagaagaggagtacctgcaggcccaggtgcggagcagaagcaagctggacgcccctaaggtggatctgctggtgaagaattgcctcctgcccctgagagagtacttcaagtatttcagccagaatagtctgcccctgggaggcagcggcggcggcctgtggctgcccctgaccttcgaggacatcgccatctacttcagcgagcaggagtggcagaacctggaggcctggcagaaggacctgtacaggaacgtgatgagggccaactacgagatcctggtgagcctggacgacggcctgcccaagcccgagctgatcagccacatcgagcagggcaaggagctgttctggaacctgggcgagacccagaagagcggcaacatcatctgcagcagcgccggcggcccaagcagcggcgcccctcctcccagcggcggcagcccagccggctccccaacctctaccgaggagggcacctctgagtccgccacccccgagagcggccctggcacctccaccgagcccagcgagggcagcgcacccggcagccctgccggcagccccacctccacagaggagggaaccagcaccgagcccagcgaaggcagcgccccaggcaccagcaccgagcctagtgagcaggagattaaacggatcaacaagatcagaagaagacttgtgaaagacagcaacaccaagaaggccggcaagacaggccccatgaaaaccctgctggttagagtgatgacacccgatctgagagagcggctggaaaacctgagaaagaagcctgaaaatatcccccagcccatcagcaatacatctagagccaacctgaataagctgctgaccgattacaccgaaatgaagaaggcgatcctgcatgtgtactgggaagagttccagaaggaccctgtgggcctgatgagccgggtggcccagcctgccagcaagaagatcgatcagaacaagctgaaacctgagatggacgagaagggcaacctgaccaccgccggctttgcctgctctcagtgtggccagcccctgttcgtgtacaagctggagcaggtgtctgagaagggcaaggcttacaccaactacttcggacggtgcaatgtggccgagcacgaaaagctgatcctgctggcccagctgaagcccgagaaggatagcgacgaagccgtgacatatagcctgggaaagtttgggcagagggccctggatttctacagcattcatgtgaccaaggagtccacccaccccgtgaagcccctggcccagatcgccggaaacagatacgcctccggacctgtgggaaaggccctgagcgacgcatgtatgggcacaatcgcctccttcctgtctaagtaccaggacatcatcatcgaacaccagaaggtggtgaagggcaaccagaagagactggagagcctgcgggagctggccggcaaggaaaacctggaataccctagcgtgaccctgccacctcagcctcacaccaaggagggcgttgatgcctacaacgaagtgatcgcccgggtgcgaatgtgggtgaacctgaacctgtggcagaagctgaagctaagcagagatgatgccaagcctctgctgagactgaagggattcccttcctttcctctggtcgagagacaggccaacgaagtggactggtgggacatggtgtgtaacgtgaagaagctgatcaacgagaaaaaggaggatggcaaggtgttttggcagaatctggctggctacaagagacaggaagccctgagaccatacctgagcagcgaggaagatcggaagaagggaaagaaattcgctcggtaccagctgggcgacctgctgctgcacctggaaaagaagcacggcgaggactggggaaaggtgtacgacgaggcctgggagcggattgacaagaaagtggaaggcctgagcaagcacatcaagctggaagaggaacggagaagcgaggacgcccagagcaaggccgccctgaccgactggctgcgggctaaggccagcttcgtgatcgagggcctgaaggaggccgacaaggacgagttctgcagatgcgagctgaagctgcagaagtggtacggggacctgcggggaaagcccttcgccatcgaagccgagaacagcatcctggacatcagcggcttcagcaagcagtacaactgtgccttcatctggcagaaggacggcgtgaagaagctgaacctgtacctgatcatcaactacttcaagggcggcaagctgcggttcaagaagatcaaacctgaagccttcgaagccaacagattctacaccgtgatcaacaaaaagagcggcgagatcgtgcccatggaggtgaacttcaacttcgacgaccccaacctgatcatcctgcctctggcctttggcaagagacagggcagagaattcatctggaacgacctgctgtccctggaaaccggcagcctgaagctggccaacggaagagtgatcgagaagacactgtacaacagaagaacccggcaggatgagcctgccctgttcgtggccctgaccttcgagcggcgggaggtcctggactcctccaatatcaaaccaatgaacctgatcggcgtggcaagaggcgaaaacatccccgccgtgatcgccctgaccgaccccgagggctgcccactgagccggtttaaggatagcctgggaaacccaacccacatcctgagaatcggcgagagctataaggagaagcagcggaccatccaggccaagaaggaggtggagcagcggagagccggcggctacagccggaagtacgccagcaaagccaagaatctggcagacgatatggtgagaaacaccgctagagatctgctgtactacgccgtgacccaggatgccatgctgatcttcgccaacctgagccggggcttcggccggcagggcaagcggaccttcatggccgagagacagtacacacggatggaggactggctgaccgccaagctggcctacgagggcctgagcaagacctacctgtccaagacactggcccagtacacctccaagacatgcagcaactgtgggtttaccatcaccagcgccgactacgacagggtgctggagaagctgaagaagacagcaacaggctggatgaccacaattaacggcaaggagctgaaggtggagggccagattacctactacaacagatacaagagacagaacgtagtcaaggacctgtccgtcgagctggatagactgagcgaagaatctgtgaacaacgacatctcctcctggacaaagggcagaagcggagaagctctgagcctcctgaagaaaagattctcccatagacccgtgcaggagaagttcgtgtgcctgaactgcggcttcgagacacacgcagccgagcaagccgccctgaacatcgccagatcctggctgttcctgcggagccaggagtacaagaaataccagacaaacaagacaaccggcaacaccgataagagagccttcgtcgagacctggcagtccttttaccggaagaagcttaaggaggtgtggaaacctgccgtgcggtctggcggatctggcggaggctccaccagccccaagaaaaagagaaaagtctaagctgccttctgcggggcttgccttctggccatgcccttcttctctcccttgcacctgtacctcttggtctttgaataaagcctgagtaggaaggctagcaaaaaaaaaaaaaaaaaaaaaaaaaaaaaaaaaaaaaaaaaaaaaaaaaaaaaaaaaaaaaaaaaaaaaaaaaaaaaaaa

SEQ ID NO: 13162 - RNA, 5785 nt, synthetic construct
  source 1..5785: mol_type = other RNA
aggaaataagagagaaaagaagagtaagaagaaatataagagccaccatggcccctaagaagaagcgtaaagtgagccggatggaacgcctcgtctacgaggtgcggcagaagtgcagaaacatcgaggacatctgcatctcctgcggatctctgaacgtgaccctggagcacccactgttcatcggcggcatgtgccagaactgtaaaaactgttttctggagtgtgcctatcaatacgacgatgacggctaccagagctactgcaccatctgttgcggcggaagagaggtgctgatgtgtggaaataacaactgctgccggtgcttctgcgtggaatgcgtggacctgctggtgggccccggcgccgcccaggccgctattaaggaagatccttggaactgctacatgtgcggccacaagggcacatacggcctgctgagacggagagaggactggcctagcagactgcagatgttcttcgccaataaccacgaccaggagttcgacccccctaaggtgtaccctcccgtccccgccgagaagagaaagcccatccgggtcctgagcctgttcgatggcatcgccaccggtctgctggtgctgaaggacctgggcatccaggtggataggtacattgcctccgaggtgtgcgaggactccatcaccgtgggaatggtgcgtcatcagggcaagatcatgtacgtgggcgacgtgcggagcgtgacacagaagcatatccaggagtggggccctttcgacctggtgatcggcggcagcccttgcaatgacctgagcatcgtgaacccagcccggaagggcctgtacgagggaaccggcagactgttcttcgagttttacagactgctgcacgacgcccggcctaaggaaggcgacgaccggcccttcttttggctgttcgagaatgtggtggccatgggagtcagcgacaagcgggatattagccggttcctggagagcaaccccgtgatgatcgatgccaaggaagtgagcgccgcccaccgggccagatacttctggggcaatctgcctggcatgaacagacccctggccagcaccgtgaacgacaagctggagctgcaggagtgcctggagcacggccggatcgccaagttcagcaaggtgagaaccatcaccacccgaagcaacagcatcaaacaaggcaaggaccagcactttcctgtgttcatgaacgagaaggaggacatcctgtggtgtaccgagatggagagagtgttcgggttcccagtccactacacagatgtcagcaacatgtctagactggccagacagagactgctgggaagaagctggtccgtccctgtgatcagacacctgttcgcccctctgaaggagtacttcgcctgcgtgagcagcggcaacagcaacgccaacagccggggccccagcttctctagcggcctggtgccactgtccctgagagggagccacatgggccccatggagatctacaaaaccgtgagcgcctggaagcggcagcctgtgcgcgtgctgagcctgtttcggaatatcgataaagtcctgaaaagcctgggattcctggagagcggctctggctccggcggtggcaccctgaagtacgtggaggatgtgacaaacgtggtcagacgggatgtggagaagtggggccccttcgatctggtgtacggcagcacccaacccctgggcagctcttgtgaccggtgccctggctggtacatgtttcagttccaccggatcctgcagtacgccctgccgagacaggagtcccagcggccattcttttggattttcatggacaacttgctgctgaccgaggatgaccaggaaactaccactcggttcctgcagaccgaagccgtgaccctgcaggacgtgagaggccgggactaccagaacgccatgcgggtgtggtccaacatccctggactgaaaagcaagcacgcacctctgacccctaaagaagaggagtacctgcaggcccaggtgcggagcagaagcaagctggacgcccctaaggtggatctgctggtgaagaattgcctcctgcccctgagagagtacttcaagtatttcagccagaatagtctgcccctgggaggcagcggcggcggcatgaacgtggaggtggtgaaggtgatgccccaggacctggtgaccttcaaggacgtggccatcgacttcagccaggaggagtggcagtggatgaaccccgcccagaagtgcctgtacaggagcatgatgctggagaactaccagagcctggtgagcctgggcctgtgcatcagcaagccctacgtgatcagcctgctggagcagggcagggagccctgggagatgaccagcgagatgaccaggggcggcccaagcagcggcgcccctcctcccagcggcggcagcccagccggctccccaacctctaccgaggagggcacctctgagtccgccacccccgagagcggccctggcacctccaccgagcccagcgagggcagcgcacccggcagccctgccggcagccccacctccacagaggagggaaccagcaccgagcccagcgaaggcagcgccccaggcaccagcaccgagcctagtgagcaggagattaaacggatcaacaagatcagaagaagacttgtgaaagacagcaacaccaagaaggccggcaagacaggccccatgaaaaccctgctggttagagtgatgacacccgatctgagagagcggctggaaaacctgagaaagaagcctgaaaatatcccccagcccatcagcaatacatctagagccaacctgaataagctgctgaccgattacaccgaaatgaagaaggcgatcctgcatgtgtactgggaagagttccagaaggaccctgtgggcctgatgagccgggtggcccagcctgccagcaagaagatcgatcagaacaagctgaaacctgagatggacgagaagggcaacctgaccaccgccggctttgcctgctctcagtgtggccagcccctgttcgtgtacaagctggagcaggtgtctgagaagggcaaggcttacaccaactacttcggacggtgcaatgtggccgagcacgaaaagctgatcctgctggcccagctgaagcccgagaaggatagcgacgaagccgtgacatatagcctgggaaagtttgggcagagggccctggatttctacagcattcatgtgaccaaggagtccacccaccccgtgaagcccctggcccagatcgccggaaacagatacgcctccggacctgtgggaaaggccctgagcgacgcatgtatgggcacaatcgcctccttcctgtctaagtaccaggacatcatcatcgaacaccagaaggtggtgaagggcaaccagaagagactggagagcctgcgggagctggccggcaaggaaaacctggaataccctagcgtgaccctgccacctcagcctcacaccaaggagggcgttgatgcctacaacgaagtgatcgcccgggtgcgaatgtgggtgaacctgaacctgtggcagaagctgaagctaagcagagatgatgccaagcctctgctgagactgaagggattcccttcctttcctctggtcgagagacaggccaacgaagtggactggtgggacatggtgtgtaacgtgaagaagctgatcaacgagaaaaaggaggatggcaaggtgttttggcagaatctggctggctacaagagacaggaagccctgagaccatacctgagcagcgaggaagatcggaagaagggaaagaaattcgctcggtaccagctgggcgacctgctgctgcacctggaaaagaagcacggcgaggactggggaaaggtgtacgacgaggcctgggagcggattgacaagaaagtggaaggcctgagcaagcacatcaagctggaagaggaacggagaagcgaggacgcccagagcaaggccgccctgaccgactggctgcgggctaaggccagcttcgtgatcgagggcctgaaggaggccgacaaggacgagttctgcagatgcgagctgaagctgcagaagtggtacggggacctgcggggaaagcccttcgccatcgaagccgagaacagcatcctggacatcagcggcttcagcaagcagtacaactgtgccttcatctggcagaaggacggcgtgaagaagctgaacctgtacctgatcatcaactacttcaagggcggcaagctgcggttcaagaagatcaaacctgaagccttcgaagccaacagattctacaccgtgatcaacaaaaagagcggcgagatcgtgcccatggaggtgaacttcaacttcgacgaccccaacctgatcatcctgcctctggcctttggcaagagacagggcagagaattcatctggaacgacctgctgtccctggaaaccggcagcctgaagctggccaacggaagagtgatcgagaagacactgtacaacagaagaacccggcaggatgagcctgccctgttcgtggccctgaccttcgagcggcgggaggtcctggactcctccaatatcaaaccaatgaacctgatcggcgtggcaagaggcgaaaacatccccgccgtgatcgccctgaccgaccccgagggctgcccactgagccggtttaaggatagcctgggaaacccaacccacatcctgagaatcggcgagagctataaggagaagcagcggaccatccaggccaagaaggaggtggagcagcggagagccggcggctacagccggaagtacgccagcaaagccaagaatctggcagacgatatggtgagaaacaccgctagagatctgctgtactacgccgtgacccaggatgccatgctgatcttcgccaacctgagccggggcttcggccggcagggcaagcggaccttcatggccgagagacagtacacacggatggaggactggctgaccgccaagctggcctacgagggcctgagcaagacctacctgtccaagacactggcccagtacacctccaagacatgcagcaactgtgggtttaccatcaccagcgccgactacgacagggtgctggagaagctgaagaagacagcaacaggctggatgaccacaattaacggcaaggagctgaaggtggagggccagattacctactacaacagatacaagagacagaacgtagtcaaggacctgtccgtcgagctggatagactgagcgaagaatctgtgaacaacgacatctcctcctggacaaagggcagaagcggagaagctctgagcctcctgaagaaaagattctcccatagacccgtgcaggagaagttcgtgtgcctgaactgcggcttcgagacacacgcagccgagcaagccgccctgaacatcgccagatcctggctgttcctgcggagccaggagtacaagaaataccagacaaacaagacaaccggcaacaccgataagagagccttcgtcgagacctggcagtccttttaccggaagaagcttaaggaggtgtggaaacctgccgtgcggtctggcggatctggcggaggctccaccagccccaagaaaaagagaaaagtctaagctgccttctgcggggcttgccttctggccatgcccttcttctctcccttgcacctgtacctcttggtctttgaataaagcctgagtaggaaggctagcaaaaaaaaaaaaaaaaaaaaaaaaaaaaaaaaaaaaaaaaaaaaaaaaaaaaaaaaaaaaaaaaaaaaaaaaaaaaaaaa

SEQ ID NO: 13163 - RNA, 5785 nt, synthetic construct
  source 1..5785: mol_type = other RNA
aggaaataagagagaaaagaagagtaagaagaaatataagagccaccatggcccctaagaagaagcgtaaagtgagccggatggaacgcctcgtctacgaggtgcggcagaagtgcagaaacatcgaggacatctgcatctcctgcggatctctgaacgtgaccctggagcacccactgttcatcggcggcatgtgccagaactgtaaaaactgttttctggagtgtgcctatcaatacgacgatgacggctaccagagctactgcaccatctgttgcggcggaagagaggtgctgatgtgtggaaataacaactgctgccggtgcttctgcgtggaatgcgtggacctgctggtgggccccggcgccgcccaggccgctattaaggaagatccttggaactgctacatgtgcggccacaagggcacatacggcctgctgagacggagagaggactggcctagcagactgcagatgttcttcgccaataaccacgaccaggagttcgacccccctaaggtgtaccctcccgtccccgccgagaagagaaagcccatccgggtcctgagcctgttcgatggcatcgccaccggtctgctggtgctgaaggacctgggcatccaggtggataggtacattgcctccgaggtgtgcgaggactccatcaccgtgggaatggtgcgtcatcagggcaagatcatgtacgtgggcgacgtgcggagcgtgacacagaagcatatccaggagtggggccctttcgacctggtgatcggcggcagcccttgcaatgacctgagcatcgtgaacccagcccggaagggcctgtacgagggaaccggcagactgttcttcgagttttacagactgctgcacgacgcccggcctaaggaaggcgacgaccggcccttcttttggctgttcgagaatgtggtggccatgggagtcagcgacaagcgggatattagccggttcctggagagcaaccccgtgatgatcgatgccaaggaagtgagcgccgcccaccgggccagatacttctggggcaatctgcctggcatgaacagacccctggccagcaccgtgaacgacaagctggagctgcaggagtgcctggagcacggccggatcgccaagttcagcaaggtgagaaccatcaccacccgaagcaacagcatcaaacaaggcaaggaccagcactttcctgtgttcatgaacgagaaggaggacatcctgtggtgtaccgagatggagagagtgttcgggttcccagtccactacacagatgtcagcaacatgtctagactggccagacagagactgctgggaagaagctggtccgtccctgtgatcagacacctgttcgcccctctgaaggagtacttcgcctgcgtgagcagcggcaacagcaacgccaacagccggggccccagcttctctagcggcctggtgccactgtccctgagagggagccacatgggccccatggagatctacaaaaccgtgagcgcctggaagcggcagcctgtgcgcgtgctgagcctgtttcggaatatcgataaagtcctgaaaagcctgggattcctggagagcggctctggctccggcggtggcaccctgaagtacgtggaggatgtgacaaacgtggtcagacgggatgtggagaagtggggccccttcgatctggtgtacggcagcacccaacccctgggcagctcttgtgaccggtgccctggctggtacatgtttcagttccaccggatcctgcagtacgccctgccgagacaggagtcccagcggccattcttttggattttcatggacaacttgctgctgaccgaggatgaccaggaaactaccactcggttcctgcagaccgaagccgtgaccctgcaggacgtgagaggccgggactaccagaacgccatgcgggtgtggtccaacatccctggactgaaaagcaagcacgcacctctgacccctaaagaagaggagtacctgcaggcccaggtgcggagcagaagcaagctggacgcccctaaggtggatctgctggtgaagaattgcctcctgcccctgagagagtacttcaagtatttcagccagaatagtctgcccctgggaggcagcggcggcggcgaggagctgcccgccgtgttcgaggacgtggccgtgtacttcaccagggaggagtggggcatgctggacaagaggcagaaggagctgtacagggacgtgatgaggctgaactacgagctgctggccagcctgggccccgccgccgccaagcccgacctgatcagcaagctggagaggagggccgccccctggatcaaggaccccaacggccccaagtggggcaagggcggcccccccggcaagggcggcccaagcagcggcgcccctcctcccagcggcggcagcccagccggctccccaacctctaccgaggagggcacctctgagtccgccacccccgagagcggccctggcacctccaccgagcccagcgagggcagcgcacccggcagccctgccggcagccccacctccacagaggagggaaccagcaccgagcccagcgaaggcagcgccccaggcaccagcaccgagcctagtgagcaggagattaaacggatcaacaagatcagaagaagacttgtgaaagacagcaacaccaagaaggccggcaagacaggccccatgaaaaccctgctggttagagtgatgacacccgatctgagagagcggctggaaaacctgagaaagaagcctgaaaatatcccccagcccatcagcaatacatctagagccaacctgaataagctgctgaccgattacaccgaaatgaagaaggcgatcctgcatgtgtactgggaagagttccagaaggaccctgtgggcctgatgagccgggtggcccagcctgccagcaagaagatcgatcagaacaagctgaaacctgagatggacgagaagggcaacctgaccaccgccggctttgcctgctctcagtgtggccagcccctgttcgtgtacaagctggagcaggtgtctgagaagggcaaggcttacaccaactacttcggacggtgcaatgtggccgagcacgaaaagctgatcctgctggcccagctgaagcccgagaaggatagcgacgaagccgtgacatatagcctgggaaagtttgggcagagggccctggatttctacagcattcatgtgaccaaggagtccacccaccccgtgaagcccctggcccagatcgccggaaacagatacgcctccggacctgtgggaaaggccctgagcgacgcatgtatgggcacaatcgcctccttcctgtctaagtaccaggacatcatcatcgaacaccagaaggtggtgaagggcaaccagaagagactggagagcctgcgggagctggccggcaaggaaaacctggaataccctagcgtgaccctgccacctcagcctcacaccaaggagggcgttgatgcctacaacgaagtgatcgcccgggtgcgaatgtgggtgaacctgaacctgtggcagaagctgaagctaagcagagatgatgccaagcctctgctgagactgaagggattcccttcctttcctctggtcgagagacaggccaacgaagtggactggtgggacatggtgtgtaacgtgaagaagctgatcaacgagaaaaaggaggatggcaaggtgttttggcagaatctggctggctacaagagacaggaagccctgagaccatacctgagcagcgaggaagatcggaagaagggaaagaaattcgctcggtaccagctgggcgacctgctgctgcacctggaaaagaagcacggcgaggactggggaaaggtgtacgacgaggcctgggagcggattgacaagaaagtggaaggcctgagcaagcacatcaagctggaagaggaacggagaagcgaggacgcccagagcaaggccgccctgaccgactggctgcgggctaaggccagcttcgtgatcgagggcctgaaggaggccgacaaggacgagttctgcagatgcgagctgaagctgcagaagtggtacggggacctgcggggaaagcccttcgccatcgaagccgagaacagcatcctggacatcagcggcttcagcaagcagtacaactgtgccttcatctggcagaaggacggcgtgaagaagctgaacctgtacctgatcatcaactacttcaagggcggcaagctgcggttcaagaagatcaaacctgaagccttcgaagccaacagattctacaccgtgatcaacaaaaagagcggcgagatcgtgcccatggaggtgaacttcaacttcgacgaccccaacctgatcatcctgcctctggcctttggcaagagacagggcagagaattcatctggaacgacctgctgtccctggaaaccggcagcctgaagctggccaacggaagagtgatcgagaagacactgtacaacagaagaacccggcaggatgagcctgccctgttcgtggccctgaccttcgagcggcgggaggtcctggactcctccaatatcaaaccaatgaacctgatcggcgtggcaagaggcgaaaacatccccgccgtgatcgccctgaccgaccccgagggctgcccactgagccggtttaaggatagcctgggaaacccaacccacatcctgagaatcggcgagagctataaggagaagcagcggaccatccaggccaagaaggaggtggagcagcggagagccggcggctacagccggaagtacgccagcaaagccaagaatctggcagacgatatggtgagaaacaccgctagagatctgctgtactacgccgtgacccaggatgccatgctgatcttcgccaacctgagccggggcttcggccggcagggcaagcggaccttcatggccgagagacagtacacacggatggaggactggctgaccgccaagctggcctacgagggcctgagcaagacctacctgtccaagacactggcccagtacacctccaagacatgcagcaactgtgggtttaccatcaccagcgccgactacgacagggtgctggagaagctgaagaagacagcaacaggctggatgaccacaattaacggcaaggagctgaaggtggagggccagattacctactacaacagatacaagagacagaacgtagtcaaggacctgtccgtcgagctggatagactgagcgaagaatctgtgaacaacgacatctcctcctggacaaagggcagaagcggagaagctctgagcctcctgaagaaaagattctcccatagacccgtgcaggagaagttcgtgtgcctgaactgcggcttcgagacacacgcagccgagcaagccgccctgaacatcgccagatcctggctgttcctgcggagccaggagtacaagaaataccagacaaacaagacaaccggcaacaccgataagagagccttcgtcgagacctggcagtccttttaccggaagaagcttaaggaggtgtggaaacctgccgtgcggtctggcggatctggcggaggctccaccagccccaagaaaaagagaaaagtctaagctgccttctgcggggcttgccttctggccatgcccttcttctctcccttgcacctgtacctcttggtctttgaataaagcctgagtaggaaggctagcaaaaaaaaaaaaaaaaaaaaaaaaaaaaaaaaaaaaaaaaaaaaaaaaaaaaaaaaaaaaaaaaaaaaaaaaaaaaaaaa

SEQ ID NO: 13164 - RNA, 5785 nt, synthetic construct
  source 1..5785: mol_type = other RNA
aggaaataagagagaaaagaagagtaagaagaaatataagagccaccatggcccctaagaagaagcgtaaagtgagccggatggaacgcctcgtctacgaggtgcggcagaagtgcagaaacatcgaggacatctgcatctcctgcggatctctgaacgtgaccctggagcacccactgttcatcggcggcatgtgccagaactgtaaaaactgttttctggagtgtgcctatcaatacgacgatgacggctaccagagctactgcaccatctgttgcggcggaagagaggtgctgatgtgtggaaataacaactgctgccggtgcttctgcgtggaatgcgtggacctgctggtgggccccggcgccgcccaggccgctattaaggaagatccttggaactgctacatgtgcggccacaagggcacatacggcctgctgagacggagagaggactggcctagcagactgcagatgttcttcgccaataaccacgaccaggagttcgacccccctaaggtgtaccctcccgtccccgccgagaagagaaagcccatccgggtcctgagcctgttcgatggcatcgccaccggtctgctggtgctgaaggacctgggcatccaggtggataggtacattgcctccgaggtgtgcgaggactccatcaccgtgggaatggtgcgtcatcagggcaagatcatgtacgtgggcgacgtgcggagcgtgacacagaagcatatccaggagtggggccctttcgacctggtgatcggcggcagcccttgcaatgacctgagcatcgtgaacccagcccggaagggcctgtacgagggaaccggcagactgttcttcgagttttacagactgctgcacgacgcccggcctaaggaaggcgacgaccggcccttcttttggctgttcgagaatgtggtggccatgggagtcagcgacaagcgggatattagccggttcctggagagcaaccccgtgatgatcgatgccaaggaagtgagcgccgcccaccgggccagatacttctggggcaatctgcctggcatgaacagacccctggccagcaccgtgaacgacaagctggagctgcaggagtgcctggagcacggccggatcgccaagttcagcaaggtgagaaccatcaccacccgaagcaacagcatcaaacaaggcaaggaccagcactttcctgtgttcatgaacgagaaggaggacatcctgtggtgtaccgagatggagagagtgttcgggttcccagtccactacacagatgtcagcaacatgtctagactggccagacagagactgctgggaagaagctggtccgtccctgtgatcagacacctgttcgcccctctgaaggagtacttcgcctgcgtgagcagcggcaacagcaacgccaacagccggggccccagcttctctagcggcctggtgccactgtccctgagagggagccacatgggccccatggagatctacaaaaccgtgagcgcctggaagcggcagcctgtgcgcgtgctgagcctgtttcggaatatcgataaagtcctgaaaagcctgggattcctggagagcggctctggctccggcggtggcaccctgaagtacgtggaggatgtgacaaacgtggtcagacgggatgtggagaagtggggccccttcgatctggtgtacggcagcacccaacccctgggcagctcttgtgaccggtgccctggctggtacatgtttcagttccaccggatcctgcagtacgccctgccgagacaggagtcccagcggccattcttttggattttcatggacaacttgctgctgaccgaggatgaccaggaaactaccactcggttcctgcagaccgaagccgtgaccctgcaggacgtgagaggccgggactaccagaacgccatgcgggtgtggtccaacatccctggactgaaaagcaagcacgcacctctgacccctaaagaagaggagtacctgcaggcccaggtgcggagcagaagcaagctggacgcccctaaggtggatctgctggtgaagaattgcctcctgcccctgagagagtacttcaagtatttcagccagaatagtctgcccctgggaggcagcggcggcggcatggcccacatggccttcagggacgtggccgtggacttcacccaggacgagtggaggctgctgagccccgcccagaggaccctgtacagggaggtgatgctggagaactacagcaacctggtgagcctgggcatcagcttcagcaagcccgagatcatcacccagctggagcagggcaaggagacctggagggaggagaagaagtgcccccccgccacctgccccgccgaccccgagcccgagggcggcccaagcagcggcgcccctcctcccagcggcggcagcccagccggctccccaacctctaccgaggagggcacctctgagtccgccacccccgagagcggccctggcacctccaccgagcccagcgagggcagcgcacccggcagccctgccggcagccccacctccacagaggagggaaccagcaccgagcccagcgaaggcagcgccccaggcaccagcaccgagcctagtgagcaggagattaaacggatcaacaagatcagaagaagacttgtgaaagacagcaacaccaagaaggccggcaagacaggccccatgaaaaccctgctggttagagtgatgacacccgatctgagagagcggctggaaaacctgagaaagaagcctgaaaatatcccccagcccatcagcaatacatctagagccaacctgaataagctgctgaccgattacaccgaaatgaagaaggcgatcctgcatgtgtactgggaagagttccagaaggaccctgtgggcctgatgagccgggtggcccagcctgccagcaagaagatcgatcagaacaagctgaaacctgagatggacgagaagggcaacctgaccaccgccggctttgcctgctctcagtgtggccagcccctgttcgtgtacaagctggagcaggtgtctgagaagggcaaggcttacaccaactacttcggacggtgcaatgtggccgagcacgaaaagctgatcctgctggcccagctgaagcccgagaaggatagcgacgaagccgtgacatatagcctgggaaagtttgggcagagggccctggatttctacagcattcatgtgaccaaggagtccacccaccccgtgaagcccctggcccagatcgccggaaacagatacgcctccggacctgtgggaaaggccctgagcgacgcatgtatgggcacaatcgcctccttcctgtctaagtaccaggacatcatcatcgaacaccagaaggtggtgaagggcaaccagaagagactggagagcctgcgggagctggccggcaaggaaaacctggaataccctagcgtgaccctgccacctcagcctcacaccaaggagggcgttgatgcctacaacgaagtgatcgcccgggtgcgaatgtgggtgaacctgaacctgtggcagaagctgaagctaagcagagatgatgccaagcctctgctgagactgaagggattcccttcctttcctctggtcgagagacaggccaacgaagtggactggtgggacatggtgtgtaacgtgaagaagctgatcaacgagaaaaaggaggatggcaaggtgttttggcagaatctggctggctacaagagacaggaagccctgagaccatacctgagcagcgaggaagatcggaagaagggaaagaaattcgctcggtaccagctgggcgacctgctgctgcacctggaaaagaagcacggcgaggactggggaaaggtgtacgacgaggcctgggagcggattgacaagaaagtggaaggcctgagcaagcacatcaagctggaagaggaacggagaagcgaggacgcccagagcaaggccgccctgaccgactggctgcgggctaaggccagcttcgtgatcgagggcctgaaggaggccgacaaggacgagttctgcagatgcgagctgaagctgcagaagtggtacggggacctgcggggaaagcccttcgccatcgaagccgagaacagcatcctggacatcagcggcttcagcaagcagtacaactgtgccttcatctggcagaaggacggcgtgaagaagctgaacctgtacctgatcatcaactacttcaagggcggcaagctgcggttcaagaagatcaaacctgaagccttcgaagccaacagattctacaccgtgatcaacaaaaagagcggcgagatcgtgcccatggaggtgaacttcaacttcgacgaccccaacctgatcatcctgcctctggcctttggcaagagacagggcagagaattcatctggaacgacctgctgtccctggaaaccggcagcctgaagctggccaacggaagagtgatcgagaagacactgtacaacagaagaacccggcaggatgagcctgccctgttcgtggccctgaccttcgagcggcgggaggtcctggactcctccaatatcaaaccaatgaacctgatcggcgtggcaagaggcgaaaacatccccgccgtgatcgccctgaccgaccccgagggctgcccactgagccggtttaaggatagcctgggaaacccaacccacatcctgagaatcggcgagagctataaggagaagcagcggaccatccaggccaagaaggaggtggagcagcggagagccggcggctacagccggaagtacgccagcaaagccaagaatctggcagacgatatggtgagaaacaccgctagagatctgctgtactacgccgtgacccaggatgccatgctgatcttcgccaacctgagccggggcttcggccggcagggcaagcggaccttcatggccgagagacagtacacacggatggaggactggctgaccgccaagctggcctacgagggcctgagcaagacctacctgtccaagacactggcccagtacacctccaagacatgcagcaactgtgggtttaccatcaccagcgccgactacgacagggtgctggagaagctgaagaagacagcaacaggctggatgaccacaattaacggcaaggagctgaaggtggagggccagattacctactacaacagatacaagagacagaacgtagtcaaggacctgtccgtcgagctggatagactgagcgaagaatctgtgaacaacgacatctcctcctggacaaagggcagaagcggagaagctctgagcctcctgaagaaaagattctcccatagacccgtgcaggagaagttcgtgtgcctgaactgcggcttcgagacacacgcagccgagcaagccgccctgaacatcgccagatcctggctgttcctgcggagccaggagtacaagaaataccagacaaacaagacaaccggcaacaccgataagagagccttcgtcgagacctggcagtccttttaccggaagaagcttaaggaggtgtggaaacctgccgtgcggtctggcggatctggcggaggctccaccagccccaagaaaaagagaaaagtctaagctgccttctgcggggcttgccttctggccatgcccttcttctctcccttgcacctgtacctcttggtctttgaataaagcctgagtaggaaggctagcaaaaaaaaaaaaaaaaaaaaaaaaaaaaaaaaaaaaaaaaaaaaaaaaaaaaaaaaaaaaaaaaaaaaaaaaaaaaaaaa

SEQ ID NO: 13165 - RNA, 5785 nt, synthetic construct
  source 1..5785: mol_type = other RNA
aggaaataagagagaaaagaagagtaagaagaaatataagagccaccatggcccctaagaagaagcgtaaagtgagccggatggaacgcctcgtctacgaggtgcggcagaagtgcagaaacatcgaggacatctgcatctcctgcggatctctgaacgtgaccctggagcacccactgttcatcggcggcatgtgccagaactgtaaaaactgttttctggagtgtgcctatcaatacgacgatgacggctaccagagctactgcaccatctgttgcggcggaagagaggtgctgatgtgtggaaataacaactgctgccggtgcttctgcgtggaatgcgtggacctgctggtgggccccggcgccgcccaggccgctattaaggaagatccttggaactgctacatgtgcggccacaagggcacatacggcctgctgagacggagagaggactggcctagcagactgcagatgttcttcgccaataaccacgaccaggagttcgacccccctaaggtgtaccctcccgtccccgccgagaagagaaagcccatccgggtcctgagcctgttcgatggcatcgccaccggtctgctggtgctgaaggacctgggcatccaggtggataggtacattgcctccgaggtgtgcgaggactccatcaccgtgggaatggtgcgtcatcagggcaagatcatgtacgtgggcgacgtgcggagcgtgacacagaagcatatccaggagtggggccctttcgacctggtgatcggcggcagcccttgcaatgacctgagcatcgtgaacccagcccggaagggcctgtacgagggaaccggcagactgttcttcgagttttacagactgctgcacgacgcccggcctaaggaaggcgacgaccggcccttcttttggctgttcgagaatgtggtggccatgggagtcagcgacaagcgggatattagccggttcctggagagcaaccccgtgatgatcgatgccaaggaagtgagcgccgcccaccgggccagatacttctggggcaatctgcctggcatgaacagacccctggccagcaccgtgaacgacaagctggagctgcaggagtgcctggagcacggccggatcgccaagttcagcaaggtgagaaccatcaccacccgaagcaacagcatcaaacaaggcaaggaccagcactttcctgtgttcatgaacgagaaggaggacatcctgtggtgtaccgagatggagagagtgttcgggttcccagtccactacacagatgtcagcaacatgtctagactggccagacagagactgctgggaagaagctggtccgtccctgtgatcagacacctgttcgcccctctgaaggagtacttcgcctgcgtgagcagcggcaacagcaacgccaacagccggggccccagcttctctagcggcctggtgccactgtccctgagagggagccacatgggccccatggagatctacaaaaccgtgagcgcctggaagcggcagcctgtgcgcgtgctgagcctgtttcggaatatcgataaagtcctgaaaagcctgggattcctggagagcggctctggctccggcggtggcaccctgaagtacgtggaggatgtgacaaacgtggtcagacgggatgtggagaagtggggccccttcgatctggtgtacggcagcacccaacccctgggcagctcttgtgaccggtgccctggctggtacatgtttcagttccaccggatcctgcagtacgccctgccgagacaggagtcccagcggccattcttttggattttcatggacaacttgctgctgaccgaggatgaccaggaaactaccactcggttcctgcagaccgaagccgtgaccctgcaggacgtgagaggccgggactaccagaacgccatgcgggtgtggtccaacatccctggactgaaaagcaagcacgcacctctgacccctaaagaagaggagtacctgcaggcccaggtgcggagcagaagcaagctggacgcccctaaggtggatctgctggtgaagaattgcctcctgcccctgagagagtacttcaagtatttcagccagaatagtctgcccctgggaggcagcggcggcggcagcctgggcatggtgagcttcgaggacgtggccgtgaccttcagcagggaggagtggcagcagctggacgaggcccagaggaccctgtacagggaggtgatgctggaggcctacagcaacctgaagaccgtgggctgctgctggagcaagcccgaggtgatcatcaggctggagcagggcgtggagccctggaccgtggagggcgtgaccaaccagaggttcagcgacgtgctgaccgtggacggcggcccaagcagcggcgcccctcctcccagcggcggcagcccagccggctccccaacctctaccgaggagggcacctctgagtccgccacccccgagagcggccctggcacctccaccgagcccagcgagggcagcgcacccggcagccctgccggcagccccacctccacagaggagggaaccagcaccgagcccagcgaaggcagcgccccaggcaccagcaccgagcctagtgagcaggagattaaacggatcaacaagatcagaagaagacttgtgaaagacagcaacaccaagaaggccggcaagacaggccccatgaaaaccctgctggttagagtgatgacacccgatctgagagagcggctggaaaacctgagaaagaagcctgaaaatatcccccagcccatcagcaatacatctagagccaacctgaataagctgctgaccgattacaccgaaatgaagaaggcgatcctgcatgtgtactgggaagagttccagaaggaccctgtgggcctgatgagccgggtggcccagcctgccagcaagaagatcgatcagaacaagctgaaacctgagatggacgagaagggcaacctgaccaccgccggctttgcctgctctcagtgtggccagcccctgttcgtgtacaagctggagcaggtgtctgagaagggcaaggcttacaccaactacttcggacggtgcaatgtggccgagcacgaaaagctgatcctgctggcccagctgaagcccgagaaggatagcgacgaagccgtgacatatagcctgggaaagtttgggcagagggccctggatttctacagcattcatgtgaccaaggagtccacccaccccgtgaagcccctggcccagatcgccggaaacagatacgcctccggacctgtgggaaaggccctgagcgacgcatgtatgggcacaatcgcctccttcctgtctaagtaccaggacatcatcatcgaacaccagaaggtggtgaagggcaaccagaagagactggagagcctgcgggagctggccggcaaggaaaacctggaataccctagcgtgaccctgccacctcagcctcacaccaaggagggcgttgatgcctacaacgaagtgatcgcccgggtgcgaatgtgggtgaacctgaacctgtggcagaagctgaagctaagcagagatgatgccaagcctctgctgagactgaagggattcccttcctttcctctggtcgagagacaggccaacgaagtggactggtgggacatggtgtgtaacgtgaagaagctgatcaacgagaaaaaggaggatggcaaggtgttttggcagaatctggctggctacaagagacaggaagccctgagaccatacctgagcagcgaggaagatcggaagaagggaaagaaattcgctcggtaccagctgggcgacctgctgctgcacctggaaaagaagcacggcgaggactggggaaaggtgtacgacgaggcctgggagcggattgacaagaaagtggaaggcctgagcaagcacatcaagctggaagaggaacggagaagcgaggacgcccagagcaaggccgccctgaccgactggctgcgggctaaggccagcttcgtgatcgagggcctgaaggaggccgacaaggacgagttctgcagatgcgagctgaagctgcagaagtggtacggggacctgcggggaaagcccttcgccatcgaagccgagaacagcatcctggacatcagcggcttcagcaagcagtacaactgtgccttcatctggcagaaggacggcgtgaagaagctgaacctgtacctgatcatcaactacttcaagggcggcaagctgcggttcaagaagatcaaacctgaagccttcgaagccaacagattctacaccgtgatcaacaaaaagagcggcgagatcgtgcccatggaggtgaacttcaacttcgacgaccccaacctgatcatcctgcctctggcctttggcaagagacagggcagagaattcatctggaacgacctgctgtccctggaaaccggcagcctgaagctggccaacggaagagtgatcgagaagacactgtacaacagaagaacccggcaggatgagcctgccctgttcgtggccctgaccttcgagcggcgggaggtcctggactcctccaatatcaaaccaatgaacctgatcggcgtggcaagaggcgaaaacatccccgccgtgatcgccctgaccgaccccgagggctgcccactgagccggtttaaggatagcctgggaaacccaacccacatcctgagaatcggcgagagctataaggagaagcagcggaccatccaggccaagaaggaggtggagcagcggagagccggcggctacagccggaagtacgccagcaaagccaagaatctggcagacgatatggtgagaaacaccgctagagatctgctgtactacgccgtgacccaggatgccatgctgatcttcgccaacctgagccggggcttcggccggcagggcaagcggaccttcatggccgagagacagtacacacggatggaggactggctgaccgccaagctggcctacgagggcctgagcaagacctacctgtccaagacactggcccagtacacctccaagacatgcagcaactgtgggtttaccatcaccagcgccgactacgacagggtgctggagaagctgaagaagacagcaacaggctggatgaccacaattaacggcaaggagctgaaggtggagggccagattacctactacaacagatacaagagacagaacgtagtcaaggacctgtccgtcgagctggatagactgagcgaagaatctgtgaacaacgacatctcctcctggacaaagggcagaagcggagaagctctgagcctcctgaagaaaagattctcccatagacccgtgcaggagaagttcgtgtgcctgaactgcggcttcgagacacacgcagccgagcaagccgccctgaacatcgccagatcctggctgttcctgcggagccaggagtacaagaaataccagacaaacaagacaaccggcaacaccgataagagagccttcgtcgagacctggcagtccttttaccggaagaagcttaaggaggtgtggaaacctgccgtgcggtctggcggatctggcggaggctccaccagccccaagaaaaagagaaaagtctaagctgccttctgcggggcttgccttctggccatgcccttcttctctcccttgcacctgtacctcttggtctttgaataaagcctgagtaggaaggctagcaaaaaaaaaaaaaaaaaaaaaaaaaaaaaaaaaaaaaaaaaaaaaaaaaaaaaaaaaaaaaaaaaaaaaaaaaaaaaaaa

SEQ ID NO: 13166 - RNA, 5785 nt, synthetic construct
  source 1..5785: mol_type = other RNA
aggaaataagagagaaaagaagagtaagaagaaatataagagccaccatggcccctaagaagaagcgtaaagtgagccggatggaacgcctcgtctacgaggtgcggcagaagtgcagaaacatcgaggacatctgcatctcctgcggatctctgaacgtgaccctggagcacccactgttcatcggcggcatgtgccagaactgtaaaaactgttttctggagtgtgcctatcaatacgacgatgacggctaccagagctactgcaccatctgttgcggcggaagagaggtgctgatgtgtggaaataacaactgctgccggtgcttctgcgtggaatgcgtggacctgctggtgggccccggcgccgcccaggccgctattaaggaagatccttggaactgctacatgtgcggccacaagggcacatacggcctgctgagacggagagaggactggcctagcagactgcagatgttcttcgccaataaccacgaccaggagttcgacccccctaaggtgtaccctcccgtccccgccgagaagagaaagcccatccgggtcctgagcctgttcgatggcatcgccaccggtctgctggtgctgaaggacctgggcatccaggtggataggtacattgcctccgaggtgtgcgaggactccatcaccgtgggaatggtgcgtcatcagggcaagatcatgtacgtgggcgacgtgcggagcgtgacacagaagcatatccaggagtggggccctttcgacctggtgatcggcggcagcccttgcaatgacctgagcatcgtgaacccagcccggaagggcctgtacgagggaaccggcagactgttcttcgagttttacagactgctgcacgacgcccggcctaaggaaggcgacgaccggcccttcttttggctgttcgagaatgtggtggccatgggagtcagcgacaagcgggatattagccggttcctggagagcaaccccgtgatgatcgatgccaaggaagtgagcgccgcccaccgggccagatacttctggggcaatctgcctggcatgaacagacccctggccagcaccgtgaacgacaagctggagctgcaggagtgcctggagcacggccggatcgccaagttcagcaaggtgagaaccatcaccacccgaagcaacagcatcaaacaaggcaaggaccagcactttcctgtgttcatgaacgagaaggaggacatcctgtggtgtaccgagatggagagagtgttcgggttcccagtccactacacagatgtcagcaacatgtctagactggccagacagagactgctgggaagaagctggtccgtccctgtgatcagacacctgttcgcccctctgaaggagtacttcgcctgcgtgagcagcggcaacagcaacgccaacagccggggccccagcttctctagcggcctggtgccactgtccctgagagggagccacatgggccccatggagatctacaaaaccgtgagcgcctggaagcggcagcctgtgcgcgtgctgagcctgtttcggaatatcgataaagtcctgaaaagcctgggattcctggagagcggctctggctccggcggtggcaccctgaagtacgtggaggatgtgacaaacgtggtcagacgggatgtggagaagtggggccccttcgatctggtgtacggcagcacccaacccctgggcagctcttgtgaccggtgccctggctggtacatgtttcagttccaccggatcctgcagtacgccctgccgagacaggagtcccagcggccattcttttggattttcatggacaacttgctgctgaccgaggatgaccaggaaactaccactcggttcctgcagaccgaagccgtgaccctgcaggacgtgagaggccgggactaccagaacgccatgcgggtgtggtccaacatccctggactgaaaagcaagcacgcacctctgacccctaaagaagaggagtacctgcaggcccaggtgcggagcagaagcaagctggacgcccctaaggtggatctgctggtgaagaattgcctcctgcccctgagagagtacttcaagtatttcagccagaatagtctgcccctgggaggcagcggcggcggcaagcccggcgtgctgaccttcgccgacgtggccgtgtacttcagcagcgaggagtggggctgcctgaggcccgcccagagggccctgtacagggacgtgatgagggagacctacggccacctgggcgccctgggcttccccggccccaagcccgccctgatcagctggatggagcaggagagcgaggagagcgaggcctggagccccgccgccaaggaccccgaggagggcgagagcctgggcggcggcccaagcagcggcgcccctcctcccagcggcggcagcccagccggctccccaacctctaccgaggagggcacctctgagtccgccacccccgagagcggccctggcacctccaccgagcccagcgagggcagcgcacccggcagccctgccggcagccccacctccacagaggagggaaccagcaccgagcccagcgaaggcagcgccccaggcaccagcaccgagcctagtgagcaggagattaaacggatcaacaagatcagaagaagacttgtgaaagacagcaacaccaagaaggccggcaagacaggccccatgaaaaccctgctggttagagtgatgacacccgatctgagagagcggctggaaaacctgagaaagaagcctgaaaatatcccccagcccatcagcaatacatctagagccaacctgaataagctgctgaccgattacaccgaaatgaagaaggcgatcctgcatgtgtactgggaagagttccagaaggaccctgtgggcctgatgagccgggtggcccagcctgccagcaagaagatcgatcagaacaagctgaaacctgagatggacgagaagggcaacctgaccaccgccggctttgcctgctctcagtgtggccagcccctgttcgtgtacaagctggagcaggtgtctgagaagggcaaggcttacaccaactacttcggacggtgcaatgtggccgagcacgaaaagctgatcctgctggcccagctgaagcccgagaaggatagcgacgaagccgtgacatatagcctgggaaagtttgggcagagggccctggatttctacagcattcatgtgaccaaggagtccacccaccccgtgaagcccctggcccagatcgccggaaacagatacgcctccggacctgtgggaaaggccctgagcgacgcatgtatgggcacaatcgcctccttcctgtctaagtaccaggacatcatcatcgaacaccagaaggtggtgaagggcaaccagaagagactggagagcctgcgggagctggccggcaaggaaaacctggaataccctagcgtgaccctgccacctcagcctcacaccaaggagggcgttgatgcctacaacgaagtgatcgcccgggtgcgaatgtgggtgaacctgaacctgtggcagaagctgaagctaagcagagatgatgccaagcctctgctgagactgaagggattcccttcctttcctctggtcgagagacaggccaacgaagtggactggtgggacatggtgtgtaacgtgaagaagctgatcaacgagaaaaaggaggatggcaaggtgttttggcagaatctggctggctacaagagacaggaagccctgagaccatacctgagcagcgaggaagatcggaagaagggaaagaaattcgctcggtaccagctgggcgacctgctgctgcacctggaaaagaagcacggcgaggactggggaaaggtgtacgacgaggcctgggagcggattgacaagaaagtggaaggcctgagcaagcacatcaagctggaagaggaacggagaagcgaggacgcccagagcaaggccgccctgaccgactggctgcgggctaaggccagcttcgtgatcgagggcctgaaggaggccgacaaggacgagttctgcagatgcgagctgaagctgcagaagtggtacggggacctgcggggaaagcccttcgccatcgaagccgagaacagcatcctggacatcagcggcttcagcaagcagtacaactgtgccttcatctggcagaaggacggcgtgaagaagctgaacctgtacctgatcatcaactacttcaagggcggcaagctgcggttcaagaagatcaaacctgaagccttcgaagccaacagattctacaccgtgatcaacaaaaagagcggcgagatcgtgcccatggaggtgaacttcaacttcgacgaccccaacctgatcatcctgcctctggcctttggcaagagacagggcagagaattcatctggaacgacctgctgtccctggaaaccggcagcctgaagctggccaacggaagagtgatcgagaagacactgtacaacagaagaacccggcaggatgagcctgccctgttcgtggccctgaccttcgagcggcgggaggtcctggactcctccaatatcaaaccaatgaacctgatcggcgtggcaagaggcgaaaacatccccgccgtgatcgccctgaccgaccccgagggctgcccactgagccggtttaaggatagcctgggaaacccaacccacatcctgagaatcggcgagagctataaggagaagcagcggaccatccaggccaagaaggaggtggagcagcggagagccggcggctacagccggaagtacgccagcaaagccaagaatctggcagacgatatggtgagaaacaccgctagagatctgctgtactacgccgtgacccaggatgccatgctgatcttcgccaacctgagccggggcttcggccggcagggcaagcggaccttcatggccgagagacagtacacacggatggaggactggctgaccgccaagctggcctacgagggcctgagcaagacctacctgtccaagacactggcccagtacacctccaagacatgcagcaactgtgggtttaccatcaccagcgccgactacgacagggtgctggagaagctgaagaagacagcaacaggctggatgaccacaattaacggcaaggagctgaaggtggagggccagattacctactacaacagatacaagagacagaacgtagtcaaggacctgtccgtcgagctggatagactgagcgaagaatctgtgaacaacgacatctcctcctggacaaagggcagaagcggagaagctctgagcctcctgaagaaaagattctcccatagacccgtgcaggagaagttcgtgtgcctgaactgcggcttcgagacacacgcagccgagcaagccgccctgaacatcgccagatcctggctgttcctgcggagccaggagtacaagaaataccagacaaacaagacaaccggcaacaccgataagagagccttcgtcgagacctggcagtccttttaccggaagaagcttaaggaggtgtggaaacctgccgtgcggtctggcggatctggcggaggctccaccagccccaagaaaaagagaaaagtctaagctgccttctgcggggcttgccttctggccatgcccttcttctctcccttgcacctgtacctcttggtctttgaataaagcctgagtaggaaggctagcaaaaaaaaaaaaaaaaaaaaaaaaaaaaaaaaaaaaaaaaaaaaaaaaaaaaaaaaaaaaaaaaaaaaaaaaaaaaaaaa

SEQ ID NO: 13167 - RNA, 5785 nt, synthetic construct
  source 1..5785: mol_type = other RNA
aggaaataagagagaaaagaagagtaagaagaaatataagagccaccatggcccctaagaagaagcgtaaagtgagccggatggaacgcctcgtctacgaggtgcggcagaagtgcagaaacatcgaggacatctgcatctcctgcggatctctgaacgtgaccctggagcacccactgttcatcggcggcatgtgccagaactgtaaaaactgttttctggagtgtgcctatcaatacgacgatgacggctaccagagctactgcaccatctgttgcggcggaagagaggtgctgatgtgtggaaataacaactgctgccggtgcttctgcgtggaatgcgtggacctgctggtgggccccggcgccgcccaggccgctattaaggaagatccttggaactgctacatgtgcggccacaagggcacatacggcctgctgagacggagagaggactggcctagcagactgcagatgttcttcgccaataaccacgaccaggagttcgacccccctaaggtgtaccctcccgtccccgccgagaagagaaagcccatccgggtcctgagcctgttcgatggcatcgccaccggtctgctggtgctgaaggacctgggcatccaggtggataggtacattgcctccgaggtgtgcgaggactccatcaccgtgggaatggtgcgtcatcagggcaagatcatgtacgtgggcgacgtgcggagcgtgacacagaagcatatccaggagtggggccctttcgacctggtgatcggcggcagcccttgcaatgacctgagcatcgtgaacccagcccggaagggcctgtacgagggaaccggcagactgttcttcgagttttacagactgctgcacgacgcccggcctaaggaaggcgacgaccggcccttcttttggctgttcgagaatgtggtggccatgggagtcagcgacaagcgggatattagccggttcctggagagcaaccccgtgatgatcgatgccaaggaagtgagcgccgcccaccgggccagatacttctggggcaatctgcctggcatgaacagacccctggccagcaccgtgaacgacaagctggagctgcaggagtgcctggagcacggccggatcgccaagttcagcaaggtgagaaccatcaccacccgaagcaacagcatcaaacaaggcaaggaccagcactttcctgtgttcatgaacgagaaggaggacatcctgtggtgtaccgagatggagagagtgttcgggttcccagtccactacacagatgtcagcaacatgtctagactggccagacagagactgctgggaagaagctggtccgtccctgtgatcagacacctgttcgcccctctgaaggagtacttcgcctgcgtgagcagcggcaacagcaacgccaacagccggggccccagcttctctagcggcctggtgccactgtccctgagagggagccacatgggccccatggagatctacaaaaccgtgagcgcctggaagcggcagcctgtgcgcgtgctgagcctgtttcggaatatcgataaagtcctgaaaagcctgggattcctggagagcggctctggctccggcggtggcaccctgaagtacgtggaggatgtgacaaacgtggtcagacgggatgtggagaagtggggccccttcgatctggtgtacggcagcacccaacccctgggcagctcttgtgaccggtgccctggctggtacatgtttcagttccaccggatcctgcagtacgccctgccgagacaggagtcccagcggccattcttttggattttcatggacaacttgctgctgaccgaggatgaccaggaaactaccactcggttcctgcagaccgaagccgtgaccctgcaggacgtgagaggccgggactaccagaacgccatgcgggtgtggtccaacatccctggactgaaaagcaagcacgcacctctgacccctaaagaagaggagtacctgcaggcccaggtgcggagcagaagcaagctggacgcccctaaggtggatctgctggtgaagaattgcctcctgcccctgagagagtacttcaagtatttcagccagaatagtctgcccctgggaggcagcggcggcggccaggtgcccgtgaccttcgaggacatcgccgtgtacttcagccaggaggagtgggaggacctggaggagcagcagagggagctgtacaaggacgtgatgaaggagaactacgagaccctgagcagcctgggcaccggcccccccgccgtgacccccgacatcatcagccacatcgagaggggcgaggagccctacatcaggttcgagagcggccccgaggagagggagatcggcaagagcagcggcggcccaagcagcggcgcccctcctcccagcggcggcagcccagccggctccccaacctctaccgaggagggcacctctgagtccgccacccccgagagcggccctggcacctccaccgagcccagcgagggcagcgcacccggcagccctgccggcagccccacctccacagaggagggaaccagcaccgagcccagcgaaggcagcgccccaggcaccagcaccgagcctagtgagcaggagattaaacggatcaacaagatcagaagaagacttgtgaaagacagcaacaccaagaaggccggcaagacaggccccatgaaaaccctgctggttagagtgatgacacccgatctgagagagcggctggaaaacctgagaaagaagcctgaaaatatcccccagcccatcagcaatacatctagagccaacctgaataagctgctgaccgattacaccgaaatgaagaaggcgatcctgcatgtgtactgggaagagttccagaaggaccctgtgggcctgatgagccgggtggcccagcctgccagcaagaagatcgatcagaacaagctgaaacctgagatggacgagaagggcaacctgaccaccgccggctttgcctgctctcagtgtggccagcccctgttcgtgtacaagctggagcaggtgtctgagaagggcaaggcttacaccaactacttcggacggtgcaatgtggccgagcacgaaaagctgatcctgctggcccagctgaagcccgagaaggatagcgacgaagccgtgacatatagcctgggaaagtttgggcagagggccctggatttctacagcattcatgtgaccaaggagtccacccaccccgtgaagcccctggcccagatcgccggaaacagatacgcctccggacctgtgggaaaggccctgagcgacgcatgtatgggcacaatcgcctccttcctgtctaagtaccaggacatcatcatcgaacaccagaaggtggtgaagggcaaccagaagagactggagagcctgcgggagctggccggcaaggaaaacctggaataccctagcgtgaccctgccacctcagcctcacaccaaggagggcgttgatgcctacaacgaagtgatcgcccgggtgcgaatgtgggtgaacctgaacctgtggcagaagctgaagctaagcagagatgatgccaagcctctgctgagactgaagggattcccttcctttcctctggtcgagagacaggccaacgaagtggactggtgggacatggtgtgtaacgtgaagaagctgatcaacgagaaaaaggaggatggcaaggtgttttggcagaatctggctggctacaagagacaggaagccctgagaccatacctgagcagcgaggaagatcggaagaagggaaagaaattcgctcggtaccagctgggcgacctgctgctgcacctggaaaagaagcacggcgaggactggggaaaggtgtacgacgaggcctgggagcggattgacaagaaagtggaaggcctgagcaagcacatcaagctggaagaggaacggagaagcgaggacgcccagagcaaggccgccctgaccgactggctgcgggctaaggccagcttcgtgatcgagggcctgaaggaggccgacaaggacgagttctgcagatgcgagctgaagctgcagaagtggtacggggacctgcggggaaagcccttcgccatcgaagccgagaacagcatcctggacatcagcggcttcagcaagcagtacaactgtgccttcatctggcagaaggacggcgtgaagaagctgaacctgtacctgatcatcaactacttcaagggcggcaagctgcggttcaagaagatcaaacctgaagccttcgaagccaacagattctacaccgtgatcaacaaaaagagcggcgagatcgtgcccatggaggtgaacttcaacttcgacgaccccaacctgatcatcctgcctctggcctttggcaagagacagggcagagaattcatctggaacgacctgctgtccctggaaaccggcagcctgaagctggccaacggaagagtgatcgagaagacactgtacaacagaagaacccggcaggatgagcctgccctgttcgtggccctgaccttcgagcggcgggaggtcctggactcctccaatatcaaaccaatgaacctgatcggcgtggcaagaggcgaaaacatccccgccgtgatcgccctgaccgaccccgagggctgcccactgagccggtttaaggatagcctgggaaacccaacccacatcctgagaatcggcgagagctataaggagaagcagcggaccatccaggccaagaaggaggtggagcagcggagagccggcggctacagccggaagtacgccagcaaagccaagaatctggcagacgatatggtgagaaacaccgctagagatctgctgtactacgccgtgacccaggatgccatgctgatcttcgccaacctgagccggggcttcggccggcagggcaagcggaccttcatggccgagagacagtacacacggatggaggactggctgaccgccaagctggcctacgagggcctgagcaagacctacctgtccaagacactggcccagtacacctccaagacatgcagcaactgtgggtttaccatcaccagcgccgactacgacagggtgctggagaagctgaagaagacagcaacaggctggatgaccacaattaacggcaaggagctgaaggtggagggccagattacctactacaacagatacaagagacagaacgtagtcaaggacctgtccgtcgagctggatagactgagcgaagaatctgtgaacaacgacatctcctcctggacaaagggcagaagcggagaagctctgagcctcctgaagaaaagattctcccatagacccgtgcaggagaagttcgtgtgcctgaactgcggcttcgagacacacgcagccgagcaagccgccctgaacatcgccagatcctggctgttcctgcggagccaggagtacaagaaataccagacaaacaagacaaccggcaacaccgataagagagccttcgtcgagacctggcagtccttttaccggaagaagcttaaggaggtgtggaaacctgccgtgcggtctggcggatctggcggaggctccaccagccccaagaaaaagagaaaagtctaagctgccttctgcggggcttgccttctggccatgcccttcttctctcccttgcacctgtacctcttggtctttgaataaagcctgagtaggaaggctagcaaaaaaaaaaaaaaaaaaaaaaaaaaaaaaaaaaaaaaaaaaaaaaaaaaaaaaaaaaaaaaaaaaaaaaaaaaaaaaaa

SEQ ID NO: 13168 - RNA, 5785 nt, synthetic construct
  source 1..5785: mol_type = other RNA
aggaaataagagagaaaagaagagtaagaagaaatataagagccaccatggcccctaagaagaagcgtaaagtgagccggatggaacgcctcgtctacgaggtgcggcagaagtgcagaaacatcgaggacatctgcatctcctgcggatctctgaacgtgaccctggagcacccactgttcatcggcggcatgtgccagaactgtaaaaactgttttctggagtgtgcctatcaatacgacgatgacggctaccagagctactgcaccatctgttgcggcggaagagaggtgctgatgtgtggaaataacaactgctgccggtgcttctgcgtggaatgcgtggacctgctggtgggccccggcgccgcccaggccgctattaaggaagatccttggaactgctacatgtgcggccacaagggcacatacggcctgctgagacggagagaggactggcctagcagactgcagatgttcttcgccaataaccacgaccaggagttcgacccccctaaggtgtaccctcccgtccccgccgagaagagaaagcccatccgggtcctgagcctgttcgatggcatcgccaccggtctgctggtgctgaaggacctgggcatccaggtggataggtacattgcctccgaggtgtgcgaggactccatcaccgtgggaatggtgcgtcatcagggcaagatcatgtacgtgggcgacgtgcggagcgtgacacagaagcatatccaggagtggggccctttcgacctggtgatcggcggcagcccttgcaatgacctgagcatcgtgaacccagcccggaagggcctgtacgagggaaccggcagactgttcttcgagttttacagactgctgcacgacgcccggcctaaggaaggcgacgaccggcccttcttttggctgttcgagaatgtggtggccatgggagtcagcgacaagcgggatattagccggttcctggagagcaaccccgtgatgatcgatgccaaggaagtgagcgccgcccaccgggccagatacttctggggcaatctgcctggcatgaacagacccctggccagcaccgtgaacgacaagctggagctgcaggagtgcctggagcacggccggatcgccaagttcagcaaggtgagaaccatcaccacccgaagcaacagcatcaaacaaggcaaggaccagcactttcctgtgttcatgaacgagaaggaggacatcctgtggtgtaccgagatggagagagtgttcgggttcccagtccactacacagatgtcagcaacatgtctagactggccagacagagactgctgggaagaagctggtccgtccctgtgatcagacacctgttcgcccctctgaaggagtacttcgcctgcgtgagcagcggcaacagcaacgccaacagccggggccccagcttctctagcggcctggtgccactgtccctgagagggagccacatgggccccatggagatctacaaaaccgtgagcgcctggaagcggcagcctgtgcgcgtgctgagcctgtttcggaatatcgataaagtcctgaaaagcctgggattcctggagagcggctctggctccggcggtggcaccctgaagtacgtggaggatgtgacaaacgtggtcagacgggatgtggagaagtggggccccttcgatctggtgtacggcagcacccaacccctgggcagctcttgtgaccggtgccctggctggtacatgtttcagttccaccggatcctgcagtacgccctgccgagacaggagtcccagcggccattcttttggattttcatggacaacttgctgctgaccgaggatgaccaggaaactaccactcggttcctgcagaccgaagccgtgaccctgcaggacgtgagaggccgggactaccagaacgccatgcgggtgtggtccaacatccctggactgaaaagcaagcacgcacctctgacccctaaagaagaggagtacctgcaggcccaggtgcggagcagaagcaagctggacgcccctaaggtggatctgctggtgaagaattgcctcctgcccctgagagagtacttcaagtatttcagccagaatagtctgcccctgggaggcagcggcggcggcgaggagcccgtgagcttcgccgaggtggccgtgtacttcagcagggaggagtgggccctgctggaccccgcccagagggccctgtacagggacgtgatgctggagacctaccagtgcgtggccagcatggagagcctgctgcccgcccccaagcccatcgtgatcagcctgctggagggcggcgaggacctgtggatccccgacatgcagagccccgaggacgtggccggcgacctgaggcccggcggcccaagcagcggcgcccctcctcccagcggcggcagcccagccggctccccaacctctaccgaggagggcacctctgagtccgccacccccgagagcggccctggcacctccaccgagcccagcgagggcagcgcacccggcagccctgccggcagccccacctccacagaggagggaaccagcaccgagcccagcgaaggcagcgccccaggcaccagcaccgagcctagtgagcaggagattaaacggatcaacaagatcagaagaagacttgtgaaagacagcaacaccaagaaggccggcaagacaggccccatgaaaaccctgctggttagagtgatgacacccgatctgagagagcggctggaaaacctgagaaagaagcctgaaaatatcccccagcccatcagcaatacatctagagccaacctgaataagctgctgaccgattacaccgaaatgaagaaggcgatcctgcatgtgtactgggaagagttccagaaggaccctgtgggcctgatgagccgggtggcccagcctgccagcaagaagatcgatcagaacaagctgaaacctgagatggacgagaagggcaacctgaccaccgccggctttgcctgctctcagtgtggccagcccctgttcgtgtacaagctggagcaggtgtctgagaagggcaaggcttacaccaactacttcggacggtgcaatgtggccgagcacgaaaagctgatcctgctggcccagctgaagcccgagaaggatagcgacgaagccgtgacatatagcctgggaaagtttgggcagagggccctggatttctacagcattcatgtgaccaaggagtccacccaccccgtgaagcccctggcccagatcgccggaaacagatacgcctccggacctgtgggaaaggccctgagcgacgcatgtatgggcacaatcgcctccttcctgtctaagtaccaggacatcatcatcgaacaccagaaggtggtgaagggcaaccagaagagactggagagcctgcgggagctggccggcaaggaaaacctggaataccctagcgtgaccctgccacctcagcctcacaccaaggagggcgttgatgcctacaacgaagtgatcgcccgggtgcgaatgtgggtgaacctgaacctgtggcagaagctgaagctaagcagagatgatgccaagcctctgctgagactgaagggattcccttcctttcctctggtcgagagacaggccaacgaagtggactggtgggacatggtgtgtaacgtgaagaagctgatcaacgagaaaaaggaggatggcaaggtgttttggcagaatctggctggctacaagagacaggaagccctgagaccatacctgagcagcgaggaagatcggaagaagggaaagaaattcgctcggtaccagctgggcgacctgctgctgcacctggaaaagaagcacggcgaggactggggaaaggtgtacgacgaggcctgggagcggattgacaagaaagtggaaggcctgagcaagcacatcaagctggaagaggaacggagaagcgaggacgcccagagcaaggccgccctgaccgactggctgcgggctaaggccagcttcgtgatcgagggcctgaaggaggccgacaaggacgagttctgcagatgcgagctgaagctgcagaagtggtacggggacctgcggggaaagcccttcgccatcgaagccgagaacagcatcctggacatcagcggcttcagcaagcagtacaactgtgccttcatctggcagaaggacggcgtgaagaagctgaacctgtacctgatcatcaactacttcaagggcggcaagctgcggttcaagaagatcaaacctgaagccttcgaagccaacagattctacaccgtgatcaacaaaaagagcggcgagatcgtgcccatggaggtgaacttcaacttcgacgaccccaacctgatcatcctgcctctggcctttggcaagagacagggcagagaattcatctggaacgacctgctgtccctggaaaccggcagcctgaagctggccaacggaagagtgatcgagaagacactgtacaacagaagaacccggcaggatgagcctgccctgttcgtggccctgaccttcgagcggcgggaggtcctggactcctccaatatcaaaccaatgaacctgatcggcgtggcaagaggcgaaaacatccccgccgtgatcgccctgaccgaccccgagggctgcccactgagccggtttaaggatagcctgggaaacccaacccacatcctgagaatcggcgagagctataaggagaagcagcggaccatccaggccaagaaggaggtggagcagcggagagccggcggctacagccggaagtacgccagcaaagccaagaatctggcagacgatatggtgagaaacaccgctagagatctgctgtactacgccgtgacccaggatgccatgctgatcttcgccaacctgagccggggcttcggccggcagggcaagcggaccttcatggccgagagacagtacacacggatggaggactggctgaccgccaagctggcctacgagggcctgagcaagacctacctgtccaagacactggcccagtacacctccaagacatgcagcaactgtgggtttaccatcaccagcgccgactacgacagggtgctggagaagctgaagaagacagcaacaggctggatgaccacaattaacggcaaggagctgaaggtggagggccagattacctactacaacagatacaagagacagaacgtagtcaaggacctgtccgtcgagctggatagactgagcgaagaatctgtgaacaacgacatctcctcctggacaaagggcagaagcggagaagctctgagcctcctgaagaaaagattctcccatagacccgtgcaggagaagttcgtgtgcctgaactgcggcttcgagacacacgcagccgagcaagccgccctgaacatcgccagatcctggctgttcctgcggagccaggagtacaagaaataccagacaaacaagacaaccggcaacaccgataagagagccttcgtcgagacctggcagtccttttaccggaagaagcttaaggaggtgtggaaacctgccgtgcggtctggcggatctggcggaggctccaccagccccaagaaaaagagaaaagtctaagctgccttctgcggggcttgccttctggccatgcccttcttctctcccttgcacctgtacctcttggtctttgaataaagcctgagtaggaaggctagcaaaaaaaaaaaaaaaaaaaaaaaaaaaaaaaaaaaaaaaaaaaaaaaaaaaaaaaaaaaaaaaaaaaaaaaaaaaaaaaa

SEQ ID NO: 13169 - RNA, 5785 nt, synthetic construct
  source 1..5785: mol_type = other RNA
aggaaataagagagaaaagaagagtaagaagaaatataagagccaccatggcccctaagaagaagcgtaaagtgagccggatggaacgcctcgtctacgaggtgcggcagaagtgcagaaacatcgaggacatctgcatctcctgcggatctctgaacgtgaccctggagcacccactgttcatcggcggcatgtgccagaactgtaaaaactgttttctggagtgtgcctatcaatacgacgatgacggctaccagagctactgcaccatctgttgcggcggaagagaggtgctgatgtgtggaaataacaactgctgccggtgcttctgcgtggaatgcgtggacctgctggtgggccccggcgccgcccaggccgctattaaggaagatccttggaactgctacatgtgcggccacaagggcacatacggcctgctgagacggagagaggactggcctagcagactgcagatgttcttcgccaataaccacgaccaggagttcgacccccctaaggtgtaccctcccgtccccgccgagaagagaaagcccatccgggtcctgagcctgttcgatggcatcgccaccggtctgctggtgctgaaggacctgggcatccaggtggataggtacattgcctccgaggtgtgcgaggactccatcaccgtgggaatggtgcgtcatcagggcaagatcatgtacgtgggcgacgtgcggagcgtgacacagaagcatatccaggagtggggccctttcgacctggtgatcggcggcagcccttgcaatgacctgagcatcgtgaacccagcccggaagggcctgtacgagggaaccggcagactgttcttcgagttttacagactgctgcacgacgcccggcctaaggaaggcgacgaccggcccttcttttggctgttcgagaatgtggtggccatgggagtcagcgacaagcgggatattagccggttcctggagagcaaccccgtgatgatcgatgccaaggaagtgagcgccgcccaccgggccagatacttctggggcaatctgcctggcatgaacagacccctggccagcaccgtgaacgacaagctggagctgcaggagtgcctggagcacggccggatcgccaagttcagcaaggtgagaaccatcaccacccgaagcaacagcatcaaacaaggcaaggaccagcactttcctgtgttcatgaacgagaaggaggacatcctgtggtgtaccgagatggagagagtgttcgggttcccagtccactacacagatgtcagcaacatgtctagactggccagacagagactgctgggaagaagctggtccgtccctgtgatcagacacctgttcgcccctctgaaggagtacttcgcctgcgtgagcagcggcaacagcaacgccaacagccggggccccagcttctctagcggcctggtgccactgtccctgagagggagccacatgggccccatggagatctacaaaaccgtgagcgcctggaagcggcagcctgtgcgcgtgctgagcctgtttcggaatatcgataaagtcctgaaaagcctgggattcctggagagcggctctggctccggcggtggcaccctgaagtacgtggaggatgtgacaaacgtggtcagacgggatgtggagaagtggggccccttcgatctggtgtacggcagcacccaacccctgggcagctcttgtgaccggtgccctggctggtacatgtttcagttccaccggatcctgcagtacgccctgccgagacaggagtcccagcggccattcttttggattttcatggacaacttgctgctgaccgaggatgaccaggaaactaccactcggttcctgcagaccgaagccgtgaccctgcaggacgtgagaggccgggactaccagaacgccatgcgggtgtggtccaacatccctggactgaaaagcaagcacgcacctctgacccctaaagaagaggagtacctgcaggcccaggtgcggagcagaagcaagctggacgcccctaaggtggatctgctggtgaagaattgcctcctgcccctgagagagtacttcaagtatttcagccagaatagtctgcccctgggaggcagcggcggcggcatgagcctgggcagcgagctgttcagggacgtggccatcgtgttcagccaggaggagtggcagtggctggcccccgcccagagggacctgtacagggacgtgatgctggagacctacagcaacctggtgagcctgggcctggccgtgagcaagcccgacgtgatcagcttcctggagcagggcaaggagccctggatggtggagagggtggtgagcggcggcctgtgccccgtgctggagagcggcggcccaagcagcggcgcccctcctcccagcggcggcagcccagccggctccccaacctctaccgaggagggcacctctgagtccgccacccccgagagcggccctggcacctccaccgagcccagcgagggcagcgcacccggcagccctgccggcagccccacctccacagaggagggaaccagcaccgagcccagcgaaggcagcgccccaggcaccagcaccgagcctagtgagcaggagattaaacggatcaacaagatcagaagaagacttgtgaaagacagcaacaccaagaaggccggcaagacaggccccatgaaaaccctgctggttagagtgatgacacccgatctgagagagcggctggaaaacctgagaaagaagcctgaaaatatcccccagcccatcagcaatacatctagagccaacctgaataagctgctgaccgattacaccgaaatgaagaaggcgatcctgcatgtgtactgggaagagttccagaaggaccctgtgggcctgatgagccgggtggcccagcctgccagcaagaagatcgatcagaacaagctgaaacctgagatggacgagaagggcaacctgaccaccgccggctttgcctgctctcagtgtggccagcccctgttcgtgtacaagctggagcaggtgtctgagaagggcaaggcttacaccaactacttcggacggtgcaatgtggccgagcacgaaaagctgatcctgctggcccagctgaagcccgagaaggatagcgacgaagccgtgacatatagcctgggaaagtttgggcagagggccctggatttctacagcattcatgtgaccaaggagtccacccaccccgtgaagcccctggcccagatcgccggaaacagatacgcctccggacctgtgggaaaggccctgagcgacgcatgtatgggcacaatcgcctccttcctgtctaagtaccaggacatcatcatcgaacaccagaaggtggtgaagggcaaccagaagagactggagagcctgcgggagctggccggcaaggaaaacctggaataccctagcgtgaccctgccacctcagcctcacaccaaggagggcgttgatgcctacaacgaagtgatcgcccgggtgcgaatgtgggtgaacctgaacctgtggcagaagctgaagctaagcagagatgatgccaagcctctgctgagactgaagggattcccttcctttcctctggtcgagagacaggccaacgaagtggactggtgggacatggtgtgtaacgtgaagaagctgatcaacgagaaaaaggaggatggcaaggtgttttggcagaatctggctggctacaagagacaggaagccctgagaccatacctgagcagcgaggaagatcggaagaagggaaagaaattcgctcggtaccagctgggcgacctgctgctgcacctggaaaagaagcacggcgaggactggggaaaggtgtacgacgaggcctgggagcggattgacaagaaagtggaaggcctgagcaagcacatcaagctggaagaggaacggagaagcgaggacgcccagagcaaggccgccctgaccgactggctgcgggctaaggccagcttcgtgatcgagggcctgaaggaggccgacaaggacgagttctgcagatgcgagctgaagctgcagaagtggtacggggacctgcggggaaagcccttcgccatcgaagccgagaacagcatcctggacatcagcggcttcagcaagcagtacaactgtgccttcatctggcagaaggacggcgtgaagaagctgaacctgtacctgatcatcaactacttcaagggcggcaagctgcggttcaagaagatcaaacctgaagccttcgaagccaacagattctacaccgtgatcaacaaaaagagcggcgagatcgtgcccatggaggtgaacttcaacttcgacgaccccaacctgatcatcctgcctctggcctttggcaagagacagggcagagaattcatctggaacgacctgctgtccctggaaaccggcagcctgaagctggccaacggaagagtgatcgagaagacactgtacaacagaagaacccggcaggatgagcctgccctgttcgtggccctgaccttcgagcggcgggaggtcctggactcctccaatatcaaaccaatgaacctgatcggcgtggcaagaggcgaaaacatccccgccgtgatcgccctgaccgaccccgagggctgcccactgagccggtttaaggatagcctgggaaacccaacccacatcctgagaatcggcgagagctataaggagaagcagcggaccatccaggccaagaaggaggtggagcagcggagagccggcggctacagccggaagtacgccagcaaagccaagaatctggcagacgatatggtgagaaacaccgctagagatctgctgtactacgccgtgacccaggatgccatgctgatcttcgccaacctgagccggggcttcggccggcagggcaagcggaccttcatggccgagagacagtacacacggatggaggactggctgaccgccaagctggcctacgagggcctgagcaagacctacctgtccaagacactggcccagtacacctccaagacatgcagcaactgtgggtttaccatcaccagcgccgactacgacagggtgctggagaagctgaagaagacagcaacaggctggatgaccacaattaacggcaaggagctgaaggtggagggccagattacctactacaacagatacaagagacagaacgtagtcaaggacctgtccgtcgagctggatagactgagcgaagaatctgtgaacaacgacatctcctcctggacaaagggcagaagcggagaagctctgagcctcctgaagaaaagattctcccatagacccgtgcaggagaagttcgtgtgcctgaactgcggcttcgagacacacgcagccgagcaagccgccctgaacatcgccagatcctggctgttcctgcggagccaggagtacaagaaataccagacaaacaagacaaccggcaacaccgataagagagccttcgtcgagacctggcagtccttttaccggaagaagcttaaggaggtgtggaaacctgccgtgcggtctggcggatctggcggaggctccaccagccccaagaaaaagagaaaagtctaagctgccttctgcggggcttgccttctggccatgcccttcttctctcccttgcacctgtacctcttggtctttgaataaagcctgagtaggaaggctagcaaaaaaaaaaaaaaaaaaaaaaaaaaaaaaaaaaaaaaaaaaaaaaaaaaaaaaaaaaaaaaaaaaaaaaaaaaaaaaaa

SEQ ID NO: 13170 - RNA, 5785 nt, synthetic construct
  source 1..5785: mol_type = other RNA
aggaaataagagagaaaagaagagtaagaagaaatataagagccaccatggcccctaagaagaagcgtaaagtgagccggatggaacgcctcgtctacgaggtgcggcagaagtgcagaaacatcgaggacatctgcatctcctgcggatctctgaacgtgaccctggagcacccactgttcatcggcggcatgtgccagaactgtaaaaactgttttctggagtgtgcctatcaatacgacgatgacggctaccagagctactgcaccatctgttgcggcggaagagaggtgctgatgtgtggaaataacaactgctgccggtgcttctgcgtggaatgcgtggacctgctggtgggccccggcgccgcccaggccgctattaaggaagatccttggaactgctacatgtgcggccacaagggcacatacggcctgctgagacggagagaggactggcctagcagactgcagatgttcttcgccaataaccacgaccaggagttcgacccccctaaggtgtaccctcccgtccccgccgagaagagaaagcccatccgggtcctgagcctgttcgatggcatcgccaccggtctgctggtgctgaaggacctgggcatccaggtggataggtacattgcctccgaggtgtgcgaggactccatcaccgtgggaatggtgcgtcatcagggcaagatcatgtacgtgggcgacgtgcggagcgtgacacagaagcatatccaggagtggggccctttcgacctggtgatcggcggcagcccttgcaatgacctgagcatcgtgaacccagcccggaagggcctgtacgagggaaccggcagactgttcttcgagttttacagactgctgcacgacgcccggcctaaggaaggcgacgaccggcccttcttttggctgttcgagaatgtggtggccatgggagtcagcgacaagcgggatattagccggttcctggagagcaaccccgtgatgatcgatgccaaggaagtgagcgccgcccaccgggccagatacttctggggcaatctgcctggcatgaacagacccctggccagcaccgtgaacgacaagctggagctgcaggagtgcctggagcacggccggatcgccaagttcagcaaggtgagaaccatcaccacccgaagcaacagcatcaaacaaggcaaggaccagcactttcctgtgttcatgaacgagaaggaggacatcctgtggtgtaccgagatggagagagtgttcgggttcccagtccactacacagatgtcagcaacatgtctagactggccagacagagactgctgggaagaagctggtccgtccctgtgatcagacacctgttcgcccctctgaaggagtacttcgcctgcgtgagcagcggcaacagcaacgccaacagccggggccccagcttctctagcggcctggtgccactgtccctgagagggagccacatgggccccatggagatctacaaaaccgtgagcgcctggaagcggcagcctgtgcgcgtgctgagcctgtttcggaatatcgataaagtcctgaaaagcctgggattcctggagagcggctctggctccggcggtggcaccctgaagtacgtggaggatgtgacaaacgtggtcagacgggatgtggagaagtggggccccttcgatctggtgtacggcagcacccaacccctgggcagctcttgtgaccggtgccctggctggtacatgtttcagttccaccggatcctgcagtacgccctgccgagacaggagtcccagcggccattcttttggattttcatggacaacttgctgctgaccgaggatgaccaggaaactaccactcggttcctgcagaccgaagccgtgaccctgcaggacgtgagaggccgggactaccagaacgccatgcgggtgtggtccaacatccctggactgaaaagcaagcacgcacctctgacccctaaagaagaggagtacctgcaggcccaggtgcggagcagaagcaagctggacgcccctaaggtggatctgctggtgaagaattgcctcctgcccctgagagagtacttcaagtatttcagccagaatagtctgcccctgggaggcagcggcggcggcagccccgagagcgtggccttcgaggacgtggccgtgtacttcaccaagaaggagtgggccagcctgctgcccgcccagagggccctgtacaaggaggtgatgctggagaactacggcatggtggccagcctggcccccccccccatcagcaagcccgccctgatcagccagctggagcagggcaaggagccctggttcaccaggccccagggcgccctgaacaggagggccaggagggtggtgggcggcccaagcagcggcgcccctcctcccagcggcggcagcccagccggctccccaacctctaccgaggagggcacctctgagtccgccacccccgagagcggccctggcacctccaccgagcccagcgagggcagcgcacccggcagccctgccggcagccccacctccacagaggagggaaccagcaccgagcccagcgaaggcagcgccccaggcaccagcaccgagcctagtgagcaggagattaaacggatcaacaagatcagaagaagacttgtgaaagacagcaacaccaagaaggccggcaagacaggccccatgaaaaccctgctggttagagtgatgacacccgatctgagagagcggctggaaaacctgagaaagaagcctgaaaatatcccccagcccatcagcaatacatctagagccaacctgaataagctgctgaccgattacaccgaaatgaagaaggcgatcctgcatgtgtactgggaagagttccagaaggaccctgtgggcctgatgagccgggtggcccagcctgccagcaagaagatcgatcagaacaagctgaaacctgagatggacgagaagggcaacctgaccaccgccggctttgcctgctctcagtgtggccagcccctgttcgtgtacaagctggagcaggtgtctgagaagggcaaggcttacaccaactacttcggacggtgcaatgtggccgagcacgaaaagctgatcctgctggcccagctgaagcccgagaaggatagcgacgaagccgtgacatatagcctgggaaagtttgggcagagggccctggatttctacagcattcatgtgaccaaggagtccacccaccccgtgaagcccctggcccagatcgccggaaacagatacgcctccggacctgtgggaaaggccctgagcgacgcatgtatgggcacaatcgcctccttcctgtctaagtaccaggacatcatcatcgaacaccagaaggtggtgaagggcaaccagaagagactggagagcctgcgggagctggccggcaaggaaaacctggaataccctagcgtgaccctgccacctcagcctcacaccaaggagggcgttgatgcctacaacgaagtgatcgcccgggtgcgaatgtgggtgaacctgaacctgtggcagaagctgaagctaagcagagatgatgccaagcctctgctgagactgaagggattcccttcctttcctctggtcgagagacaggccaacgaagtggactggtgggacatggtgtgtaacgtgaagaagctgatcaacgagaaaaaggaggatggcaaggtgttttggcagaatctggctggctacaagagacaggaagccctgagaccatacctgagcagcgaggaagatcggaagaagggaaagaaattcgctcggtaccagctgggcgacctgctgctgcacctggaaaagaagcacggcgaggactggggaaaggtgtacgacgaggcctgggagcggattgacaagaaagtggaaggcctgagcaagcacatcaagctggaagaggaacggagaagcgaggacgcccagagcaaggccgccctgaccgactggctgcgggctaaggccagcttcgtgatcgagggcctgaaggaggccgacaaggacgagttctgcagatgcgagctgaagctgcagaagtggtacggggacctgcggggaaagcccttcgccatcgaagccgagaacagcatcctggacatcagcggcttcagcaagcagtacaactgtgccttcatctggcagaaggacggcgtgaagaagctgaacctgtacctgatcatcaactacttcaagggcggcaagctgcggttcaagaagatcaaacctgaagccttcgaagccaacagattctacaccgtgatcaacaaaaagagcggcgagatcgtgcccatggaggtgaacttcaacttcgacgaccccaacctgatcatcctgcctctggcctttggcaagagacagggcagagaattcatctggaacgacctgctgtccctggaaaccggcagcctgaagctggccaacggaagagtgatcgagaagacactgtacaacagaagaacccggcaggatgagcctgccctgttcgtggccctgaccttcgagcggcgggaggtcctggactcctccaatatcaaaccaatgaacctgatcggcgtggcaagaggcgaaaacatccccgccgtgatcgccctgaccgaccccgagggctgcccactgagccggtttaaggatagcctgggaaacccaacccacatcctgagaatcggcgagagctataaggagaagcagcggaccatccaggccaagaaggaggtggagcagcggagagccggcggctacagccggaagtacgccagcaaagccaagaatctggcagacgatatggtgagaaacaccgctagagatctgctgtactacgccgtgacccaggatgccatgctgatcttcgccaacctgagccggggcttcggccggcagggcaagcggaccttcatggccgagagacagtacacacggatggaggactggctgaccgccaagctggcctacgagggcctgagcaagacctacctgtccaagacactggcccagtacacctccaagacatgcagcaactgtgggtttaccatcaccagcgccgactacgacagggtgctggagaagctgaagaagacagcaacaggctggatgaccacaattaacggcaaggagctgaaggtggagggccagattacctactacaacagatacaagagacagaacgtagtcaaggacctgtccgtcgagctggatagactgagcgaagaatctgtgaacaacgacatctcctcctggacaaagggcagaagcggagaagctctgagcctcctgaagaaaagattctcccatagacccgtgcaggagaagttcgtgtgcctgaactgcggcttcgagacacacgcagccgagcaagccgccctgaacatcgccagatcctggctgttcctgcggagccaggagtacaagaaataccagacaaacaagacaaccggcaacaccgataagagagccttcgtcgagacctggcagtccttttaccggaagaagcttaaggaggtgtggaaacctgccgtgcggtctggcggatctggcggaggctccaccagccccaagaaaaagagaaaagtctaagctgccttctgcggggcttgccttctggccatgcccttcttctctcccttgcacctgtacctcttggtctttgaataaagcctgagtaggaaggctagcaaaaaaaaaaaaaaaaaaaaaaaaaaaaaaaaaaaaaaaaaaaaaaaaaaaaaaaaaaaaaaaaaaaaaaaaaaaaaaaa

SEQ ID NO: 13171 - RNA, 5785 nt, synthetic construct
  source 1..5785: mol_type = other RNA
aggaaataagagagaaaagaagagtaagaagaaatataagagccaccatggcccctaagaagaagcgtaaagtgagccggatggaacgcctcgtctacgaggtgcggcagaagtgcagaaacatcgaggacatctgcatctcctgcggatctctgaacgtgaccctggagcacccactgttcatcggcggcatgtgccagaactgtaaaaactgttttctggagtgtgcctatcaatacgacgatgacggctaccagagctactgcaccatctgttgcggcggaagagaggtgctgatgtgtggaaataacaactgctgccggtgcttctgcgtggaatgcgtggacctgctggtgggccccggcgccgcccaggccgctattaaggaagatccttggaactgctacatgtgcggccacaagggcacatacggcctgctgagacggagagaggactggcctagcagactgcagatgttcttcgccaataaccacgaccaggagttcgacccccctaaggtgtaccctcccgtccccgccgagaagagaaagcccatccgggtcctgagcctgttcgatggcatcgccaccggtctgctggtgctgaaggacctgggcatccaggtggataggtacattgcctccgaggtgtgcgaggactccatcaccgtgggaatggtgcgtcatcagggcaagatcatgtacgtgggcgacgtgcggagcgtgacacagaagcatatccaggagtggggccctttcgacctggtgatcggcggcagcccttgcaatgacctgagcatcgtgaacccagcccggaagggcctgtacgagggaaccggcagactgttcttcgagttttacagactgctgcacgacgcccggcctaaggaaggcgacgaccggcccttcttttggctgttcgagaatgtggtggccatgggagtcagcgacaagcgggatattagccggttcctggagagcaaccccgtgatgatcgatgccaaggaagtgagcgccgcccaccgggccagatacttctggggcaatctgcctggcatgaacagacccctggccagcaccgtgaacgacaagctggagctgcaggagtgcctggagcacggccggatcgccaagttcagcaaggtgagaaccatcaccacccgaagcaacagcatcaaacaaggcaaggaccagcactttcctgtgttcatgaacgagaaggaggacatcctgtggtgtaccgagatggagagagtgttcgggttcccagtccactacacagatgtcagcaacatgtctagactggccagacagagactgctgggaagaagctggtccgtccctgtgatcagacacctgttcgcccctctgaaggagtacttcgcctgcgtgagcagcggcaacagcaacgccaacagccggggccccagcttctctagcggcctggtgccactgtccctgagagggagccacatgggccccatggagatctacaaaaccgtgagcgcctggaagcggcagcctgtgcgcgtgctgagcctgtttcggaatatcgataaagtcctgaaaagcctgggattcctggagagcggctctggctccggcggtggcaccctgaagtacgtggaggatgtgacaaacgtggtcagacgggatgtggagaagtggggccccttcgatctggtgtacggcagcacccaacccctgggcagctcttgtgaccggtgccctggctggtacatgtttcagttccaccggatcctgcagtacgccctgccgagacaggagtcccagcggccattcttttggattttcatggacaacttgctgctgaccgaggatgaccaggaaactaccactcggttcctgcagaccgaagccgtgaccctgcaggacgtgagaggccgggactaccagaacgccatgcgggtgtggtccaacatccctggactgaaaagcaagcacgcacctctgacccctaaagaagaggagtacctgcaggcccaggtgcggagcagaagcaagctggacgcccctaaggtggatctgctggtgaagaattgcctcctgcccctgagagagtacttcaagtatttcagccagaatagtctgcccctgggaggcagcggcggcggcccccaggagcccgtgaccttcgaggacgtggccgtgtacttcacccagaaccagtgggccagcctggaccccatgcagagggccctgtacagggaggtgatgctggagaactacgccagcgtggccagcctggccttccccttccccaagcccgacctggtgagccagctggagaggggcgaggccccctggagccccgacccctgggaggccgaggtgctgaagggcacctgccccggcggcggcggcccaagcagcggcgcccctcctcccagcggcggcagcccagccggctccccaacctctaccgaggagggcacctctgagtccgccacccccgagagcggccctggcacctccaccgagcccagcgagggcagcgcacccggcagccctgccggcagccccacctccacagaggagggaaccagcaccgagcccagcgaaggcagcgccccaggcaccagcaccgagcctagtgagcaggagattaaacggatcaacaagatcagaagaagacttgtgaaagacagcaacaccaagaaggccggcaagacaggccccatgaaaaccctgctggttagagtgatgacacccgatctgagagagcggctggaaaacctgagaaagaagcctgaaaatatcccccagcccatcagcaatacatctagagccaacctgaataagctgctgaccgattacaccgaaatgaagaaggcgatcctgcatgtgtactgggaagagttccagaaggaccctgtgggcctgatgagccgggtggcccagcctgccagcaagaagatcgatcagaacaagctgaaacctgagatggacgagaagggcaacctgaccaccgccggctttgcctgctctcagtgtggccagcccctgttcgtgtacaagctggagcaggtgtctgagaagggcaaggcttacaccaactacttcggacggtgcaatgtggccgagcacgaaaagctgatcctgctggcccagctgaagcccgagaaggatagcgacgaagccgtgacatatagcctgggaaagtttgggcagagggccctggatttctacagcattcatgtgaccaaggagtccacccaccccgtgaagcccctggcccagatcgccggaaacagatacgcctccggacctgtgggaaaggccctgagcgacgcatgtatgggcacaatcgcctccttcctgtctaagtaccaggacatcatcatcgaacaccagaaggtggtgaagggcaaccagaagagactggagagcctgcgggagctggccggcaaggaaaacctggaataccctagcgtgaccctgccacctcagcctcacaccaaggagggcgttgatgcctacaacgaagtgatcgcccgggtgcgaatgtgggtgaacctgaacctgtggcagaagctgaagctaagcagagatgatgccaagcctctgctgagactgaagggattcccttcctttcctctggtcgagagacaggccaacgaagtggactggtgggacatggtgtgtaacgtgaagaagctgatcaacgagaaaaaggaggatggcaaggtgttttggcagaatctggctggctacaagagacaggaagccctgagaccatacctgagcagcgaggaagatcggaagaagggaaagaaattcgctcggtaccagctgggcgacctgctgctgcacctggaaaagaagcacggcgaggactggggaaaggtgtacgacgaggcctgggagcggattgacaagaaagtggaaggcctgagcaagcacatcaagctggaagaggaacggagaagcgaggacgcccagagcaaggccgccctgaccgactggctgcgggctaaggccagcttcgtgatcgagggcctgaaggaggccgacaaggacgagttctgcagatgcgagctgaagctgcagaagtggtacggggacctgcggggaaagcccttcgccatcgaagccgagaacagcatcctggacatcagcggcttcagcaagcagtacaactgtgccttcatctggcagaaggacggcgtgaagaagctgaacctgtacctgatcatcaactacttcaagggcggcaagctgcggttcaagaagatcaaacctgaagccttcgaagccaacagattctacaccgtgatcaacaaaaagagcggcgagatcgtgcccatggaggtgaacttcaacttcgacgaccccaacctgatcatcctgcctctggcctttggcaagagacagggcagagaattcatctggaacgacctgctgtccctggaaaccggcagcctgaagctggccaacggaagagtgatcgagaagacactgtacaacagaagaacccggcaggatgagcctgccctgttcgtggccctgaccttcgagcggcgggaggtcctggactcctccaatatcaaaccaatgaacctgatcggcgtggcaagaggcgaaaacatccccgccgtgatcgccctgaccgaccccgagggctgcccactgagccggtttaaggatagcctgggaaacccaacccacatcctgagaatcggcgagagctataaggagaagcagcggaccatccaggccaagaaggaggtggagcagcggagagccggcggctacagccggaagtacgccagcaaagccaagaatctggcagacgatatggtgagaaacaccgctagagatctgctgtactacgccgtgacccaggatgccatgctgatcttcgccaacctgagccggggcttcggccggcagggcaagcggaccttcatggccgagagacagtacacacggatggaggactggctgaccgccaagctggcctacgagggcctgagcaagacctacctgtccaagacactggcccagtacacctccaagacatgcagcaactgtgggtttaccatcaccagcgccgactacgacagggtgctggagaagctgaagaagacagcaacaggctggatgaccacaattaacggcaaggagctgaaggtggagggccagattacctactacaacagatacaagagacagaacgtagtcaaggacctgtccgtcgagctggatagactgagcgaagaatctgtgaacaacgacatctcctcctggacaaagggcagaagcggagaagctctgagcctcctgaagaaaagattctcccatagacccgtgcaggagaagttcgtgtgcctgaactgcggcttcgagacacacgcagccgagcaagccgccctgaacatcgccagatcctggctgttcctgcggagccaggagtacaagaaataccagacaaacaagacaaccggcaacaccgataagagagccttcgtcgagacctggcagtccttttaccggaagaagcttaaggaggtgtggaaacctgccgtgcggtctggcggatctggcggaggctccaccagccccaagaaaaagagaaaagtctaagctgccttctgcggggcttgccttctggccatgcccttcttctctcccttgcacctgtacctcttggtctttgaataaagcctgagtaggaaggctagcaaaaaaaaaaaaaaaaaaaaaaaaaaaaaaaaaaaaaaaaaaaaaaaaaaaaaaaaaaaaaaaaaaaaaaaaaaaaaaaa

SEQ ID NO: 13172 - RNA, 5785 nt, synthetic construct
  source 1..5785: mol_type = other RNA
aggaaataagagagaaaagaagagtaagaagaaatataagagccaccatggcccctaagaagaagcgtaaagtgagccggatggaacgcctcgtctacgaggtgcggcagaagtgcagaaacatcgaggacatctgcatctcctgcggatctctgaacgtgaccctggagcacccactgttcatcggcggcatgtgccagaactgtaaaaactgttttctggagtgtgcctatcaatacgacgatgacggctaccagagctactgcaccatctgttgcggcggaagagaggtgctgatgtgtggaaataacaactgctgccggtgcttctgcgtggaatgcgtggacctgctggtgggccccggcgccgcccaggccgctattaaggaagatccttggaactgctacatgtgcggccacaagggcacatacggcctgctgagacggagagaggactggcctagcagactgcagatgttcttcgccaataaccacgaccaggagttcgacccccctaaggtgtaccctcccgtccccgccgagaagagaaagcccatccgggtcctgagcctgttcgatggcatcgccaccggtctgctggtgctgaaggacctgggcatccaggtggataggtacattgcctccgaggtgtgcgaggactccatcaccgtgggaatggtgcgtcatcagggcaagatcatgtacgtgggcgacgtgcggagcgtgacacagaagcatatccaggagtggggccctttcgacctggtgatcggcggcagcccttgcaatgacctgagcatcgtgaacccagcccggaagggcctgtacgagggaaccggcagactgttcttcgagttttacagactgctgcacgacgcccggcctaaggaaggcgacgaccggcccttcttttggctgttcgagaatgtggtggccatgggagtcagcgacaagcgggatattagccggttcctggagagcaaccccgtgatgatcgatgccaaggaagtgagcgccgcccaccgggccagatacttctggggcaatctgcctggcatgaacagacccctggccagcaccgtgaacgacaagctggagctgcaggagtgcctggagcacggccggatcgccaagttcagcaaggtgagaaccatcaccacccgaagcaacagcatcaaacaaggcaaggaccagcactttcctgtgttcatgaacgagaaggaggacatcctgtggtgtaccgagatggagagagtgttcgggttcccagtccactacacagatgtcagcaacatgtctagactggccagacagagactgctgggaagaagctggtccgtccctgtgatcagacacctgttcgcccctctgaaggagtacttcgcctgcgtgagcagcggcaacagcaacgccaacagccggggccccagcttctctagcggcctggtgccactgtccctgagagggagccacatgggccccatggagatctacaaaaccgtgagcgcctggaagcggcagcctgtgcgcgtgctgagcctgtttcggaatatcgataaagtcctgaaaagcctgggattcctggagagcggctctggctccggcggtggcaccctgaagtacgtggaggatgtgacaaacgtggtcagacgggatgtggagaagtggggccccttcgatctggtgtacggcagcacccaacccctgggcagctcttgtgaccggtgccctggctggtacatgtttcagttccaccggatcctgcagtacgccctgccgagacaggagtcccagcggccattcttttggattttcatggacaacttgctgctgaccgaggatgaccaggaaactaccactcggttcctgcagaccgaagccgtgaccctgcaggacgtgagaggccgggactaccagaacgccatgcgggtgtggtccaacatccctggactgaaaagcaagcacgcacctctgacccctaaagaagaggagtacctgcaggcccaggtgcggagcagaagcaagctggacgcccctaaggtggatctgctggtgaagaattgcctcctgcccctgagagagtacttcaagtatttcagccagaatagtctgcccctgggaggcagcggcggcggccccagggtgagcctgaccttcgaggacgtggccgtgctgttcaccagggacgagtggaggaagctgggccccagcgagaggaacctgtaccaggacgtgatgctggagaactacagcaacctggtgagcctgggcctgctgttcagcaagcccaaggtgatcagcctgctgcagcagggcgaggacccctggaaggtggagaaggagagccccggcggccccagcctgggctacaagagcagcggcggcccaagcagcggcgcccctcctcccagcggcggcagcccagccggctccccaacctctaccgaggagggcacctctgagtccgccacccccgagagcggccctggcacctccaccgagcccagcgagggcagcgcacccggcagccctgccggcagccccacctccacagaggagggaaccagcaccgagcccagcgaaggcagcgccccaggcaccagcaccgagcctagtgagcaggagattaaacggatcaacaagatcagaagaagacttgtgaaagacagcaacaccaagaaggccggcaagacaggccccatgaaaaccctgctggttagagtgatgacacccgatctgagagagcggctggaaaacctgagaaagaagcctgaaaatatcccccagcccatcagcaatacatctagagccaacctgaataagctgctgaccgattacaccgaaatgaagaaggcgatcctgcatgtgtactgggaagagttccagaaggaccctgtgggcctgatgagccgggtggcccagcctgccagcaagaagatcgatcagaacaagctgaaacctgagatggacgagaagggcaacctgaccaccgccggctttgcctgctctcagtgtggccagcccctgttcgtgtacaagctggagcaggtgtctgagaagggcaaggcttacaccaactacttcggacggtgcaatgtggccgagcacgaaaagctgatcctgctggcccagctgaagcccgagaaggatagcgacgaagccgtgacatatagcctgggaaagtttgggcagagggccctggatttctacagcattcatgtgaccaaggagtccacccaccccgtgaagcccctggcccagatcgccggaaacagatacgcctccggacctgtgggaaaggccctgagcgacgcatgtatgggcacaatcgcctccttcctgtctaagtaccaggacatcatcatcgaacaccagaaggtggtgaagggcaaccagaagagactggagagcctgcgggagctggccggcaaggaaaacctggaataccctagcgtgaccctgccacctcagcctcacaccaaggagggcgttgatgcctacaacgaagtgatcgcccgggtgcgaatgtgggtgaacctgaacctgtggcagaagctgaagctaagcagagatgatgccaagcctctgctgagactgaagggattcccttcctttcctctggtcgagagacaggccaacgaagtggactggtgggacatggtgtgtaacgtgaagaagctgatcaacgagaaaaaggaggatggcaaggtgttttggcagaatctggctggctacaagagacaggaagccctgagaccatacctgagcagcgaggaagatcggaagaagggaaagaaattcgctcggtaccagctgggcgacctgctgctgcacctggaaaagaagcacggcgaggactggggaaaggtgtacgacgaggcctgggagcggattgacaagaaagtggaaggcctgagcaagcacatcaagctggaagaggaacggagaagcgaggacgcccagagcaaggccgccctgaccgactggctgcgggctaaggccagcttcgtgatcgagggcctgaaggaggccgacaaggacgagttctgcagatgcgagctgaagctgcagaagtggtacggggacctgcggggaaagcccttcgccatcgaagccgagaacagcatcctggacatcagcggcttcagcaagcagtacaactgtgccttcatctggcagaaggacggcgtgaagaagctgaacctgtacctgatcatcaactacttcaagggcggcaagctgcggttcaagaagatcaaacctgaagccttcgaagccaacagattctacaccgtgatcaacaaaaagagcggcgagatcgtgcccatggaggtgaacttcaacttcgacgaccccaacctgatcatcctgcctctggcctttggcaagagacagggcagagaattcatctggaacgacctgctgtccctggaaaccggcagcctgaagctggccaacggaagagtgatcgagaagacactgtacaacagaagaacccggcaggatgagcctgccctgttcgtggccctgaccttcgagcggcgggaggtcctggactcctccaatatcaaaccaatgaacctgatcggcgtggcaagaggcgaaaacatccccgccgtgatcgccctgaccgaccccgagggctgcccactgagccggtttaaggatagcctgggaaacccaacccacatcctgagaatcggcgagagctataaggagaagcagcggaccatccaggccaagaaggaggtggagcagcggagagccggcggctacagccggaagtacgccagcaaagccaagaatctggcagacgatatggtgagaaacaccgctagagatctgctgtactacgccgtgacccaggatgccatgctgatcttcgccaacctgagccggggcttcggccggcagggcaagcggaccttcatggccgagagacagtacacacggatggaggactggctgaccgccaagctggcctacgagggcctgagcaagacctacctgtccaagacactggcccagtacacctccaagacatgcagcaactgtgggtttaccatcaccagcgccgactacgacagggtgctggagaagctgaagaagacagcaacaggctggatgaccacaattaacggcaaggagctgaaggtggagggccagattacctactacaacagatacaagagacagaacgtagtcaaggacctgtccgtcgagctggatagactgagcgaagaatctgtgaacaacgacatctcctcctggacaaagggcagaagcggagaagctctgagcctcctgaagaaaagattctcccatagacccgtgcaggagaagttcgtgtgcctgaactgcggcttcgagacacacgcagccgagcaagccgccctgaacatcgccagatcctggctgttcctgcggagccaggagtacaagaaataccagacaaacaagacaaccggcaacaccgataagagagccttcgtcgagacctggcagtccttttaccggaagaagcttaaggaggtgtggaaacctgccgtgcggtctggcggatctggcggaggctccaccagccccaagaaaaagagaaaagtctaagctgccttctgcggggcttgccttctggccatgcccttcttctctcccttgcacctgtacctcttggtctttgaataaagcctgagtaggaaggctagcaaaaaaaaaaaaaaaaaaaaaaaaaaaaaaaaaaaaaaaaaaaaaaaaaaaaaaaaaaaaaaaaaaaaaaaaaaaaaaaa

SEQ ID NO: 13173 - RNA, 5785 nt, synthetic construct
  source 1..5785: mol_type = other RNA
aggaaataagagagaaaagaagagtaagaagaaatataagagccaccatggcccctaagaagaagcgtaaagtgagccggatggaacgcctcgtctacgaggtgcggcagaagtgcagaaacatcgaggacatctgcatctcctgcggatctctgaacgtgaccctggagcacccactgttcatcggcggcatgtgccagaactgtaaaaactgttttctggagtgtgcctatcaatacgacgatgacggctaccagagctactgcaccatctgttgcggcggaagagaggtgctgatgtgtggaaataacaactgctgccggtgcttctgcgtggaatgcgtggacctgctggtgggccccggcgccgcccaggccgctattaaggaagatccttggaactgctacatgtgcggccacaagggcacatacggcctgctgagacggagagaggactggcctagcagactgcagatgttcttcgccaataaccacgaccaggagttcgacccccctaaggtgtaccctcccgtccccgccgagaagagaaagcccatccgggtcctgagcctgttcgatggcatcgccaccggtctgctggtgctgaaggacctgggcatccaggtggataggtacattgcctccgaggtgtgcgaggactccatcaccgtgggaatggtgcgtcatcagggcaagatcatgtacgtgggcgacgtgcggagcgtgacacagaagcatatccaggagtggggccctttcgacctggtgatcggcggcagcccttgcaatgacctgagcatcgtgaacccagcccggaagggcctgtacgagggaaccggcagactgttcttcgagttttacagactgctgcacgacgcccggcctaaggaaggcgacgaccggcccttcttttggctgttcgagaatgtggtggccatgggagtcagcgacaagcgggatattagccggttcctggagagcaaccccgtgatgatcgatgccaaggaagtgagcgccgcccaccgggccagatacttctggggcaatctgcctggcatgaacagacccctggccagcaccgtgaacgacaagctggagctgcaggagtgcctggagcacggccggatcgccaagttcagcaaggtgagaaccatcaccacccgaagcaacagcatcaaacaaggcaaggaccagcactttcctgtgttcatgaacgagaaggaggacatcctgtggtgtaccgagatggagagagtgttcgggttcccagtccactacacagatgtcagcaacatgtctagactggccagacagagactgctgggaagaagctggtccgtccctgtgatcagacacctgttcgcccctctgaaggagtacttcgcctgcgtgagcagcggcaacagcaacgccaacagccggggccccagcttctctagcggcctggtgccactgtccctgagagggagccacatgggccccatggagatctacaaaaccgtgagcgcctggaagcggcagcctgtgcgcgtgctgagcctgtttcggaatatcgataaagtcctgaaaagcctgggattcctggagagcggctctggctccggcggtggcaccctgaagtacgtggaggatgtgacaaacgtggtcagacgggatgtggagaagtggggccccttcgatctggtgtacggcagcacccaacccctgggcagctcttgtgaccggtgccctggctggtacatgtttcagttccaccggatcctgcagtacgccctgccgagacaggagtcccagcggccattcttttggattttcatggacaacttgctgctgaccgaggatgaccaggaaactaccactcggttcctgcagaccgaagccgtgaccctgcaggacgtgagaggccgggactaccagaacgccatgcgggtgtggtccaacatccctggactgaaaagcaagcacgcacctctgacccctaaagaagaggagtacctgcaggcccaggtgcggagcagaagcaagctggacgcccctaaggtggatctgctggtgaagaattgcctcctgcccctgagagagtacttcaagtatttcagccagaatagtctgcccctgggaggcagcggcggcggctaccagacccccgtgagcttcaaggacgtggtggtgggcttcacccaggaggagtggcacaggctgagccccgcccagagggccctgtacagggacgtgatgctggagacctacagcaacctggtgagcgtgggctacgagggcaccaagcccgacgtgatcctgaggctggagcaggaggaggccccctggatcggcggcgccgccaggcccggctgccactgctgggaggacatctggcagggcggcccaagcagcggcgcccctcctcccagcggcggcagcccagccggctccccaacctctaccgaggagggcacctctgagtccgccacccccgagagcggccctggcacctccaccgagcccagcgagggcagcgcacccggcagccctgccggcagccccacctccacagaggagggaaccagcaccgagcccagcgaaggcagcgccccaggcaccagcaccgagcctagtgagcaggagattaaacggatcaacaagatcagaagaagacttgtgaaagacagcaacaccaagaaggccggcaagacaggccccatgaaaaccctgctggttagagtgatgacacccgatctgagagagcggctggaaaacctgagaaagaagcctgaaaatatcccccagcccatcagcaatacatctagagccaacctgaataagctgctgaccgattacaccgaaatgaagaaggcgatcctgcatgtgtactgggaagagttccagaaggaccctgtgggcctgatgagccgggtggcccagcctgccagcaagaagatcgatcagaacaagctgaaacctgagatggacgagaagggcaacctgaccaccgccggctttgcctgctctcagtgtggccagcccctgttcgtgtacaagctggagcaggtgtctgagaagggcaaggcttacaccaactacttcggacggtgcaatgtggccgagcacgaaaagctgatcctgctggcccagctgaagcccgagaaggatagcgacgaagccgtgacatatagcctgggaaagtttgggcagagggccctggatttctacagcattcatgtgaccaaggagtccacccaccccgtgaagcccctggcccagatcgccggaaacagatacgcctccggacctgtgggaaaggccctgagcgacgcatgtatgggcacaatcgcctccttcctgtctaagtaccaggacatcatcatcgaacaccagaaggtggtgaagggcaaccagaagagactggagagcctgcgggagctggccggcaaggaaaacctggaataccctagcgtgaccctgccacctcagcctcacaccaaggagggcgttgatgcctacaacgaagtgatcgcccgggtgcgaatgtgggtgaacctgaacctgtggcagaagctgaagctaagcagagatgatgccaagcctctgctgagactgaagggattcccttcctttcctctggtcgagagacaggccaacgaagtggactggtgggacatggtgtgtaacgtgaagaagctgatcaacgagaaaaaggaggatggcaaggtgttttggcagaatctggctggctacaagagacaggaagccctgagaccatacctgagcagcgaggaagatcggaagaagggaaagaaattcgctcggtaccagctgggcgacctgctgctgcacctggaaaagaagcacggcgaggactggggaaaggtgtacgacgaggcctgggagcggattgacaagaaagtggaaggcctgagcaagcacatcaagctggaagaggaacggagaagcgaggacgcccagagcaaggccgccctgaccgactggctgcgggctaaggccagcttcgtgatcgagggcctgaaggaggccgacaaggacgagttctgcagatgcgagctgaagctgcagaagtggtacggggacctgcggggaaagcccttcgccatcgaagccgagaacagcatcctggacatcagcggcttcagcaagcagtacaactgtgccttcatctggcagaaggacggcgtgaagaagctgaacctgtacctgatcatcaactacttcaagggcggcaagctgcggttcaagaagatcaaacctgaagccttcgaagccaacagattctacaccgtgatcaacaaaaagagcggcgagatcgtgcccatggaggtgaacttcaacttcgacgaccccaacctgatcatcctgcctctggcctttggcaagagacagggcagagaattcatctggaacgacctgctgtccctggaaaccggcagcctgaagctggccaacggaagagtgatcgagaagacactgtacaacagaagaacccggcaggatgagcctgccctgttcgtggccctgaccttcgagcggcgggaggtcctggactcctccaatatcaaaccaatgaacctgatcggcgtggcaagaggcgaaaacatccccgccgtgatcgccctgaccgaccccgagggctgcccactgagccggtttaaggatagcctgggaaacccaacccacatcctgagaatcggcgagagctataaggagaagcagcggaccatccaggccaagaaggaggtggagcagcggagagccggcggctacagccggaagtacgccagcaaagccaagaatctggcagacgatatggtgagaaacaccgctagagatctgctgtactacgccgtgacccaggatgccatgctgatcttcgccaacctgagccggggcttcggccggcagggcaagcggaccttcatggccgagagacagtacacacggatggaggactggctgaccgccaagctggcctacgagggcctgagcaagacctacctgtccaagacactggcccagtacacctccaagacatgcagcaactgtgggtttaccatcaccagcgccgactacgacagggtgctggagaagctgaagaagacagcaacaggctggatgaccacaattaacggcaaggagctgaaggtggagggccagattacctactacaacagatacaagagacagaacgtagtcaaggacctgtccgtcgagctggatagactgagcgaagaatctgtgaacaacgacatctcctcctggacaaagggcagaagcggagaagctctgagcctcctgaagaaaagattctcccatagacccgtgcaggagaagttcgtgtgcctgaactgcggcttcgagacacacgcagccgagcaagccgccctgaacatcgccagatcctggctgttcctgcggagccaggagtacaagaaataccagacaaacaagacaaccggcaacaccgataagagagccttcgtcgagacctggcagtccttttaccggaagaagcttaaggaggtgtggaaacctgccgtgcggtctggcggatctggcggaggctccaccagccccaagaaaaagagaaaagtctaagctgccttctgcggggcttgccttctggccatgcccttcttctctcccttgcacctgtacctcttggtctttgaataaagcctgagtaggaaggctagcaaaaaaaaaaaaaaaaaaaaaaaaaaaaaaaaaaaaaaaaaaaaaaaaaaaaaaaaaaaaaaaaaaaaaaaaaaaaaaaa

SEQ ID NO: 13174 - RNA, 5785 nt, synthetic construct
  source 1..5785: mol_type = other RNA
aggaaataagagagaaaagaagagtaagaagaaatataagagccaccatggcccctaagaagaagcgtaaagtgagccggatggaacgcctcgtctacgaggtgcggcagaagtgcagaaacatcgaggacatctgcatctcctgcggatctctgaacgtgaccctggagcacccactgttcatcggcggcatgtgccagaactgtaaaaactgttttctggagtgtgcctatcaatacgacgatgacggctaccagagctactgcaccatctgttgcggcggaagagaggtgctgatgtgtggaaataacaactgctgccggtgcttctgcgtggaatgcgtggacctgctggtgggccccggcgccgcccaggccgctattaaggaagatccttggaactgctacatgtgcggccacaagggcacatacggcctgctgagacggagagaggactggcctagcagactgcagatgttcttcgccaataaccacgaccaggagttcgacccccctaaggtgtaccctcccgtccccgccgagaagagaaagcccatccgggtcctgagcctgttcgatggcatcgccaccggtctgctggtgctgaaggacctgggcatccaggtggataggtacattgcctccgaggtgtgcgaggactccatcaccgtgggaatggtgcgtcatcagggcaagatcatgtacgtgggcgacgtgcggagcgtgacacagaagcatatccaggagtggggccctttcgacctggtgatcggcggcagcccttgcaatgacctgagcatcgtgaacccagcccggaagggcctgtacgagggaaccggcagactgttcttcgagttttacagactgctgcacgacgcccggcctaaggaaggcgacgaccggcccttcttttggctgttcgagaatgtggtggccatgggagtcagcgacaagcgggatattagccggttcctggagagcaaccccgtgatgatcgatgccaaggaagtgagcgccgcccaccgggccagatacttctggggcaatctgcctggcatgaacagacccctggccagcaccgtgaacgacaagctggagctgcaggagtgcctggagcacggccggatcgccaagttcagcaaggtgagaaccatcaccacccgaagcaacagcatcaaacaaggcaaggaccagcactttcctgtgttcatgaacgagaaggaggacatcctgtggtgtaccgagatggagagagtgttcgggttcccagtccactacacagatgtcagcaacatgtctagactggccagacagagactgctgggaagaagctggtccgtccctgtgatcagacacctgttcgcccctctgaaggagtacttcgcctgcgtgagcagcggcaacagcaacgccaacagccggggccccagcttctctagcggcctggtgccactgtccctgagagggagccacatgggccccatggagatctacaaaaccgtgagcgcctggaagcggcagcctgtgcgcgtgctgagcctgtttcggaatatcgataaagtcctgaaaagcctgggattcctggagagcggctctggctccggcggtggcaccctgaagtacgtggaggatgtgacaaacgtggtcagacgggatgtggagaagtggggccccttcgatctggtgtacggcagcacccaacccctgggcagctcttgtgaccggtgccctggctggtacatgtttcagttccaccggatcctgcagtacgccctgccgagacaggagtcccagcggccattcttttggattttcatggacaacttgctgctgaccgaggatgaccaggaaactaccactcggttcctgcagaccgaagccgtgaccctgcaggacgtgagaggccgggactaccagaacgccatgcgggtgtggtccaacatccctggactgaaaagcaagcacgcacctctgacccctaaagaagaggagtacctgcaggcccaggtgcggagcagaagcaagctggacgcccctaaggtggatctgctggtgaagaattgcctcctgcccctgagagagtacttcaagtatttcagccagaatagtctgcccctgggaggcagcggcggcggcatccagggcagcctgaccttcaaggacgtggccatgaacttcacccaggaggagtggtgcctgctggaccacagccagaaggagctgtacctggaggtgatgctggagaacgtgcagaacctgctgagcgtgggcctgcccgtgcccagggagtactacaccagctacttccagcaggagaaggccccctggctgctggtgcagaagggccccaggaacagcagccccgaggccgagaccaacggcggcccaagcagcggcgcccctcctcccagcggcggcagcccagccggctccccaacctctaccgaggagggcacctctgagtccgccacccccgagagcggccctggcacctccaccgagcccagcgagggcagcgcacccggcagccctgccggcagccccacctccacagaggagggaaccagcaccgagcccagcgaaggcagcgccccaggcaccagcaccgagcctagtgagcaggagattaaacggatcaacaagatcagaagaagacttgtgaaagacagcaacaccaagaaggccggcaagacaggccccatgaaaaccctgctggttagagtgatgacacccgatctgagagagcggctggaaaacctgagaaagaagcctgaaaatatcccccagcccatcagcaatacatctagagccaacctgaataagctgctgaccgattacaccgaaatgaagaaggcgatcctgcatgtgtactgggaagagttccagaaggaccctgtgggcctgatgagccgggtggcccagcctgccagcaagaagatcgatcagaacaagctgaaacctgagatggacgagaagggcaacctgaccaccgccggctttgcctgctctcagtgtggccagcccctgttcgtgtacaagctggagcaggtgtctgagaagggcaaggcttacaccaactacttcggacggtgcaatgtggccgagcacgaaaagctgatcctgctggcccagctgaagcccgagaaggatagcgacgaagccgtgacatatagcctgggaaagtttgggcagagggccctggatttctacagcattcatgtgaccaaggagtccacccaccccgtgaagcccctggcccagatcgccggaaacagatacgcctccggacctgtgggaaaggccctgagcgacgcatgtatgggcacaatcgcctccttcctgtctaagtaccaggacatcatcatcgaacaccagaaggtggtgaagggcaaccagaagagactggagagcctgcgggagctggccggcaaggaaaacctggaataccctagcgtgaccctgccacctcagcctcacaccaaggagggcgttgatgcctacaacgaagtgatcgcccgggtgcgaatgtgggtgaacctgaacctgtggcagaagctgaagctaagcagagatgatgccaagcctctgctgagactgaagggattcccttcctttcctctggtcgagagacaggccaacgaagtggactggtgggacatggtgtgtaacgtgaagaagctgatcaacgagaaaaaggaggatggcaaggtgttttggcagaatctggctggctacaagagacaggaagccctgagaccatacctgagcagcgaggaagatcggaagaagggaaagaaattcgctcggtaccagctgggcgacctgctgctgcacctggaaaagaagcacggcgaggactggggaaaggtgtacgacgaggcctgggagcggattgacaagaaagtggaaggcctgagcaagcacatcaagctggaagaggaacggagaagcgaggacgcccagagcaaggccgccctgaccgactggctgcgggctaaggccagcttcgtgatcgagggcctgaaggaggccgacaaggacgagttctgcagatgcgagctgaagctgcagaagtggtacggggacctgcggggaaagcccttcgccatcgaagccgagaacagcatcctggacatcagcggcttcagcaagcagtacaactgtgccttcatctggcagaaggacggcgtgaagaagctgaacctgtacctgatcatcaactacttcaagggcggcaagctgcggttcaagaagatcaaacctgaagccttcgaagccaacagattctacaccgtgatcaacaaaaagagcggcgagatcgtgcccatggaggtgaacttcaacttcgacgaccccaacctgatcatcctgcctctggcctttggcaagagacagggcagagaattcatctggaacgacctgctgtccctggaaaccggcagcctgaagctggccaacggaagagtgatcgagaagacactgtacaacagaagaacccggcaggatgagcctgccctgttcgtggccctgaccttcgagcggcgggaggtcctggactcctccaatatcaaaccaatgaacctgatcggcgtggcaagaggcgaaaacatccccgccgtgatcgccctgaccgaccccgagggctgcccactgagccggtttaaggatagcctgggaaacccaacccacatcctgagaatcggcgagagctataaggagaagcagcggaccatccaggccaagaaggaggtggagcagcggagagccggcggctacagccggaagtacgccagcaaagccaagaatctggcagacgatatggtgagaaacaccgctagagatctgctgtactacgccgtgacccaggatgccatgctgatcttcgccaacctgagccggggcttcggccggcagggcaagcggaccttcatggccgagagacagtacacacggatggaggactggctgaccgccaagctggcctacgagggcctgagcaagacctacctgtccaagacactggcccagtacacctccaagacatgcagcaactgtgggtttaccatcaccagcgccgactacgacagggtgctggagaagctgaagaagacagcaacaggctggatgaccacaattaacggcaaggagctgaaggtggagggccagattacctactacaacagatacaagagacagaacgtagtcaaggacctgtccgtcgagctggatagactgagcgaagaatctgtgaacaacgacatctcctcctggacaaagggcagaagcggagaagctctgagcctcctgaagaaaagattctcccatagacccgtgcaggagaagttcgtgtgcctgaactgcggcttcgagacacacgcagccgagcaagccgccctgaacatcgccagatcctggctgttcctgcggagccaggagtacaagaaataccagacaaacaagacaaccggcaacaccgataagagagccttcgtcgagacctggcagtccttttaccggaagaagcttaaggaggtgtggaaacctgccgtgcggtctggcggatctggcggaggctccaccagccccaagaaaaagagaaaagtctaagctgccttctgcggggcttgccttctggccatgcccttcttctctcccttgcacctgtacctcttggtctttgaataaagcctgagtaggaaggctagcaaaaaaaaaaaaaaaaaaaaaaaaaaaaaaaaaaaaaaaaaaaaaaaaaaaaaaaaaaaaaaaaaaaaaaaaaaaaaaaa

SEQ ID NO: 13175 - RNA, 5785 nt, synthetic construct
  source 1..5785: mol_type = other RNA
aggaaataagagagaaaagaagagtaagaagaaatataagagccaccatggcccctaagaagaagcgtaaagtgagccggatggaacgcctcgtctacgaggtgcggcagaagtgcagaaacatcgaggacatctgcatctcctgcggatctctgaacgtgaccctggagcacccactgttcatcggcggcatgtgccagaactgtaaaaactgttttctggagtgtgcctatcaatacgacgatgacggctaccagagctactgcaccatctgttgcggcggaagagaggtgctgatgtgtggaaataacaactgctgccggtgcttctgcgtggaatgcgtggacctgctggtgggccccggcgccgcccaggccgctattaaggaagatccttggaactgctacatgtgcggccacaagggcacatacggcctgctgagacggagagaggactggcctagcagactgcagatgttcttcgccaataaccacgaccaggagttcgacccccctaaggtgtaccctcccgtccccgccgagaagagaaagcccatccgggtcctgagcctgttcgatggcatcgccaccggtctgctggtgctgaaggacctgggcatccaggtggataggtacattgcctccgaggtgtgcgaggactccatcaccgtgggaatggtgcgtcatcagggcaagatcatgtacgtgggcgacgtgcggagcgtgacacagaagcatatccaggagtggggccctttcgacctggtgatcggcggcagcccttgcaatgacctgagcatcgtgaacccagcccggaagggcctgtacgagggaaccggcagactgttcttcgagttttacagactgctgcacgacgcccggcctaaggaaggcgacgaccggcccttcttttggctgttcgagaatgtggtggccatgggagtcagcgacaagcgggatattagccggttcctggagagcaaccccgtgatgatcgatgccaaggaagtgagcgccgcccaccgggccagatacttctggggcaatctgcctggcatgaacagacccctggccagcaccgtgaacgacaagctggagctgcaggagtgcctggagcacggccggatcgccaagttcagcaaggtgagaaccatcaccacccgaagcaacagcatcaaacaaggcaaggaccagcactttcctgtgttcatgaacgagaaggaggacatcctgtggtgtaccgagatggagagagtgttcgggttcccagtccactacacagatgtcagcaacatgtctagactggccagacagagactgctgggaagaagctggtccgtccctgtgatcagacacctgttcgcccctctgaaggagtacttcgcctgcgtgagcagcggcaacagcaacgccaacagccggggccccagcttctctagcggcctggtgccactgtccctgagagggagccacatgggccccatggagatctacaaaaccgtgagcgcctggaagcggcagcctgtgcgcgtgctgagcctgtttcggaatatcgataaagtcctgaaaagcctgggattcctggagagcggctctggctccggcggtggcaccctgaagtacgtggaggatgtgacaaacgtggtcagacgggatgtggagaagtggggccccttcgatctggtgtacggcagcacccaacccctgggcagctcttgtgaccggtgccctggctggtacatgtttcagttccaccggatcctgcagtacgccctgccgagacaggagtcccagcggccattcttttggattttcatggacaacttgctgctgaccgaggatgaccaggaaactaccactcggttcctgcagaccgaagccgtgaccctgcaggacgtgagaggccgggactaccagaacgccatgcgggtgtggtccaacatccctggactgaaaagcaagcacgcacctctgacccctaaagaagaggagtacctgcaggcccaggtgcggagcagaagcaagctggacgcccctaaggtggatctgctggtgaagaattgcctcctgcccctgagagagtacttcaagtatttcagccagaatagtctgcccctgggaggcagcggcggcggcatgagcgtgaccttcgaggacgtggccatgtacttcagccccgccgagtgggtgctgctgggcgaggagcagaagcagctgtacaggcacgtgatgtgggagaactaccagaccctggtgagcctgggcatccagatcagcaagcccgtggtgatcagcagcatcgagaggggcgaggagctgtgggcccagagccccaccgaggacgaggacgaggacatcctgagcggcaccagccccggcggcggcccaagcagcggcgcccctcctcccagcggcggcagcccagccggctccccaacctctaccgaggagggcacctctgagtccgccacccccgagagcggccctggcacctccaccgagcccagcgagggcagcgcacccggcagccctgccggcagccccacctccacagaggagggaaccagcaccgagcccagcgaaggcagcgccccaggcaccagcaccgagcctagtgagcaggagattaaacggatcaacaagatcagaagaagacttgtgaaagacagcaacaccaagaaggccggcaagacaggccccatgaaaaccctgctggttagagtgatgacacccgatctgagagagcggctggaaaacctgagaaagaagcctgaaaatatcccccagcccatcagcaatacatctagagccaacctgaataagctgctgaccgattacaccgaaatgaagaaggcgatcctgcatgtgtactgggaagagttccagaaggaccctgtgggcctgatgagccgggtggcccagcctgccagcaagaagatcgatcagaacaagctgaaacctgagatggacgagaagggcaacctgaccaccgccggctttgcctgctctcagtgtggccagcccctgttcgtgtacaagctggagcaggtgtctgagaagggcaaggcttacaccaactacttcggacggtgcaatgtggccgagcacgaaaagctgatcctgctggcccagctgaagcccgagaaggatagcgacgaagccgtgacatatagcctgggaaagtttgggcagagggccctggatttctacagcattcatgtgaccaaggagtccacccaccccgtgaagcccctggcccagatcgccggaaacagatacgcctccggacctgtgggaaaggccctgagcgacgcatgtatgggcacaatcgcctccttcctgtctaagtaccaggacatcatcatcgaacaccagaaggtggtgaagggcaaccagaagagactggagagcctgcgggagctggccggcaaggaaaacctggaataccctagcgtgaccctgccacctcagcctcacaccaaggagggcgttgatgcctacaacgaagtgatcgcccgggtgcgaatgtgggtgaacctgaacctgtggcagaagctgaagctaagcagagatgatgccaagcctctgctgagactgaagggattcccttcctttcctctggtcgagagacaggccaacgaagtggactggtgggacatggtgtgtaacgtgaagaagctgatcaacgagaaaaaggaggatggcaaggtgttttggcagaatctggctggctacaagagacaggaagccctgagaccatacctgagcagcgaggaagatcggaagaagggaaagaaattcgctcggtaccagctgggcgacctgctgctgcacctggaaaagaagcacggcgaggactggggaaaggtgtacgacgaggcctgggagcggattgacaagaaagtggaaggcctgagcaagcacatcaagctggaagaggaacggagaagcgaggacgcccagagcaaggccgccctgaccgactggctgcgggctaaggccagcttcgtgatcgagggcctgaaggaggccgacaaggacgagttctgcagatgcgagctgaagctgcagaagtggtacggggacctgcggggaaagcccttcgccatcgaagccgagaacagcatcctggacatcagcggcttcagcaagcagtacaactgtgccttcatctggcagaaggacggcgtgaagaagctgaacctgtacctgatcatcaactacttcaagggcggcaagctgcggttcaagaagatcaaacctgaagccttcgaagccaacagattctacaccgtgatcaacaaaaagagcggcgagatcgtgcccatggaggtgaacttcaacttcgacgaccccaacctgatcatcctgcctctggcctttggcaagagacagggcagagaattcatctggaacgacctgctgtccctggaaaccggcagcctgaagctggccaacggaagagtgatcgagaagacactgtacaacagaagaacccggcaggatgagcctgccctgttcgtggccctgaccttcgagcggcgggaggtcctggactcctccaatatcaaaccaatgaacctgatcggcgtggcaagaggcgaaaacatccccgccgtgatcgccctgaccgaccccgagggctgcccactgagccggtttaaggatagcctgggaaacccaacccacatcctgagaatcggcgagagctataaggagaagcagcggaccatccaggccaagaaggaggtggagcagcggagagccggcggctacagccggaagtacgccagcaaagccaagaatctggcagacgatatggtgagaaacaccgctagagatctgctgtactacgccgtgacccaggatgccatgctgatcttcgccaacctgagccggggcttcggccggcagggcaagcggaccttcatggccgagagacagtacacacggatggaggactggctgaccgccaagctggcctacgagggcctgagcaagacctacctgtccaagacactggcccagtacacctccaagacatgcagcaactgtgggtttaccatcaccagcgccgactacgacagggtgctggagaagctgaagaagacagcaacaggctggatgaccacaattaacggcaaggagctgaaggtggagggccagattacctactacaacagatacaagagacagaacgtagtcaaggacctgtccgtcgagctggatagactgagcgaagaatctgtgaacaacgacatctcctcctggacaaagggcagaagcggagaagctctgagcctcctgaagaaaagattctcccatagacccgtgcaggagaagttcgtgtgcctgaactgcggcttcgagacacacgcagccgagcaagccgccctgaacatcgccagatcctggctgttcctgcggagccaggagtacaagaaataccagacaaacaagacaaccggcaacaccgataagagagccttcgtcgagacctggcagtccttttaccggaagaagcttaaggaggtgtggaaacctgccgtgcggtctggcggatctggcggaggctccaccagccccaagaaaaagagaaaagtctaagctgccttctgcggggcttgccttctggccatgcccttcttctctcccttgcacctgtacctcttggtctttgaataaagcctgagtaggaaggctagcaaaaaaaaaaaaaaaaaaaaaaaaaaaaaaaaaaaaaaaaaaaaaaaaaaaaaaaaaaaaaaaaaaaaaaaaaaaaaaaa

SEQ ID NO: 13176 - RNA, 5785 nt, synthetic construct
  source 1..5785: mol_type = other RNA
aggaaataagagagaaaagaagagtaagaagaaatataagagccaccatggcccctaagaagaagcgtaaagtgagccggatggaacgcctcgtctacgaggtgcggcagaagtgcagaaacatcgaggacatctgcatctcctgcggatctctgaacgtgaccctggagcacccactgttcatcggcggcatgtgccagaactgtaaaaactgttttctggagtgtgcctatcaatacgacgatgacggctaccagagctactgcaccatctgttgcggcggaagagaggtgctgatgtgtggaaataacaactgctgccggtgcttctgcgtggaatgcgtggacctgctggtgggccccggcgccgcccaggccgctattaaggaagatccttggaactgctacatgtgcggccacaagggcacatacggcctgctgagacggagagaggactggcctagcagactgcagatgttcttcgccaataaccacgaccaggagttcgacccccctaaggtgtaccctcccgtccccgccgagaagagaaagcccatccgggtcctgagcctgttcgatggcatcgccaccggtctgctggtgctgaaggacctgggcatccaggtggataggtacattgcctccgaggtgtgcgaggactccatcaccgtgggaatggtgcgtcatcagggcaagatcatgtacgtgggcgacgtgcggagcgtgacacagaagcatatccaggagtggggccctttcgacctggtgatcggcggcagcccttgcaatgacctgagcatcgtgaacccagcccggaagggcctgtacgagggaaccggcagactgttcttcgagttttacagactgctgcacgacgcccggcctaaggaaggcgacgaccggcccttcttttggctgttcgagaatgtggtggccatgggagtcagcgacaagcgggatattagccggttcctggagagcaaccccgtgatgatcgatgccaaggaagtgagcgccgcccaccgggccagatacttctggggcaatctgcctggcatgaacagacccctggccagcaccgtgaacgacaagctggagctgcaggagtgcctggagcacggccggatcgccaagttcagcaaggtgagaaccatcaccacccgaagcaacagcatcaaacaaggcaaggaccagcactttcctgtgttcatgaacgagaaggaggacatcctgtggtgtaccgagatggagagagtgttcgggttcccagtccactacacagatgtcagcaacatgtctagactggccagacagagactgctgggaagaagctggtccgtccctgtgatcagacacctgttcgcccctctgaaggagtacttcgcctgcgtgagcagcggcaacagcaacgccaacagccggggccccagcttctctagcggcctggtgccactgtccctgagagggagccacatgggccccatggagatctacaaaaccgtgagcgcctggaagcggcagcctgtgcgcgtgctgagcctgtttcggaatatcgataaagtcctgaaaagcctgggattcctggagagcggctctggctccggcggtggcaccctgaagtacgtggaggatgtgacaaacgtggtcagacgggatgtggagaagtggggccccttcgatctggtgtacggcagcacccaacccctgggcagctcttgtgaccggtgccctggctggtacatgtttcagttccaccggatcctgcagtacgccctgccgagacaggagtcccagcggccattcttttggattttcatggacaacttgctgctgaccgaggatgaccaggaaactaccactcggttcctgcagaccgaagccgtgaccctgcaggacgtgagaggccgggactaccagaacgccatgcgggtgtggtccaacatccctggactgaaaagcaagcacgcacctctgacccctaaagaagaggagtacctgcaggcccaggtgcggagcagaagcaagctggacgcccctaaggtggatctgctggtgaagaattgcctcctgcccctgagagagtacttcaagtatttcagccagaatagtctgcccctgggaggcagcggcggcggcgagagcgtgaccttcgaggacgtggccgtgtacttcagcgagaacgagtggatcggcctgggccccgcccagagggccctgtacagggacgtgatgctggagaactacggcgccgtggccagcctggccttccccttccccaagcccgccctgatcagccagctggagaggggcgaggccccctggtgcagcgccccccagggcgccctggacggcgagagccccaggggcatcagcagcgagggcggcccaagcagcggcgcccctcctcccagcggcggcagcccagccggctccccaacctctaccgaggagggcacctctgagtccgccacccccgagagcggccctggcacctccaccgagcccagcgagggcagcgcacccggcagccctgccggcagccccacctccacagaggagggaaccagcaccgagcccagcgaaggcagcgccccaggcaccagcaccgagcctagtgagcaggagattaaacggatcaacaagatcagaagaagacttgtgaaagacagcaacaccaagaaggccggcaagacaggccccatgaaaaccctgctggttagagtgatgacacccgatctgagagagcggctggaaaacctgagaaagaagcctgaaaatatcccccagcccatcagcaatacatctagagccaacctgaataagctgctgaccgattacaccgaaatgaagaaggcgatcctgcatgtgtactgggaagagttccagaaggaccctgtgggcctgatgagccgggtggcccagcctgccagcaagaagatcgatcagaacaagctgaaacctgagatggacgagaagggcaacctgaccaccgccggctttgcctgctctcagtgtggccagcccctgttcgtgtacaagctggagcaggtgtctgagaagggcaaggcttacaccaactacttcggacggtgcaatgtggccgagcacgaaaagctgatcctgctggcccagctgaagcccgagaaggatagcgacgaagccgtgacatatagcctgggaaagtttgggcagagggccctggatttctacagcattcatgtgaccaaggagtccacccaccccgtgaagcccctggcccagatcgccggaaacagatacgcctccggacctgtgggaaaggccctgagcgacgcatgtatgggcacaatcgcctccttcctgtctaagtaccaggacatcatcatcgaacaccagaaggtggtgaagggcaaccagaagagactggagagcctgcgggagctggccggcaaggaaaacctggaataccctagcgtgaccctgccacctcagcctcacaccaaggagggcgttgatgcctacaacgaagtgatcgcccgggtgcgaatgtgggtgaacctgaacctgtggcagaagctgaagctaagcagagatgatgccaagcctctgctgagactgaagggattcccttcctttcctctggtcgagagacaggccaacgaagtggactggtgggacatggtgtgtaacgtgaagaagctgatcaacgagaaaaaggaggatggcaaggtgttttggcagaatctggctggctacaagagacaggaagccctgagaccatacctgagcagcgaggaagatcggaagaagggaaagaaattcgctcggtaccagctgggcgacctgctgctgcacctggaaaagaagcacggcgaggactggggaaaggtgtacgacgaggcctgggagcggattgacaagaaagtggaaggcctgagcaagcacatcaagctggaagaggaacggagaagcgaggacgcccagagcaaggccgccctgaccgactggctgcgggctaaggccagcttcgtgatcgagggcctgaaggaggccgacaaggacgagttctgcagatgcgagctgaagctgcagaagtggtacggggacctgcggggaaagcccttcgccatcgaagccgagaacagcatcctggacatcagcggcttcagcaagcagtacaactgtgccttcatctggcagaaggacggcgtgaagaagctgaacctgtacctgatcatcaactacttcaagggcggcaagctgcggttcaagaagatcaaacctgaagccttcgaagccaacagattctacaccgtgatcaacaaaaagagcggcgagatcgtgcccatggaggtgaacttcaacttcgacgaccccaacctgatcatcctgcctctggcctttggcaagagacagggcagagaattcatctggaacgacctgctgtccctggaaaccggcagcctgaagctggccaacggaagagtgatcgagaagacactgtacaacagaagaacccggcaggatgagcctgccctgttcgtggccctgaccttcgagcggcgggaggtcctggactcctccaatatcaaaccaatgaacctgatcggcgtggcaagaggcgaaaacatccccgccgtgatcgccctgaccgaccccgagggctgcccactgagccggtttaaggatagcctgggaaacccaacccacatcctgagaatcggcgagagctataaggagaagcagcggaccatccaggccaagaaggaggtggagcagcggagagccggcggctacagccggaagtacgccagcaaagccaagaatctggcagacgatatggtgagaaacaccgctagagatctgctgtactacgccgtgacccaggatgccatgctgatcttcgccaacctgagccggggcttcggccggcagggcaagcggaccttcatggccgagagacagtacacacggatggaggactggctgaccgccaagctggcctacgagggcctgagcaagacctacctgtccaagacactggcccagtacacctccaagacatgcagcaactgtgggtttaccatcaccagcgccgactacgacagggtgctggagaagctgaagaagacagcaacaggctggatgaccacaattaacggcaaggagctgaaggtggagggccagattacctactacaacagatacaagagacagaacgtagtcaaggacctgtccgtcgagctggatagactgagcgaagaatctgtgaacaacgacatctcctcctggacaaagggcagaagcggagaagctctgagcctcctgaagaaaagattctcccatagacccgtgcaggagaagttcgtgtgcctgaactgcggcttcgagacacacgcagccgagcaagccgccctgaacatcgccagatcctggctgttcctgcggagccaggagtacaagaaataccagacaaacaagacaaccggcaacaccgataagagagccttcgtcgagacctggcagtccttttaccggaagaagcttaaggaggtgtggaaacctgccgtgcggtctggcggatctggcggaggctccaccagccccaagaaaaagagaaaagtctaagctgccttctgcggggcttgccttctggccatgcccttcttctctcccttgcacctgtacctcttggtctttgaataaagcctgagtaggaaggctagcaaaaaaaaaaaaaaaaaaaaaaaaaaaaaaaaaaaaaaaaaaaaaaaaaaaaaaaaaaaaaaaaaaaaaaaaaaaaaaaa

SEQ ID NO: 13177 - RNA, 5785 nt, synthetic construct
  source 1..5785: mol_type = other RNA
aggaaataagagagaaaagaagagtaagaagaaatataagagccaccatggcccctaagaagaagcgtaaagtgagccggatggaacgcctcgtctacgaggtgcggcagaagtgcagaaacatcgaggacatctgcatctcctgcggatctctgaacgtgaccctggagcacccactgttcatcggcggcatgtgccagaactgtaaaaactgttttctggagtgtgcctatcaatacgacgatgacggctaccagagctactgcaccatctgttgcggcggaagagaggtgctgatgtgtggaaataacaactgctgccggtgcttctgcgtggaatgcgtggacctgctggtgggccccggcgccgcccaggccgctattaaggaagatccttggaactgctacatgtgcggccacaagggcacatacggcctgctgagacggagagaggactggcctagcagactgcagatgttcttcgccaataaccacgaccaggagttcgacccccctaaggtgtaccctcccgtccccgccgagaagagaaagcccatccgggtcctgagcctgttcgatggcatcgccaccggtctgctggtgctgaaggacctgggcatccaggtggataggtacattgcctccgaggtgtgcgaggactccatcaccgtgggaatggtgcgtcatcagggcaagatcatgtacgtgggcgacgtgcggagcgtgacacagaagcatatccaggagtggggccctttcgacctggtgatcggcggcagcccttgcaatgacctgagcatcgtgaacccagcccggaagggcctgtacgagggaaccggcagactgttcttcgagttttacagactgctgcacgacgcccggcctaaggaaggcgacgaccggcccttcttttggctgttcgagaatgtggtggccatgggagtcagcgacaagcgggatattagccggttcctggagagcaaccccgtgatgatcgatgccaaggaagtgagcgccgcccaccgggccagatacttctggggcaatctgcctggcatgaacagacccctggccagcaccgtgaacgacaagctggagctgcaggagtgcctggagcacggccggatcgccaagttcagcaaggtgagaaccatcaccacccgaagcaacagcatcaaacaaggcaaggaccagcactttcctgtgttcatgaacgagaaggaggacatcctgtggtgtaccgagatggagagagtgttcgggttcccagtccactacacagatgtcagcaacatgtctagactggccagacagagactgctgggaagaagctggtccgtccctgtgatcagacacctgttcgcccctctgaaggagtacttcgcctgcgtgagcagcggcaacagcaacgccaacagccggggccccagcttctctagcggcctggtgccactgtccctgagagggagccacatgggccccatggagatctacaaaaccgtgagcgcctggaagcggcagcctgtgcgcgtgctgagcctgtttcggaatatcgataaagtcctgaaaagcctgggattcctggagagcggctctggctccggcggtggcaccctgaagtacgtggaggatgtgacaaacgtggtcagacgggatgtggagaagtggggccccttcgatctggtgtacggcagcacccaacccctgggcagctcttgtgaccggtgccctggctggtacatgtttcagttccaccggatcctgcagtacgccctgccgagacaggagtcccagcggccattcttttggattttcatggacaacttgctgctgaccgaggatgaccaggaaactaccactcggttcctgcagaccgaagccgtgaccctgcaggacgtgagaggccgggactaccagaacgccatgcgggtgtggtccaacatccctggactgaaaagcaagcacgcacctctgacccctaaagaagaggagtacctgcaggcccaggtgcggagcagaagcaagctggacgcccctaaggtggatctgctggtgaagaattgcctcctgcccctgagagagtacttcaagtatttcagccagaatagtctgcccctgggaggcagcggcggcggcgcccaggagctggtgaccttccaggacgtggccgtggacttcacccaggaggagtggggcctgctggaccacccccagaaggagctgtacaaggaggtgatgctggagaacgccaggaacgccctgagcctgggcctgcccgtgcccagggagggcctgatcagccacttcggccagagggaggccccctggatgatggagctggaggaccccaggaccagctaccccgtgagccagaagctgggcggcccaagcagcggcgcccctcctcccagcggcggcagcccagccggctccccaacctctaccgaggagggcacctctgagtccgccacccccgagagcggccctggcacctccaccgagcccagcgagggcagcgcacccggcagccctgccggcagccccacctccacagaggagggaaccagcaccgagcccagcgaaggcagcgccccaggcaccagcaccgagcctagtgagcaggagattaaacggatcaacaagatcagaagaagacttgtgaaagacagcaacaccaagaaggccggcaagacaggccccatgaaaaccctgctggttagagtgatgacacccgatctgagagagcggctggaaaacctgagaaagaagcctgaaaatatcccccagcccatcagcaatacatctagagccaacctgaataagctgctgaccgattacaccgaaatgaagaaggcgatcctgcatgtgtactgggaagagttccagaaggaccctgtgggcctgatgagccgggtggcccagcctgccagcaagaagatcgatcagaacaagctgaaacctgagatggacgagaagggcaacctgaccaccgccggctttgcctgctctcagtgtggccagcccctgttcgtgtacaagctggagcaggtgtctgagaagggcaaggcttacaccaactacttcggacggtgcaatgtggccgagcacgaaaagctgatcctgctggcccagctgaagcccgagaaggatagcgacgaagccgtgacatatagcctgggaaagtttgggcagagggccctggatttctacagcattcatgtgaccaaggagtccacccaccccgtgaagcccctggcccagatcgccggaaacagatacgcctccggacctgtgggaaaggccctgagcgacgcatgtatgggcacaatcgcctccttcctgtctaagtaccaggacatcatcatcgaacaccagaaggtggtgaagggcaaccagaagagactggagagcctgcgggagctggccggcaaggaaaacctggaataccctagcgtgaccctgccacctcagcctcacaccaaggagggcgttgatgcctacaacgaagtgatcgcccgggtgcgaatgtgggtgaacctgaacctgtggcagaagctgaagctaagcagagatgatgccaagcctctgctgagactgaagggattcccttcctttcctctggtcgagagacaggccaacgaagtggactggtgggacatggtgtgtaacgtgaagaagctgatcaacgagaaaaaggaggatggcaaggtgttttggcagaatctggctggctacaagagacaggaagccctgagaccatacctgagcagcgaggaagatcggaagaagggaaagaaattcgctcggtaccagctgggcgacctgctgctgcacctggaaaagaagcacggcgaggactggggaaaggtgtacgacgaggcctgggagcggattgacaagaaagtggaaggcctgagcaagcacatcaagctggaagaggaacggagaagcgaggacgcccagagcaaggccgccctgaccgactggctgcgggctaaggccagcttcgtgatcgagggcctgaaggaggccgacaaggacgagttctgcagatgcgagctgaagctgcagaagtggtacggggacctgcggggaaagcccttcgccatcgaagccgagaacagcatcctggacatcagcggcttcagcaagcagtacaactgtgccttcatctggcagaaggacggcgtgaagaagctgaacctgtacctgatcatcaactacttcaagggcggcaagctgcggttcaagaagatcaaacctgaagccttcgaagccaacagattctacaccgtgatcaacaaaaagagcggcgagatcgtgcccatggaggtgaacttcaacttcgacgaccccaacctgatcatcctgcctctggcctttggcaagagacagggcagagaattcatctggaacgacctgctgtccctggaaaccggcagcctgaagctggccaacggaagagtgatcgagaagacactgtacaacagaagaacccggcaggatgagcctgccctgttcgtggccctgaccttcgagcggcgggaggtcctggactcctccaatatcaaaccaatgaacctgatcggcgtggcaagaggcgaaaacatccccgccgtgatcgccctgaccgaccccgagggctgcccactgagccggtttaaggatagcctgggaaacccaacccacatcctgagaatcggcgagagctataaggagaagcagcggaccatccaggccaagaaggaggtggagcagcggagagccggcggctacagccggaagtacgccagcaaagccaagaatctggcagacgatatggtgagaaacaccgctagagatctgctgtactacgccgtgacccaggatgccatgctgatcttcgccaacctgagccggggcttcggccggcagggcaagcggaccttcatggccgagagacagtacacacggatggaggactggctgaccgccaagctggcctacgagggcctgagcaagacctacctgtccaagacactggcccagtacacctccaagacatgcagcaactgtgggtttaccatcaccagcgccgactacgacagggtgctggagaagctgaagaagacagcaacaggctggatgaccacaattaacggcaaggagctgaaggtggagggccagattacctactacaacagatacaagagacagaacgtagtcaaggacctgtccgtcgagctggatagactgagcgaagaatctgtgaacaacgacatctcctcctggacaaagggcagaagcggagaagctctgagcctcctgaagaaaagattctcccatagacccgtgcaggagaagttcgtgtgcctgaactgcggcttcgagacacacgcagccgagcaagccgccctgaacatcgccagatcctggctgttcctgcggagccaggagtacaagaaataccagacaaacaagacaaccggcaacaccgataagagagccttcgtcgagacctggcagtccttttaccggaagaagcttaaggaggtgtggaaacctgccgtgcggtctggcggatctggcggaggctccaccagccccaagaaaaagagaaaagtctaagctgccttctgcggggcttgccttctggccatgcccttcttctctcccttgcacctgtacctcttggtctttgaataaagcctgagtaggaaggctagcaaaaaaaaaaaaaaaaaaaaaaaaaaaaaaaaaaaaaaaaaaaaaaaaaaaaaaaaaaaaaaaaaaaaaaaaaaaaaaaa

SEQ ID NO: 13178 - RNA, 5785 nt, synthetic construct
  source 1..5785: mol_type = other RNA
aggaaataagagagaaaagaagagtaagaagaaatataagagccaccatggcccctaagaagaagcgtaaagtgagccggatggaacgcctcgtctacgaggtgcggcagaagtgcagaaacatcgaggacatctgcatctcctgcggatctctgaacgtgaccctggagcacccactgttcatcggcggcatgtgccagaactgtaaaaactgttttctggagtgtgcctatcaatacgacgatgacggctaccagagctactgcaccatctgttgcggcggaagagaggtgctgatgtgtggaaataacaactgctgccggtgcttctgcgtggaatgcgtggacctgctggtgggccccggcgccgcccaggccgctattaaggaagatccttggaactgctacatgtgcggccacaagggcacatacggcctgctgagacggagagaggactggcctagcagactgcagatgttcttcgccaataaccacgaccaggagttcgacccccctaaggtgtaccctcccgtccccgccgagaagagaaagcccatccgggtcctgagcctgttcgatggcatcgccaccggtctgctggtgctgaaggacctgggcatccaggtggataggtacattgcctccgaggtgtgcgaggactccatcaccgtgggaatggtgcgtcatcagggcaagatcatgtacgtgggcgacgtgcggagcgtgacacagaagcatatccaggagtggggccctttcgacctggtgatcggcggcagcccttgcaatgacctgagcatcgtgaacccagcccggaagggcctgtacgagggaaccggcagactgttcttcgagttttacagactgctgcacgacgcccggcctaaggaaggcgacgaccggcccttcttttggctgttcgagaatgtggtggccatgggagtcagcgacaagcgggatattagccggttcctggagagcaaccccgtgatgatcgatgccaaggaagtgagcgccgcccaccgggccagatacttctggggcaatctgcctggcatgaacagacccctggccagcaccgtgaacgacaagctggagctgcaggagtgcctggagcacggccggatcgccaagttcagcaaggtgagaaccatcaccacccgaagcaacagcatcaaacaaggcaaggaccagcactttcctgtgttcatgaacgagaaggaggacatcctgtggtgtaccgagatggagagagtgttcgggttcccagtccactacacagatgtcagcaacatgtctagactggccagacagagactgctgggaagaagctggtccgtccctgtgatcagacacctgttcgcccctctgaaggagtacttcgcctgcgtgagcagcggcaacagcaacgccaacagccggggccccagcttctctagcggcctggtgccactgtccctgagagggagccacatgggccccatggagatctacaaaaccgtgagcgcctggaagcggcagcctgtgcgcgtgctgagcctgtttcggaatatcgataaagtcctgaaaagcctgggattcctggagagcggctctggctccggcggtggcaccctgaagtacgtggaggatgtgacaaacgtggtcagacgggatgtggagaagtggggccccttcgatctggtgtacggcagcacccaacccctgggcagctcttgtgaccggtgccctggctggtacatgtttcagttccaccggatcctgcagtacgccctgccgagacaggagtcccagcggccattcttttggattttcatggacaacttgctgctgaccgaggatgaccaggaaactaccactcggttcctgcagaccgaagccgtgaccctgcaggacgtgagaggccgggactaccagaacgccatgcgggtgtggtccaacatccctggactgaaaagcaagcacgcacctctgacccctaaagaagaggagtacctgcaggcccaggtgcggagcagaagcaagctggacgcccctaaggtggatctgctggtgaagaattgcctcctgcccctgagagagtacttcaagtatttcagccagaatagtctgcccctgggaggcagcggcggcggcagccaggagcccgtgaccttcgccgacgtggccgtggtgttcacccccgaggagtgggtgttcctggacagcacccagaggagcctgtacagggacgtgatgctggagaactacaggaacctggccagcgtggccggcgaccagctgtgcaagcccaacgccctgagctacctggagcagaggggcgagcagtggaccaccgagaggggcgtgatcagcgacacctgccccgagccccagctgggcggcccaagcagcggcgcccctcctcccagcggcggcagcccagccggctccccaacctctaccgaggagggcacctctgagtccgccacccccgagagcggccctggcacctccaccgagcccagcgagggcagcgcacccggcagccctgccggcagccccacctccacagaggagggaaccagcaccgagcccagcgaaggcagcgccccaggcaccagcaccgagcctagtgagcaggagattaaacggatcaacaagatcagaagaagacttgtgaaagacagcaacaccaagaaggccggcaagacaggccccatgaaaaccctgctggttagagtgatgacacccgatctgagagagcggctggaaaacctgagaaagaagcctgaaaatatcccccagcccatcagcaatacatctagagccaacctgaataagctgctgaccgattacaccgaaatgaagaaggcgatcctgcatgtgtactgggaagagttccagaaggaccctgtgggcctgatgagccgggtggcccagcctgccagcaagaagatcgatcagaacaagctgaaacctgagatggacgagaagggcaacctgaccaccgccggctttgcctgctctcagtgtggccagcccctgttcgtgtacaagctggagcaggtgtctgagaagggcaaggcttacaccaactacttcggacggtgcaatgtggccgagcacgaaaagctgatcctgctggcccagctgaagcccgagaaggatagcgacgaagccgtgacatatagcctgggaaagtttgggcagagggccctggatttctacagcattcatgtgaccaaggagtccacccaccccgtgaagcccctggcccagatcgccggaaacagatacgcctccggacctgtgggaaaggccctgagcgacgcatgtatgggcacaatcgcctccttcctgtctaagtaccaggacatcatcatcgaacaccagaaggtggtgaagggcaaccagaagagactggagagcctgcgggagctggccggcaaggaaaacctggaataccctagcgtgaccctgccacctcagcctcacaccaaggagggcgttgatgcctacaacgaagtgatcgcccgggtgcgaatgtgggtgaacctgaacctgtggcagaagctgaagctaagcagagatgatgccaagcctctgctgagactgaagggattcccttcctttcctctggtcgagagacaggccaacgaagtggactggtgggacatggtgtgtaacgtgaagaagctgatcaacgagaaaaaggaggatggcaaggtgttttggcagaatctggctggctacaagagacaggaagccctgagaccatacctgagcagcgaggaagatcggaagaagggaaagaaattcgctcggtaccagctgggcgacctgctgctgcacctggaaaagaagcacggcgaggactggggaaaggtgtacgacgaggcctgggagcggattgacaagaaagtggaaggcctgagcaagcacatcaagctggaagaggaacggagaagcgaggacgcccagagcaaggccgccctgaccgactggctgcgggctaaggccagcttcgtgatcgagggcctgaaggaggccgacaaggacgagttctgcagatgcgagctgaagctgcagaagtggtacggggacctgcggggaaagcccttcgccatcgaagccgagaacagcatcctggacatcagcggcttcagcaagcagtacaactgtgccttcatctggcagaaggacggcgtgaagaagctgaacctgtacctgatcatcaactacttcaagggcggcaagctgcggttcaagaagatcaaacctgaagccttcgaagccaacagattctacaccgtgatcaacaaaaagagcggcgagatcgtgcccatggaggtgaacttcaacttcgacgaccccaacctgatcatcctgcctctggcctttggcaagagacagggcagagaattcatctggaacgacctgctgtccctggaaaccggcagcctgaagctggccaacggaagagtgatcgagaagacactgtacaacagaagaacccggcaggatgagcctgccctgttcgtggccctgaccttcgagcggcgggaggtcctggactcctccaatatcaaaccaatgaacctgatcggcgtggcaagaggcgaaaacatccccgccgtgatcgccctgaccgaccccgagggctgcccactgagccggtttaaggatagcctgggaaacccaacccacatcctgagaatcggcgagagctataaggagaagcagcggaccatccaggccaagaaggaggtggagcagcggagagccggcggctacagccggaagtacgccagcaaagccaagaatctggcagacgatatggtgagaaacaccgctagagatctgctgtactacgccgtgacccaggatgccatgctgatcttcgccaacctgagccggggcttcggccggcagggcaagcggaccttcatggccgagagacagtacacacggatggaggactggctgaccgccaagctggcctacgagggcctgagcaagacctacctgtccaagacactggcccagtacacctccaagacatgcagcaactgtgggtttaccatcaccagcgccgactacgacagggtgctggagaagctgaagaagacagcaacaggctggatgaccacaattaacggcaaggagctgaaggtggagggccagattacctactacaacagatacaagagacagaacgtagtcaaggacctgtccgtcgagctggatagactgagcgaagaatctgtgaacaacgacatctcctcctggacaaagggcagaagcggagaagctctgagcctcctgaagaaaagattctcccatagacccgtgcaggagaagttcgtgtgcctgaactgcggcttcgagacacacgcagccgagcaagccgccctgaacatcgccagatcctggctgttcctgcggagccaggagtacaagaaataccagacaaacaagacaaccggcaacaccgataagagagccttcgtcgagacctggcagtccttttaccggaagaagcttaaggaggtgtggaaacctgccgtgcggtctggcggatctggcggaggctccaccagccccaagaaaaagagaaaagtctaagctgccttctgcggggcttgccttctggccatgcccttcttctctcccttgcacctgtacctcttggtctttgaataaagcctgagtaggaaggctagcaaaaaaaaaaaaaaaaaaaaaaaaaaaaaaaaaaaaaaaaaaaaaaaaaaaaaaaaaaaaaaaaaaaaaaaaaaaaaaaa

SEQ ID NO: 13179 - RNA, 5785 nt, synthetic construct
  source 1..5785: mol_type = other RNA
aggaaataagagagaaaagaagagtaagaagaaatataagagccaccatggcccctaagaagaagcgtaaagtgagccggatggaacgcctcgtctacgaggtgcggcagaagtgcagaaacatcgaggacatctgcatctcctgcggatctctgaacgtgaccctggagcacccactgttcatcggcggcatgtgccagaactgtaaaaactgttttctggagtgtgcctatcaatacgacgatgacggctaccagagctactgcaccatctgttgcggcggaagagaggtgctgatgtgtggaaataacaactgctgccggtgcttctgcgtggaatgcgtggacctgctggtgggccccggcgccgcccaggccgctattaaggaagatccttggaactgctacatgtgcggccacaagggcacatacggcctgctgagacggagagaggactggcctagcagactgcagatgttcttcgccaataaccacgaccaggagttcgacccccctaaggtgtaccctcccgtccccgccgagaagagaaagcccatccgggtcctgagcctgttcgatggcatcgccaccggtctgctggtgctgaaggacctgggcatccaggtggataggtacattgcctccgaggtgtgcgaggactccatcaccgtgggaatggtgcgtcatcagggcaagatcatgtacgtgggcgacgtgcggagcgtgacacagaagcatatccaggagtggggccctttcgacctggtgatcggcggcagcccttgcaatgacctgagcatcgtgaacccagcccggaagggcctgtacgagggaaccggcagactgttcttcgagttttacagactgctgcacgacgcccggcctaaggaaggcgacgaccggcccttcttttggctgttcgagaatgtggtggccatgggagtcagcgacaagcgggatattagccggttcctggagagcaaccccgtgatgatcgatgccaaggaagtgagcgccgcccaccgggccagatacttctggggcaatctgcctggcatgaacagacccctggccagcaccgtgaacgacaagctggagctgcaggagtgcctggagcacggccggatcgccaagttcagcaaggtgagaaccatcaccacccgaagcaacagcatcaaacaaggcaaggaccagcactttcctgtgttcatgaacgagaaggaggacatcctgtggtgtaccgagatggagagagtgttcgggttcccagtccactacacagatgtcagcaacatgtctagactggccagacagagactgctgggaagaagctggtccgtccctgtgatcagacacctgttcgcccctctgaaggagtacttcgcctgcgtgagcagcggcaacagcaacgccaacagccggggccccagcttctctagcggcctggtgccactgtccctgagagggagccacatgggccccatggagatctacaaaaccgtgagcgcctggaagcggcagcctgtgcgcgtgctgagcctgtttcggaatatcgataaagtcctgaaaagcctgggattcctggagagcggctctggctccggcggtggcaccctgaagtacgtggaggatgtgacaaacgtggtcagacgggatgtggagaagtggggccccttcgatctggtgtacggcagcacccaacccctgggcagctcttgtgaccggtgccctggctggtacatgtttcagttccaccggatcctgcagtacgccctgccgagacaggagtcccagcggccattcttttggattttcatggacaacttgctgctgaccgaggatgaccaggaaactaccactcggttcctgcagaccgaagccgtgaccctgcaggacgtgagaggccgggactaccagaacgccatgcgggtgtggtccaacatccctggactgaaaagcaagcacgcacctctgacccctaaagaagaggagtacctgcaggcccaggtgcggagcagaagcaagctggacgcccctaaggtggatctgctggtgaagaattgcctcctgcccctgagagagtacttcaagtatttcagccagaatagtctgcccctgggaggcagcggcggcggcttcgaggagctggtgaccttcgaggacgtgttcgtggacttcagccccgaggagctgagcagcctgagcgccccccagaggaacctgtacagggaggtgatgctggagaactacaggaacctggtgttcctgggctaccagttcagcaagcccgacatcatcagcaggctggaggtggaggagagccacgccatggagaccgacagcaggcacaccgtgatctgccagggcgaggcccacgacggcggcccaagcagcggcgcccctcctcccagcggcggcagcccagccggctccccaacctctaccgaggagggcacctctgagtccgccacccccgagagcggccctggcacctccaccgagcccagcgagggcagcgcacccggcagccctgccggcagccccacctccacagaggagggaaccagcaccgagcccagcgaaggcagcgccccaggcaccagcaccgagcctagtgagcaggagattaaacggatcaacaagatcagaagaagacttgtgaaagacagcaacaccaagaaggccggcaagacaggccccatgaaaaccctgctggttagagtgatgacacccgatctgagagagcggctggaaaacctgagaaagaagcctgaaaatatcccccagcccatcagcaatacatctagagccaacctgaataagctgctgaccgattacaccgaaatgaagaaggcgatcctgcatgtgtactgggaagagttccagaaggaccctgtgggcctgatgagccgggtggcccagcctgccagcaagaagatcgatcagaacaagctgaaacctgagatggacgagaagggcaacctgaccaccgccggctttgcctgctctcagtgtggccagcccctgttcgtgtacaagctggagcaggtgtctgagaagggcaaggcttacaccaactacttcggacggtgcaatgtggccgagcacgaaaagctgatcctgctggcccagctgaagcccgagaaggatagcgacgaagccgtgacatatagcctgggaaagtttgggcagagggccctggatttctacagcattcatgtgaccaaggagtccacccaccccgtgaagcccctggcccagatcgccggaaacagatacgcctccggacctgtgggaaaggccctgagcgacgcatgtatgggcacaatcgcctccttcctgtctaagtaccaggacatcatcatcgaacaccagaaggtggtgaagggcaaccagaagagactggagagcctgcgggagctggccggcaaggaaaacctggaataccctagcgtgaccctgccacctcagcctcacaccaaggagggcgttgatgcctacaacgaagtgatcgcccgggtgcgaatgtgggtgaacctgaacctgtggcagaagctgaagctaagcagagatgatgccaagcctctgctgagactgaagggattcccttcctttcctctggtcgagagacaggccaacgaagtggactggtgggacatggtgtgtaacgtgaagaagctgatcaacgagaaaaaggaggatggcaaggtgttttggcagaatctggctggctacaagagacaggaagccctgagaccatacctgagcagcgaggaagatcggaagaagggaaagaaattcgctcggtaccagctgggcgacctgctgctgcacctggaaaagaagcacggcgaggactggggaaaggtgtacgacgaggcctgggagcggattgacaagaaagtggaaggcctgagcaagcacatcaagctggaagaggaacggagaagcgaggacgcccagagcaaggccgccctgaccgactggctgcgggctaaggccagcttcgtgatcgagggcctgaaggaggccgacaaggacgagttctgcagatgcgagctgaagctgcagaagtggtacggggacctgcggggaaagcccttcgccatcgaagccgagaacagcatcctggacatcagcggcttcagcaagcagtacaactgtgccttcatctggcagaaggacggcgtgaagaagctgaacctgtacctgatcatcaactacttcaagggcggcaagctgcggttcaagaagatcaaacctgaagccttcgaagccaacagattctacaccgtgatcaacaaaaagagcggcgagatcgtgcccatggaggtgaacttcaacttcgacgaccccaacctgatcatcctgcctctggcctttggcaagagacagggcagagaattcatctggaacgacctgctgtccctggaaaccggcagcctgaagctggccaacggaagagtgatcgagaagacactgtacaacagaagaacccggcaggatgagcctgccctgttcgtggccctgaccttcgagcggcgggaggtcctggactcctccaatatcaaaccaatgaacctgatcggcgtggcaagaggcgaaaacatccccgccgtgatcgccctgaccgaccccgagggctgcccactgagccggtttaaggatagcctgggaaacccaacccacatcctgagaatcggcgagagctataaggagaagcagcggaccatccaggccaagaaggaggtggagcagcggagagccggcggctacagccggaagtacgccagcaaagccaagaatctggcagacgatatggtgagaaacaccgctagagatctgctgtactacgccgtgacccaggatgccatgctgatcttcgccaacctgagccggggcttcggccggcagggcaagcggaccttcatggccgagagacagtacacacggatggaggactggctgaccgccaagctggcctacgagggcctgagcaagacctacctgtccaagacactggcccagtacacctccaagacatgcagcaactgtgggtttaccatcaccagcgccgactacgacagggtgctggagaagctgaagaagacagcaacaggctggatgaccacaattaacggcaaggagctgaaggtggagggccagattacctactacaacagatacaagagacagaacgtagtcaaggacctgtccgtcgagctggatagactgagcgaagaatctgtgaacaacgacatctcctcctggacaaagggcagaagcggagaagctctgagcctcctgaagaaaagattctcccatagacccgtgcaggagaagttcgtgtgcctgaactgcggcttcgagacacacgcagccgagcaagccgccctgaacatcgccagatcctggctgttcctgcggagccaggagtacaagaaataccagacaaacaagacaaccggcaacaccgataagagagccttcgtcgagacctggcagtccttttaccggaagaagcttaaggaggtgtggaaacctgccgtgcggtctggcggatctggcggaggctccaccagccccaagaaaaagagaaaagtctaagctgccttctgcggggcttgccttctggccatgcccttcttctctcccttgcacctgtacctcttggtctttgaataaagcctgagtaggaaggctagcaaaaaaaaaaaaaaaaaaaaaaaaaaaaaaaaaaaaaaaaaaaaaaaaaaaaaaaaaaaaaaaaaaaaaaaaaaaaaaaa

SEQ ID NO: 13180 - RNA, 5785 nt, synthetic construct
  source 1..5785: mol_type = other RNA
aggaaataagagagaaaagaagagtaagaagaaatataagagccaccatggcccctaagaagaagcgtaaagtgagccggatggaacgcctcgtctacgaggtgcggcagaagtgcagaaacatcgaggacatctgcatctcctgcggatctctgaacgtgaccctggagcacccactgttcatcggcggcatgtgccagaactgtaaaaactgttttctggagtgtgcctatcaatacgacgatgacggctaccagagctactgcaccatctgttgcggcggaagagaggtgctgatgtgtggaaataacaactgctgccggtgcttctgcgtggaatgcgtggacctgctggtgggccccggcgccgcccaggccgctattaaggaagatccttggaactgctacatgtgcggccacaagggcacatacggcctgctgagacggagagaggactggcctagcagactgcagatgttcttcgccaataaccacgaccaggagttcgacccccctaaggtgtaccctcccgtccccgccgagaagagaaagcccatccgggtcctgagcctgttcgatggcatcgccaccggtctgctggtgctgaaggacctgggcatccaggtggataggtacattgcctccgaggtgtgcgaggactccatcaccgtgggaatggtgcgtcatcagggcaagatcatgtacgtgggcgacgtgcggagcgtgacacagaagcatatccaggagtggggccctttcgacctggtgatcggcggcagcccttgcaatgacctgagcatcgtgaacccagcccggaagggcctgtacgagggaaccggcagactgttcttcgagttttacagactgctgcacgacgcccggcctaaggaaggcgacgaccggcccttcttttggctgttcgagaatgtggtggccatgggagtcagcgacaagcgggatattagccggttcctggagagcaaccccgtgatgatcgatgccaaggaagtgagcgccgcccaccgggccagatacttctggggcaatctgcctggcatgaacagacccctggccagcaccgtgaacgacaagctggagctgcaggagtgcctggagcacggccggatcgccaagttcagcaaggtgagaaccatcaccacccgaagcaacagcatcaaacaaggcaaggaccagcactttcctgtgttcatgaacgagaaggaggacatcctgtggtgtaccgagatggagagagtgttcgggttcccagtccactacacagatgtcagcaacatgtctagactggccagacagagactgctgggaagaagctggtccgtccctgtgatcagacacctgttcgcccctctgaaggagtacttcgcctgcgtgagcagcggcaacagcaacgccaacagccggggccccagcttctctagcggcctggtgccactgtccctgagagggagccacatgggccccatggagatctacaaaaccgtgagcgcctggaagcggcagcctgtgcgcgtgctgagcctgtttcggaatatcgataaagtcctgaaaagcctgggattcctggagagcggctctggctccggcggtggcaccctgaagtacgtggaggatgtgacaaacgtggtcagacgggatgtggagaagtggggccccttcgatctggtgtacggcagcacccaacccctgggcagctcttgtgaccggtgccctggctggtacatgtttcagttccaccggatcctgcagtacgccctgccgagacaggagtcccagcggccattcttttggattttcatggacaacttgctgctgaccgaggatgaccaggaaactaccactcggttcctgcagaccgaagccgtgaccctgcaggacgtgagaggccgggactaccagaacgccatgcgggtgtggtccaacatccctggactgaaaagcaagcacgcacctctgacccctaaagaagaggagtacctgcaggcccaggtgcggagcagaagcaagctggacgcccctaaggtggatctgctggtgaagaattgcctcctgcccctgagagagtacttcaagtatttcagccagaatagtctgcccctgggaggcagcggcggcggcatggcccaggagagcgtgatgttcagcgacgtgagcgtggacttcagccaggaggagtgggagtgcctgaacgacgaccagagggacctgtacagggacgtgatgctggagaactacagcaacctggtgagcatggccggccacagcgtgagcaagcccaacgtgatcagctacctggagcagggcaaggagccctggctggtggacagggagctgaccaggggccagtggcccgtgctggagggcggcccaagcagcggcgcccctcctcccagcggcggcagcccagccggctccccaacctctaccgaggagggcacctctgagtccgccacccccgagagcggccctggcacctccaccgagcccagcgagggcagcgcacccggcagccctgccggcagccccacctccacagaggagggaaccagcaccgagcccagcgaaggcagcgccccaggcaccagcaccgagcctagtgagcaggagattaaacggatcaacaagatcagaagaagacttgtgaaagacagcaacaccaagaaggccggcaagacaggccccatgaaaaccctgctggttagagtgatgacacccgatctgagagagcggctggaaaacctgagaaagaagcctgaaaatatcccccagcccatcagcaatacatctagagccaacctgaataagctgctgaccgattacaccgaaatgaagaaggcgatcctgcatgtgtactgggaagagttccagaaggaccctgtgggcctgatgagccgggtggcccagcctgccagcaagaagatcgatcagaacaagctgaaacctgagatggacgagaagggcaacctgaccaccgccggctttgcctgctctcagtgtggccagcccctgttcgtgtacaagctggagcaggtgtctgagaagggcaaggcttacaccaactacttcggacggtgcaatgtggccgagcacgaaaagctgatcctgctggcccagctgaagcccgagaaggatagcgacgaagccgtgacatatagcctgggaaagtttgggcagagggccctggatttctacagcattcatgtgaccaaggagtccacccaccccgtgaagcccctggcccagatcgccggaaacagatacgcctccggacctgtgggaaaggccctgagcgacgcatgtatgggcacaatcgcctccttcctgtctaagtaccaggacatcatcatcgaacaccagaaggtggtgaagggcaaccagaagagactggagagcctgcgggagctggccggcaaggaaaacctggaataccctagcgtgaccctgccacctcagcctcacaccaaggagggcgttgatgcctacaacgaagtgatcgcccgggtgcgaatgtgggtgaacctgaacctgtggcagaagctgaagctaagcagagatgatgccaagcctctgctgagactgaagggattcccttcctttcctctggtcgagagacaggccaacgaagtggactggtgggacatggtgtgtaacgtgaagaagctgatcaacgagaaaaaggaggatggcaaggtgttttggcagaatctggctggctacaagagacaggaagccctgagaccatacctgagcagcgaggaagatcggaagaagggaaagaaattcgctcggtaccagctgggcgacctgctgctgcacctggaaaagaagcacggcgaggactggggaaaggtgtacgacgaggcctgggagcggattgacaagaaagtggaaggcctgagcaagcacatcaagctggaagaggaacggagaagcgaggacgcccagagcaaggccgccctgaccgactggctgcgggctaaggccagcttcgtgatcgagggcctgaaggaggccgacaaggacgagttctgcagatgcgagctgaagctgcagaagtggtacggggacctgcggggaaagcccttcgccatcgaagccgagaacagcatcctggacatcagcggcttcagcaagcagtacaactgtgccttcatctggcagaaggacggcgtgaagaagctgaacctgtacctgatcatcaactacttcaagggcggcaagctgcggttcaagaagatcaaacctgaagccttcgaagccaacagattctacaccgtgatcaacaaaaagagcggcgagatcgtgcccatggaggtgaacttcaacttcgacgaccccaacctgatcatcctgcctctggcctttggcaagagacagggcagagaattcatctggaacgacctgctgtccctggaaaccggcagcctgaagctggccaacggaagagtgatcgagaagacactgtacaacagaagaacccggcaggatgagcctgccctgttcgtggccctgaccttcgagcggcgggaggtcctggactcctccaatatcaaaccaatgaacctgatcggcgtggcaagaggcgaaaacatccccgccgtgatcgccctgaccgaccccgagggctgcccactgagccggtttaaggatagcctgggaaacccaacccacatcctgagaatcggcgagagctataaggagaagcagcggaccatccaggccaagaaggaggtggagcagcggagagccggcggctacagccggaagtacgccagcaaagccaagaatctggcagacgatatggtgagaaacaccgctagagatctgctgtactacgccgtgacccaggatgccatgctgatcttcgccaacctgagccggggcttcggccggcagggcaagcggaccttcatggccgagagacagtacacacggatggaggactggctgaccgccaagctggcctacgagggcctgagcaagacctacctgtccaagacactggcccagtacacctccaagacatgcagcaactgtgggtttaccatcaccagcgccgactacgacagggtgctggagaagctgaagaagacagcaacaggctggatgaccacaattaacggcaaggagctgaaggtggagggccagattacctactacaacagatacaagagacagaacgtagtcaaggacctgtccgtcgagctggatagactgagcgaagaatctgtgaacaacgacatctcctcctggacaaagggcagaagcggagaagctctgagcctcctgaagaaaagattctcccatagacccgtgcaggagaagttcgtgtgcctgaactgcggcttcgagacacacgcagccgagcaagccgccctgaacatcgccagatcctggctgttcctgcggagccaggagtacaagaaataccagacaaacaagacaaccggcaacaccgataagagagccttcgtcgagacctggcagtccttttaccggaagaagcttaaggaggtgtggaaacctgccgtgcggtctggcggatctggcggaggctccaccagccccaagaaaaagagaaaagtctaagctgccttctgcggggcttgccttctggccatgcccttcttctctcccttgcacctgtacctcttggtctttgaataaagcctgagtaggaaggctagcaaaaaaaaaaaaaaaaaaaaaaaaaaaaaaaaaaaaaaaaaaaaaaaaaaaaaaaaaaaaaaaaaaaaaaaaaaaaaaaa

SEQ ID NO: 13181 - RNA, 5785 nt, synthetic construct
  source 1..5785: mol_type = other RNA
aggaaataagagagaaaagaagagtaagaagaaatataagagccaccatggcccctaagaagaagcgtaaagtgagccggatggaacgcctcgtctacgaggtgcggcagaagtgcagaaacatcgaggacatctgcatctcctgcggatctctgaacgtgaccctggagcacccactgttcatcggcggcatgtgccagaactgtaaaaactgttttctggagtgtgcctatcaatacgacgatgacggctaccagagctactgcaccatctgttgcggcggaagagaggtgctgatgtgtggaaataacaactgctgccggtgcttctgcgtggaatgcgtggacctgctggtgggccccggcgccgcccaggccgctattaaggaagatccttggaactgctacatgtgcggccacaagggcacatacggcctgctgagacggagagaggactggcctagcagactgcagatgttcttcgccaataaccacgaccaggagttcgacccccctaaggtgtaccctcccgtccccgccgagaagagaaagcccatccgggtcctgagcctgttcgatggcatcgccaccggtctgctggtgctgaaggacctgggcatccaggtggataggtacattgcctccgaggtgtgcgaggactccatcaccgtgggaatggtgcgtcatcagggcaagatcatgtacgtgggcgacgtgcggagcgtgacacagaagcatatccaggagtggggccctttcgacctggtgatcggcggcagcccttgcaatgacctgagcatcgtgaacccagcccggaagggcctgtacgagggaaccggcagactgttcttcgagttttacagactgctgcacgacgcccggcctaaggaaggcgacgaccggcccttcttttggctgttcgagaatgtggtggccatgggagtcagcgacaagcgggatattagccggttcctggagagcaaccccgtgatgatcgatgccaaggaagtgagcgccgcccaccgggccagatacttctggggcaatctgcctggcatgaacagacccctggccagcaccgtgaacgacaagctggagctgcaggagtgcctggagcacggccggatcgccaagttcagcaaggtgagaaccatcaccacccgaagcaacagcatcaaacaaggcaaggaccagcactttcctgtgttcatgaacgagaaggaggacatcctgtggtgtaccgagatggagagagtgttcgggttcccagtccactacacagatgtcagcaacatgtctagactggccagacagagactgctgggaagaagctggtccgtccctgtgatcagacacctgttcgcccctctgaaggagtacttcgcctgcgtgagcagcggcaacagcaacgccaacagccggggccccagcttctctagcggcctggtgccactgtccctgagagggagccacatgggccccatggagatctacaaaaccgtgagcgcctggaagcggcagcctgtgcgcgtgctgagcctgtttcggaatatcgataaagtcctgaaaagcctgggattcctggagagcggctctggctccggcggtggcaccctgaagtacgtggaggatgtgacaaacgtggtcagacgggatgtggagaagtggggccccttcgatctggtgtacggcagcacccaacccctgggcagctcttgtgaccggtgccctggctggtacatgtttcagttccaccggatcctgcagtacgccctgccgagacaggagtcccagcggccattcttttggattttcatggacaacttgctgctgaccgaggatgaccaggaaactaccactcggttcctgcagaccgaagccgtgaccctgcaggacgtgagaggccgggactaccagaacgccatgcgggtgtggtccaacatccctggactgaaaagcaagcacgcacctctgacccctaaagaagaggagtacctgcaggcccaggtgcggagcagaagcaagctggacgcccctaaggtggatctgctggtgaagaattgcctcctgcccctgagagagtacttcaagtatttcagccagaatagtctgcccctgggaggcagcggcggcggcagggagaggctggtgagcttcgaggacgtgaccgtggacttcagccaggaggagtggaggaggctggacagcgtgcagaggcacctgtaccaggacgtgatgctggagatctacagccacctgctggccgtgggctaccccgtgcccagccccggcgccatcttcaggatcaagaagaggaaggaggccaggaccggcgaggccaagctgccccacccctgctggtgccaggaggtggagagcggcggcccaagcagcggcgcccctcctcccagcggcggcagcccagccggctccccaacctctaccgaggagggcacctctgagtccgccacccccgagagcggccctggcacctccaccgagcccagcgagggcagcgcacccggcagccctgccggcagccccacctccacagaggagggaaccagcaccgagcccagcgaaggcagcgccccaggcaccagcaccgagcctagtgagcaggagattaaacggatcaacaagatcagaagaagacttgtgaaagacagcaacaccaagaaggccggcaagacaggccccatgaaaaccctgctggttagagtgatgacacccgatctgagagagcggctggaaaacctgagaaagaagcctgaaaatatcccccagcccatcagcaatacatctagagccaacctgaataagctgctgaccgattacaccgaaatgaagaaggcgatcctgcatgtgtactgggaagagttccagaaggaccctgtgggcctgatgagccgggtggcccagcctgccagcaagaagatcgatcagaacaagctgaaacctgagatggacgagaagggcaacctgaccaccgccggctttgcctgctctcagtgtggccagcccctgttcgtgtacaagctggagcaggtgtctgagaagggcaaggcttacaccaactacttcggacggtgcaatgtggccgagcacgaaaagctgatcctgctggcccagctgaagcccgagaaggatagcgacgaagccgtgacatatagcctgggaaagtttgggcagagggccctggatttctacagcattcatgtgaccaaggagtccacccaccccgtgaagcccctggcccagatcgccggaaacagatacgcctccggacctgtgggaaaggccctgagcgacgcatgtatgggcacaatcgcctccttcctgtctaagtaccaggacatcatcatcgaacaccagaaggtggtgaagggcaaccagaagagactggagagcctgcgggagctggccggcaaggaaaacctggaataccctagcgtgaccctgccacctcagcctcacaccaaggagggcgttgatgcctacaacgaagtgatcgcccgggtgcgaatgtgggtgaacctgaacctgtggcagaagctgaagctaagcagagatgatgccaagcctctgctgagactgaagggattcccttcctttcctctggtcgagagacaggccaacgaagtggactggtgggacatggtgtgtaacgtgaagaagctgatcaacgagaaaaaggaggatggcaaggtgttttggcagaatctggctggctacaagagacaggaagccctgagaccatacctgagcagcgaggaagatcggaagaagggaaagaaattcgctcggtaccagctgggcgacctgctgctgcacctggaaaagaagcacggcgaggactggggaaaggtgtacgacgaggcctgggagcggattgacaagaaagtggaaggcctgagcaagcacatcaagctggaagaggaacggagaagcgaggacgcccagagcaaggccgccctgaccgactggctgcgggctaaggccagcttcgtgatcgagggcctgaaggaggccgacaaggacgagttctgcagatgcgagctgaagctgcagaagtggtacggggacctgcggggaaagcccttcgccatcgaagccgagaacagcatcctggacatcagcggcttcagcaagcagtacaactgtgccttcatctggcagaaggacggcgtgaagaagctgaacctgtacctgatcatcaactacttcaagggcggcaagctgcggttcaagaagatcaaacctgaagccttcgaagccaacagattctacaccgtgatcaacaaaaagagcggcgagatcgtgcccatggaggtgaacttcaacttcgacgaccccaacctgatcatcctgcctctggcctttggcaagagacagggcagagaattcatctggaacgacctgctgtccctggaaaccggcagcctgaagctggccaacggaagagtgatcgagaagacactgtacaacagaagaacccggcaggatgagcctgccctgttcgtggccctgaccttcgagcggcgggaggtcctggactcctccaatatcaaaccaatgaacctgatcggcgtggcaagaggcgaaaacatccccgccgtgatcgccctgaccgaccccgagggctgcccactgagccggtttaaggatagcctgggaaacccaacccacatcctgagaatcggcgagagctataaggagaagcagcggaccatccaggccaagaaggaggtggagcagcggagagccggcggctacagccggaagtacgccagcaaagccaagaatctggcagacgatatggtgagaaacaccgctagagatctgctgtactacgccgtgacccaggatgccatgctgatcttcgccaacctgagccggggcttcggccggcagggcaagcggaccttcatggccgagagacagtacacacggatggaggactggctgaccgccaagctggcctacgagggcctgagcaagacctacctgtccaagacactggcccagtacacctccaagacatgcagcaactgtgggtttaccatcaccagcgccgactacgacagggtgctggagaagctgaagaagacagcaacaggctggatgaccacaattaacggcaaggagctgaaggtggagggccagattacctactacaacagatacaagagacagaacgtagtcaaggacctgtccgtcgagctggatagactgagcgaagaatctgtgaacaacgacatctcctcctggacaaagggcagaagcggagaagctctgagcctcctgaagaaaagattctcccatagacccgtgcaggagaagttcgtgtgcctgaactgcggcttcgagacacacgcagccgagcaagccgccctgaacatcgccagatcctggctgttcctgcggagccaggagtacaagaaataccagacaaacaagacaaccggcaacaccgataagagagccttcgtcgagacctggcagtccttttaccggaagaagcttaaggaggtgtggaaacctgccgtgcggtctggcggatctggcggaggctccaccagccccaagaaaaagagaaaagtctaagctgccttctgcggggcttgccttctggccatgcccttcttctctcccttgcacctgtacctcttggtctttgaataaagcctgagtaggaaggctagcaaaaaaaaaaaaaaaaaaaaaaaaaaaaaaaaaaaaaaaaaaaaaaaaaaaaaaaaaaaaaaaaaaaaaaaaaaaaaaaa

SEQ ID NO: 13182 - RNA, 5785 nt, synthetic construct
  source 1..5785: mol_type = other RNA
aggaaataagagagaaaagaagagtaagaagaaatataagagccaccatggcccctaagaagaagcgtaaagtgagccggatggaacgcctcgtctacgaggtgcggcagaagtgcagaaacatcgaggacatctgcatctcctgcggatctctgaacgtgaccctggagcacccactgttcatcggcggcatgtgccagaactgtaaaaactgttttctggagtgtgcctatcaatacgacgatgacggctaccagagctactgcaccatctgttgcggcggaagagaggtgctgatgtgtggaaataacaactgctgccggtgcttctgcgtggaatgcgtggacctgctggtgggccccggcgccgcccaggccgctattaaggaagatccttggaactgctacatgtgcggccacaagggcacatacggcctgctgagacggagagaggactggcctagcagactgcagatgttcttcgccaataaccacgaccaggagttcgacccccctaaggtgtaccctcccgtccccgccgagaagagaaagcccatccgggtcctgagcctgttcgatggcatcgccaccggtctgctggtgctgaaggacctgggcatccaggtggataggtacattgcctccgaggtgtgcgaggactccatcaccgtgggaatggtgcgtcatcagggcaagatcatgtacgtgggcgacgtgcggagcgtgacacagaagcatatccaggagtggggccctttcgacctggtgatcggcggcagcccttgcaatgacctgagcatcgtgaacccagcccggaagggcctgtacgagggaaccggcagactgttcttcgagttttacagactgctgcacgacgcccggcctaaggaaggcgacgaccggcccttcttttggctgttcgagaatgtggtggccatgggagtcagcgacaagcgggatattagccggttcctggagagcaaccccgtgatgatcgatgccaaggaagtgagcgccgcccaccgggccagatacttctggggcaatctgcctggcatgaacagacccctggccagcaccgtgaacgacaagctggagctgcaggagtgcctggagcacggccggatcgccaagttcagcaaggtgagaaccatcaccacccgaagcaacagcatcaaacaaggcaaggaccagcactttcctgtgttcatgaacgagaaggaggacatcctgtggtgtaccgagatggagagagtgttcgggttcccagtccactacacagatgtcagcaacatgtctagactggccagacagagactgctgggaagaagctggtccgtccctgtgatcagacacctgttcgcccctctgaaggagtacttcgcctgcgtgagcagcggcaacagcaacgccaacagccggggccccagcttctctagcggcctggtgccactgtccctgagagggagccacatgggccccatggagatctacaaaaccgtgagcgcctggaagcggcagcctgtgcgcgtgctgagcctgtttcggaatatcgataaagtcctgaaaagcctgggattcctggagagcggctctggctccggcggtggcaccctgaagtacgtggaggatgtgacaaacgtggtcagacgggatgtggagaagtggggccccttcgatctggtgtacggcagcacccaacccctgggcagctcttgtgaccggtgccctggctggtacatgtttcagttccaccggatcctgcagtacgccctgccgagacaggagtcccagcggccattcttttggattttcatggacaacttgctgctgaccgaggatgaccaggaaactaccactcggttcctgcagaccgaagccgtgaccctgcaggacgtgagaggccgggactaccagaacgccatgcgggtgtggtccaacatccctggactgaaaagcaagcacgcacctctgacccctaaagaagaggagtacctgcaggcccaggtgcggagcagaagcaagctggacgcccctaaggtggatctgctggtgaagaattgcctcctgcccctgagagagtacttcaagtatttcagccagaatagtctgcccctgggaggcagcggcggcggcgcctgggaggtggtgaccttccaggacgtggccgtggacttcaccagggaggagtggaggctgctgagccccccccagaaggagctgtacaaggaggtgatgctggagaacgtgaggaacctgctgagcgtgggcctgcccgccccccccgacgacgtggtgagctacctggagcagagggagggccccagcatgctggaccaggaggacctgaggacctgcggccccgagggcgagatcaggggcggcccaagcagcggcgcccctcctcccagcggcggcagcccagccggctccccaacctctaccgaggagggcacctctgagtccgccacccccgagagcggccctggcacctccaccgagcccagcgagggcagcgcacccggcagccctgccggcagccccacctccacagaggagggaaccagcaccgagcccagcgaaggcagcgccccaggcaccagcaccgagcctagtgagcaggagattaaacggatcaacaagatcagaagaagacttgtgaaagacagcaacaccaagaaggccggcaagacaggccccatgaaaaccctgctggttagagtgatgacacccgatctgagagagcggctggaaaacctgagaaagaagcctgaaaatatcccccagcccatcagcaatacatctagagccaacctgaataagctgctgaccgattacaccgaaatgaagaaggcgatcctgcatgtgtactgggaagagttccagaaggaccctgtgggcctgatgagccgggtggcccagcctgccagcaagaagatcgatcagaacaagctgaaacctgagatggacgagaagggcaacctgaccaccgccggctttgcctgctctcagtgtggccagcccctgttcgtgtacaagctggagcaggtgtctgagaagggcaaggcttacaccaactacttcggacggtgcaatgtggccgagcacgaaaagctgatcctgctggcccagctgaagcccgagaaggatagcgacgaagccgtgacatatagcctgggaaagtttgggcagagggccctggatttctacagcattcatgtgaccaaggagtccacccaccccgtgaagcccctggcccagatcgccggaaacagatacgcctccggacctgtgggaaaggccctgagcgacgcatgtatgggcacaatcgcctccttcctgtctaagtaccaggacatcatcatcgaacaccagaaggtggtgaagggcaaccagaagagactggagagcctgcgggagctggccggcaaggaaaacctggaataccctagcgtgaccctgccacctcagcctcacaccaaggagggcgttgatgcctacaacgaagtgatcgcccgggtgcgaatgtgggtgaacctgaacctgtggcagaagctgaagctaagcagagatgatgccaagcctctgctgagactgaagggattcccttcctttcctctggtcgagagacaggccaacgaagtggactggtgggacatggtgtgtaacgtgaagaagctgatcaacgagaaaaaggaggatggcaaggtgttttggcagaatctggctggctacaagagacaggaagccctgagaccatacctgagcagcgaggaagatcggaagaagggaaagaaattcgctcggtaccagctgggcgacctgctgctgcacctggaaaagaagcacggcgaggactggggaaaggtgtacgacgaggcctgggagcggattgacaagaaagtggaaggcctgagcaagcacatcaagctggaagaggaacggagaagcgaggacgcccagagcaaggccgccctgaccgactggctgcgggctaaggccagcttcgtgatcgagggcctgaaggaggccgacaaggacgagttctgcagatgcgagctgaagctgcagaagtggtacggggacctgcggggaaagcccttcgccatcgaagccgagaacagcatcctggacatcagcggcttcagcaagcagtacaactgtgccttcatctggcagaaggacggcgtgaagaagctgaacctgtacctgatcatcaactacttcaagggcggcaagctgcggttcaagaagatcaaacctgaagccttcgaagccaacagattctacaccgtgatcaacaaaaagagcggcgagatcgtgcccatggaggtgaacttcaacttcgacgaccccaacctgatcatcctgcctctggcctttggcaagagacagggcagagaattcatctggaacgacctgctgtccctggaaaccggcagcctgaagctggccaacggaagagtgatcgagaagacactgtacaacagaagaacccggcaggatgagcctgccctgttcgtggccctgaccttcgagcggcgggaggtcctggactcctccaatatcaaaccaatgaacctgatcggcgtggcaagaggcgaaaacatccccgccgtgatcgccctgaccgaccccgagggctgcccactgagccggtttaaggatagcctgggaaacccaacccacatcctgagaatcggcgagagctataaggagaagcagcggaccatccaggccaagaaggaggtggagcagcggagagccggcggctacagccggaagtacgccagcaaagccaagaatctggcagacgatatggtgagaaacaccgctagagatctgctgtactacgccgtgacccaggatgccatgctgatcttcgccaacctgagccggggcttcggccggcagggcaagcggaccttcatggccgagagacagtacacacggatggaggactggctgaccgccaagctggcctacgagggcctgagcaagacctacctgtccaagacactggcccagtacacctccaagacatgcagcaactgtgggtttaccatcaccagcgccgactacgacagggtgctggagaagctgaagaagacagcaacaggctggatgaccacaattaacggcaaggagctgaaggtggagggccagattacctactacaacagatacaagagacagaacgtagtcaaggacctgtccgtcgagctggatagactgagcgaagaatctgtgaacaacgacatctcctcctggacaaagggcagaagcggagaagctctgagcctcctgaagaaaagattctcccatagacccgtgcaggagaagttcgtgtgcctgaactgcggcttcgagacacacgcagccgagcaagccgccctgaacatcgccagatcctggctgttcctgcggagccaggagtacaagaaataccagacaaacaagacaaccggcaacaccgataagagagccttcgtcgagacctggcagtccttttaccggaagaagcttaaggaggtgtggaaacctgccgtgcggtctggcggatctggcggaggctccaccagccccaagaaaaagagaaaagtctaagctgccttctgcggggcttgccttctggccatgcccttcttctctcccttgcacctgtacctcttggtctttgaataaagcctgagtaggaaggctagcaaaaaaaaaaaaaaaaaaaaaaaaaaaaaaaaaaaaaaaaaaaaaaaaaaaaaaaaaaaaaaaaaaaaaaaaaaaaaaaa

SEQ ID NO: 13183 - RNA, 5785 nt, synthetic construct
  source 1..5785: mol_type = other RNA
aggaaataagagagaaaagaagagtaagaagaaatataagagccaccatggcccctaagaagaagcgtaaagtgagccggatggaacgcctcgtctacgaggtgcggcagaagtgcagaaacatcgaggacatctgcatctcctgcggatctctgaacgtgaccctggagcacccactgttcatcggcggcatgtgccagaactgtaaaaactgttttctggagtgtgcctatcaatacgacgatgacggctaccagagctactgcaccatctgttgcggcggaagagaggtgctgatgtgtggaaataacaactgctgccggtgcttctgcgtggaatgcgtggacctgctggtgggccccggcgccgcccaggccgctattaaggaagatccttggaactgctacatgtgcggccacaagggcacatacggcctgctgagacggagagaggactggcctagcagactgcagatgttcttcgccaataaccacgaccaggagttcgacccccctaaggtgtaccctcccgtccccgccgagaagagaaagcccatccgggtcctgagcctgttcgatggcatcgccaccggtctgctggtgctgaaggacctgggcatccaggtggataggtacattgcctccgaggtgtgcgaggactccatcaccgtgggaatggtgcgtcatcagggcaagatcatgtacgtgggcgacgtgcggagcgtgacacagaagcatatccaggagtggggccctttcgacctggtgatcggcggcagcccttgcaatgacctgagcatcgtgaacccagcccggaagggcctgtacgagggaaccggcagactgttcttcgagttttacagactgctgcacgacgcccggcctaaggaaggcgacgaccggcccttcttttggctgttcgagaatgtggtggccatgggagtcagcgacaagcgggatattagccggttcctggagagcaaccccgtgatgatcgatgccaaggaagtgagcgccgcccaccgggccagatacttctggggcaatctgcctggcatgaacagacccctggccagcaccgtgaacgacaagctggagctgcaggagtgcctggagcacggccggatcgccaagttcagcaaggtgagaaccatcaccacccgaagcaacagcatcaaacaaggcaaggaccagcactttcctgtgttcatgaacgagaaggaggacatcctgtggtgtaccgagatggagagagtgttcgggttcccagtccactacacagatgtcagcaacatgtctagactggccagacagagactgctgggaagaagctggtccgtccctgtgatcagacacctgttcgcccctctgaaggagtacttcgcctgcgtgagcagcggcaacagcaacgccaacagccggggccccagcttctctagcggcctggtgccactgtccctgagagggagccacatgggccccatggagatctacaaaaccgtgagcgcctggaagcggcagcctgtgcgcgtgctgagcctgtttcggaatatcgataaagtcctgaaaagcctgggattcctggagagcggctctggctccggcggtggcaccctgaagtacgtggaggatgtgacaaacgtggtcagacgggatgtggagaagtggggccccttcgatctggtgtacggcagcacccaacccctgggcagctcttgtgaccggtgccctggctggtacatgtttcagttccaccggatcctgcagtacgccctgccgagacaggagtcccagcggccattcttttggattttcatggacaacttgctgctgaccgaggatgaccaggaaactaccactcggttcctgcagaccgaagccgtgaccctgcaggacgtgagaggccgggactaccagaacgccatgcgggtgtggtccaacatccctggactgaaaagcaagcacgcacctctgacccctaaagaagaggagtacctgcaggcccaggtgcggagcagaagcaagctggacgcccctaaggtggatctgctggtgaagaattgcctcctgcccctgagagagtacttcaagtatttcagccagaatagtctgcccctgggaggcagcggcggcggccccaagggcctgctgaccttcagggacgtggccatcgagttcagccaggaggagtggggctgcctgaaccacacccagagggagctgtacagggacgtgatgctggagaactacggcaacctgctgttcctgggcctgatcgtgagcaagcccgacctggtgagcttcctggagcagaagaaggagccctggagcgtgaagaggaagaagagggtgaccatccaccccgcccagaggttcggcggcggcccaagcagcggcgcccctcctcccagcggcggcagcccagccggctccccaacctctaccgaggagggcacctctgagtccgccacccccgagagcggccctggcacctccaccgagcccagcgagggcagcgcacccggcagccctgccggcagccccacctccacagaggagggaaccagcaccgagcccagcgaaggcagcgccccaggcaccagcaccgagcctagtgagcaggagattaaacggatcaacaagatcagaagaagacttgtgaaagacagcaacaccaagaaggccggcaagacaggccccatgaaaaccctgctggttagagtgatgacacccgatctgagagagcggctggaaaacctgagaaagaagcctgaaaatatcccccagcccatcagcaatacatctagagccaacctgaataagctgctgaccgattacaccgaaatgaagaaggcgatcctgcatgtgtactgggaagagttccagaaggaccctgtgggcctgatgagccgggtggcccagcctgccagcaagaagatcgatcagaacaagctgaaacctgagatggacgagaagggcaacctgaccaccgccggctttgcctgctctcagtgtggccagcccctgttcgtgtacaagctggagcaggtgtctgagaagggcaaggcttacaccaactacttcggacggtgcaatgtggccgagcacgaaaagctgatcctgctggcccagctgaagcccgagaaggatagcgacgaagccgtgacatatagcctgggaaagtttgggcagagggccctggatttctacagcattcatgtgaccaaggagtccacccaccccgtgaagcccctggcccagatcgccggaaacagatacgcctccggacctgtgggaaaggccctgagcgacgcatgtatgggcacaatcgcctccttcctgtctaagtaccaggacatcatcatcgaacaccagaaggtggtgaagggcaaccagaagagactggagagcctgcgggagctggccggcaaggaaaacctggaataccctagcgtgaccctgccacctcagcctcacaccaaggagggcgttgatgcctacaacgaagtgatcgcccgggtgcgaatgtgggtgaacctgaacctgtggcagaagctgaagctaagcagagatgatgccaagcctctgctgagactgaagggattcccttcctttcctctggtcgagagacaggccaacgaagtggactggtgggacatggtgtgtaacgtgaagaagctgatcaacgagaaaaaggaggatggcaaggtgttttggcagaatctggctggctacaagagacaggaagccctgagaccatacctgagcagcgaggaagatcggaagaagggaaagaaattcgctcggtaccagctgggcgacctgctgctgcacctggaaaagaagcacggcgaggactggggaaaggtgtacgacgaggcctgggagcggattgacaagaaagtggaaggcctgagcaagcacatcaagctggaagaggaacggagaagcgaggacgcccagagcaaggccgccctgaccgactggctgcgggctaaggccagcttcgtgatcgagggcctgaaggaggccgacaaggacgagttctgcagatgcgagctgaagctgcagaagtggtacggggacctgcggggaaagcccttcgccatcgaagccgagaacagcatcctggacatcagcggcttcagcaagcagtacaactgtgccttcatctggcagaaggacggcgtgaagaagctgaacctgtacctgatcatcaactacttcaagggcggcaagctgcggttcaagaagatcaaacctgaagccttcgaagccaacagattctacaccgtgatcaacaaaaagagcggcgagatcgtgcccatggaggtgaacttcaacttcgacgaccccaacctgatcatcctgcctctggcctttggcaagagacagggcagagaattcatctggaacgacctgctgtccctggaaaccggcagcctgaagctggccaacggaagagtgatcgagaagacactgtacaacagaagaacccggcaggatgagcctgccctgttcgtggccctgaccttcgagcggcgggaggtcctggactcctccaatatcaaaccaatgaacctgatcggcgtggcaagaggcgaaaacatccccgccgtgatcgccctgaccgaccccgagggctgcccactgagccggtttaaggatagcctgggaaacccaacccacatcctgagaatcggcgagagctataaggagaagcagcggaccatccaggccaagaaggaggtggagcagcggagagccggcggctacagccggaagtacgccagcaaagccaagaatctggcagacgatatggtgagaaacaccgctagagatctgctgtactacgccgtgacccaggatgccatgctgatcttcgccaacctgagccggggcttcggccggcagggcaagcggaccttcatggccgagagacagtacacacggatggaggactggctgaccgccaagctggcctacgagggcctgagcaagacctacctgtccaagacactggcccagtacacctccaagacatgcagcaactgtgggtttaccatcaccagcgccgactacgacagggtgctggagaagctgaagaagacagcaacaggctggatgaccacaattaacggcaaggagctgaaggtggagggccagattacctactacaacagatacaagagacagaacgtagtcaaggacctgtccgtcgagctggatagactgagcgaagaatctgtgaacaacgacatctcctcctggacaaagggcagaagcggagaagctctgagcctcctgaagaaaagattctcccatagacccgtgcaggagaagttcgtgtgcctgaactgcggcttcgagacacacgcagccgagcaagccgccctgaacatcgccagatcctggctgttcctgcggagccaggagtacaagaaataccagacaaacaagacaaccggcaacaccgataagagagccttcgtcgagacctggcagtccttttaccggaagaagcttaaggaggtgtggaaacctgccgtgcggtctggcggatctggcggaggctccaccagccccaagaaaaagagaaaagtctaagctgccttctgcggggcttgccttctggccatgcccttcttctctcccttgcacctgtacctcttggtctttgaataaagcctgagtaggaaggctagcaaaaaaaaaaaaaaaaaaaaaaaaaaaaaaaaaaaaaaaaaaaaaaaaaaaaaaaaaaaaaaaaaaaaaaaaaaaaaaaa

SEQ ID NO: 13184 - RNA, 5785 nt, synthetic construct
  source 1..5785: mol_type = other RNA
aggaaataagagagaaaagaagagtaagaagaaatataagagccaccatggcccctaagaagaagcgtaaagtgagccggatggaacgcctcgtctacgaggtgcggcagaagtgcagaaacatcgaggacatctgcatctcctgcggatctctgaacgtgaccctggagcacccactgttcatcggcggcatgtgccagaactgtaaaaactgttttctggagtgtgcctatcaatacgacgatgacggctaccagagctactgcaccatctgttgcggcggaagagaggtgctgatgtgtggaaataacaactgctgccggtgcttctgcgtggaatgcgtggacctgctggtgggccccggcgccgcccaggccgctattaaggaagatccttggaactgctacatgtgcggccacaagggcacatacggcctgctgagacggagagaggactggcctagcagactgcagatgttcttcgccaataaccacgaccaggagttcgacccccctaaggtgtaccctcccgtccccgccgagaagagaaagcccatccgggtcctgagcctgttcgatggcatcgccaccggtctgctggtgctgaaggacctgggcatccaggtggataggtacattgcctccgaggtgtgcgaggactccatcaccgtgggaatggtgcgtcatcagggcaagatcatgtacgtgggcgacgtgcggagcgtgacacagaagcatatccaggagtggggccctttcgacctggtgatcggcggcagcccttgcaatgacctgagcatcgtgaacccagcccggaagggcctgtacgagggaaccggcagactgttcttcgagttttacagactgctgcacgacgcccggcctaaggaaggcgacgaccggcccttcttttggctgttcgagaatgtggtggccatgggagtcagcgacaagcgggatattagccggttcctggagagcaaccccgtgatgatcgatgccaaggaagtgagcgccgcccaccgggccagatacttctggggcaatctgcctggcatgaacagacccctggccagcaccgtgaacgacaagctggagctgcaggagtgcctggagcacggccggatcgccaagttcagcaaggtgagaaccatcaccacccgaagcaacagcatcaaacaaggcaaggaccagcactttcctgtgttcatgaacgagaaggaggacatcctgtggtgtaccgagatggagagagtgttcgggttcccagtccactacacagatgtcagcaacatgtctagactggccagacagagactgctgggaagaagctggtccgtccctgtgatcagacacctgttcgcccctctgaaggagtacttcgcctgcgtgagcagcggcaacagcaacgccaacagccggggccccagcttctctagcggcctggtgccactgtccctgagagggagccacatgggccccatggagatctacaaaaccgtgagcgcctggaagcggcagcctgtgcgcgtgctgagcctgtttcggaatatcgataaagtcctgaaaagcctgggattcctggagagcggctctggctccggcggtggcaccctgaagtacgtggaggatgtgacaaacgtggtcagacgggatgtggagaagtggggccccttcgatctggtgtacggcagcacccaacccctgggcagctcttgtgaccggtgccctggctggtacatgtttcagttccaccggatcctgcagtacgccctgccgagacaggagtcccagcggccattcttttggattttcatggacaacttgctgctgaccgaggatgaccaggaaactaccactcggttcctgcagaccgaagccgtgaccctgcaggacgtgagaggccgggactaccagaacgccatgcgggtgtggtccaacatccctggactgaaaagcaagcacgcacctctgacccctaaagaagaggagtacctgcaggcccaggtgcggagcagaagcaagctggacgcccctaaggtggatctgctggtgaagaattgcctcctgcccctgagagagtacttcaagtatttcagccagaatagtctgcccctgggaggcagcggcggcggcccccaggagagcgtgaccttcaaggacatcgccgtggacttcacccaggaggagtgggccctgctggacaccagccagaggaagctgtacagggacgtgatgctggagaacatcagccacctggtgagcgtgggctaccacctgtgcaagagcgacgtgatcagccagctggagcagggcgtggagctgtggagggagggcaggggcttcccccagggcctgaaccccgacaggaagagcggcggcggcccaagcagcggcgcccctcctcccagcggcggcagcccagccggctccccaacctctaccgaggagggcacctctgagtccgccacccccgagagcggccctggcacctccaccgagcccagcgagggcagcgcacccggcagccctgccggcagccccacctccacagaggagggaaccagcaccgagcccagcgaaggcagcgccccaggcaccagcaccgagcctagtgagcaggagattaaacggatcaacaagatcagaagaagacttgtgaaagacagcaacaccaagaaggccggcaagacaggccccatgaaaaccctgctggttagagtgatgacacccgatctgagagagcggctggaaaacctgagaaagaagcctgaaaatatcccccagcccatcagcaatacatctagagccaacctgaataagctgctgaccgattacaccgaaatgaagaaggcgatcctgcatgtgtactgggaagagttccagaaggaccctgtgggcctgatgagccgggtggcccagcctgccagcaagaagatcgatcagaacaagctgaaacctgagatggacgagaagggcaacctgaccaccgccggctttgcctgctctcagtgtggccagcccctgttcgtgtacaagctggagcaggtgtctgagaagggcaaggcttacaccaactacttcggacggtgcaatgtggccgagcacgaaaagctgatcctgctggcccagctgaagcccgagaaggatagcgacgaagccgtgacatatagcctgggaaagtttgggcagagggccctggatttctacagcattcatgtgaccaaggagtccacccaccccgtgaagcccctggcccagatcgccggaaacagatacgcctccggacctgtgggaaaggccctgagcgacgcatgtatgggcacaatcgcctccttcctgtctaagtaccaggacatcatcatcgaacaccagaaggtggtgaagggcaaccagaagagactggagagcctgcgggagctggccggcaaggaaaacctggaataccctagcgtgaccctgccacctcagcctcacaccaaggagggcgttgatgcctacaacgaagtgatcgcccgggtgcgaatgtgggtgaacctgaacctgtggcagaagctgaagctaagcagagatgatgccaagcctctgctgagactgaagggattcccttcctttcctctggtcgagagacaggccaacgaagtggactggtgggacatggtgtgtaacgtgaagaagctgatcaacgagaaaaaggaggatggcaaggtgttttggcagaatctggctggctacaagagacaggaagccctgagaccatacctgagcagcgaggaagatcggaagaagggaaagaaattcgctcggtaccagctgggcgacctgctgctgcacctggaaaagaagcacggcgaggactggggaaaggtgtacgacgaggcctgggagcggattgacaagaaagtggaaggcctgagcaagcacatcaagctggaagaggaacggagaagcgaggacgcccagagcaaggccgccctgaccgactggctgcgggctaaggccagcttcgtgatcgagggcctgaaggaggccgacaaggacgagttctgcagatgcgagctgaagctgcagaagtggtacggggacctgcggggaaagcccttcgccatcgaagccgagaacagcatcctggacatcagcggcttcagcaagcagtacaactgtgccttcatctggcagaaggacggcgtgaagaagctgaacctgtacctgatcatcaactacttcaagggcggcaagctgcggttcaagaagatcaaacctgaagccttcgaagccaacagattctacaccgtgatcaacaaaaagagcggcgagatcgtgcccatggaggtgaacttcaacttcgacgaccccaacctgatcatcctgcctctggcctttggcaagagacagggcagagaattcatctggaacgacctgctgtccctggaaaccggcagcctgaagctggccaacggaagagtgatcgagaagacactgtacaacagaagaacccggcaggatgagcctgccctgttcgtggccctgaccttcgagcggcgggaggtcctggactcctccaatatcaaaccaatgaacctgatcggcgtggcaagaggcgaaaacatccccgccgtgatcgccctgaccgaccccgagggctgcccactgagccggtttaaggatagcctgggaaacccaacccacatcctgagaatcggcgagagctataaggagaagcagcggaccatccaggccaagaaggaggtggagcagcggagagccggcggctacagccggaagtacgccagcaaagccaagaatctggcagacgatatggtgagaaacaccgctagagatctgctgtactacgccgtgacccaggatgccatgctgatcttcgccaacctgagccggggcttcggccggcagggcaagcggaccttcatggccgagagacagtacacacggatggaggactggctgaccgccaagctggcctacgagggcctgagcaagacctacctgtccaagacactggcccagtacacctccaagacatgcagcaactgtgggtttaccatcaccagcgccgactacgacagggtgctggagaagctgaagaagacagcaacaggctggatgaccacaattaacggcaaggagctgaaggtggagggccagattacctactacaacagatacaagagacagaacgtagtcaaggacctgtccgtcgagctggatagactgagcgaagaatctgtgaacaacgacatctcctcctggacaaagggcagaagcggagaagctctgagcctcctgaagaaaagattctcccatagacccgtgcaggagaagttcgtgtgcctgaactgcggcttcgagacacacgcagccgagcaagccgccctgaacatcgccagatcctggctgttcctgcggagccaggagtacaagaaataccagacaaacaagacaaccggcaacaccgataagagagccttcgtcgagacctggcagtccttttaccggaagaagcttaaggaggtgtggaaacctgccgtgcggtctggcggatctggcggaggctccaccagccccaagaaaaagagaaaagtctaagctgccttctgcggggcttgccttctggccatgcccttcttctctcccttgcacctgtacctcttggtctttgaataaagcctgagtaggaaggctagcaaaaaaaaaaaaaaaaaaaaaaaaaaaaaaaaaaaaaaaaaaaaaaaaaaaaaaaaaaaaaaaaaaaaaaaaaaaaaaaa

SEQ ID NO: 13185 - RNA, 5785 nt, synthetic construct
  source 1..5785: mol_type = other RNA
aggaaataagagagaaaagaagagtaagaagaaatataagagccaccatggcccctaagaagaagcgtaaagtgagccggatggaacgcctcgtctacgaggtgcggcagaagtgcagaaacatcgaggacatctgcatctcctgcggatctctgaacgtgaccctggagcacccactgttcatcggcggcatgtgccagaactgtaaaaactgttttctggagtgtgcctatcaatacgacgatgacggctaccagagctactgcaccatctgttgcggcggaagagaggtgctgatgtgtggaaataacaactgctgccggtgcttctgcgtggaatgcgtggacctgctggtgggccccggcgccgcccaggccgctattaaggaagatccttggaactgctacatgtgcggccacaagggcacatacggcctgctgagacggagagaggactggcctagcagactgcagatgttcttcgccaataaccacgaccaggagttcgacccccctaaggtgtaccctcccgtccccgccgagaagagaaagcccatccgggtcctgagcctgttcgatggcatcgccaccggtctgctggtgctgaaggacctgggcatccaggtggataggtacattgcctccgaggtgtgcgaggactccatcaccgtgggaatggtgcgtcatcagggcaagatcatgtacgtgggcgacgtgcggagcgtgacacagaagcatatccaggagtggggccctttcgacctggtgatcggcggcagcccttgcaatgacctgagcatcgtgaacccagcccggaagggcctgtacgagggaaccggcagactgttcttcgagttttacagactgctgcacgacgcccggcctaaggaaggcgacgaccggcccttcttttggctgttcgagaatgtggtggccatgggagtcagcgacaagcgggatattagccggttcctggagagcaaccccgtgatgatcgatgccaaggaagtgagcgccgcccaccgggccagatacttctggggcaatctgcctggcatgaacagacccctggccagcaccgtgaacgacaagctggagctgcaggagtgcctggagcacggccggatcgccaagttcagcaaggtgagaaccatcaccacccgaagcaacagcatcaaacaaggcaaggaccagcactttcctgtgttcatgaacgagaaggaggacatcctgtggtgtaccgagatggagagagtgttcgggttcccagtccactacacagatgtcagcaacatgtctagactggccagacagagactgctgggaagaagctggtccgtccctgtgatcagacacctgttcgcccctctgaaggagtacttcgcctgcgtgagcagcggcaacagcaacgccaacagccggggccccagcttctctagcggcctggtgccactgtccctgagagggagccacatgggccccatggagatctacaaaaccgtgagcgcctggaagcggcagcctgtgcgcgtgctgagcctgtttcggaatatcgataaagtcctgaaaagcctgggattcctggagagcggctctggctccggcggtggcaccctgaagtacgtggaggatgtgacaaacgtggtcagacgggatgtggagaagtggggccccttcgatctggtgtacggcagcacccaacccctgggcagctcttgtgaccggtgccctggctggtacatgtttcagttccaccggatcctgcagtacgccctgccgagacaggagtcccagcggccattcttttggattttcatggacaacttgctgctgaccgaggatgaccaggaaactaccactcggttcctgcagaccgaagccgtgaccctgcaggacgtgagaggccgggactaccagaacgccatgcgggtgtggtccaacatccctggactgaaaagcaagcacgcacctctgacccctaaagaagaggagtacctgcaggcccaggtgcggagcagaagcaagctggacgcccctaaggtggatctgctggtgaagaattgcctcctgcccctgagagagtacttcaagtatttcagccagaatagtctgcccctgggaggcagcggcggcggcagcaagggcagcctgatgttcagggacgtgagcatcgacttcagccaggaggagtgggagtgcctggacagcggccagatgaacctgtacaaggaggtgatgctggagaacttcagcaacctggtgagcgtgggcctgagcagcagcaagcccgccgtgatcagcctgctggagcagggcagggagccctggatggtggacagggagctgaccaggggcctgtgcagcgacctggagagcatgggcggcccaagcagcggcgcccctcctcccagcggcggcagcccagccggctccccaacctctaccgaggagggcacctctgagtccgccacccccgagagcggccctggcacctccaccgagcccagcgagggcagcgcacccggcagccctgccggcagccccacctccacagaggagggaaccagcaccgagcccagcgaaggcagcgccccaggcaccagcaccgagcctagtgagcaggagattaaacggatcaacaagatcagaagaagacttgtgaaagacagcaacaccaagaaggccggcaagacaggccccatgaaaaccctgctggttagagtgatgacacccgatctgagagagcggctggaaaacctgagaaagaagcctgaaaatatcccccagcccatcagcaatacatctagagccaacctgaataagctgctgaccgattacaccgaaatgaagaaggcgatcctgcatgtgtactgggaagagttccagaaggaccctgtgggcctgatgagccgggtggcccagcctgccagcaagaagatcgatcagaacaagctgaaacctgagatggacgagaagggcaacctgaccaccgccggctttgcctgctctcagtgtggccagcccctgttcgtgtacaagctggagcaggtgtctgagaagggcaaggcttacaccaactacttcggacggtgcaatgtggccgagcacgaaaagctgatcctgctggcccagctgaagcccgagaaggatagcgacgaagccgtgacatatagcctgggaaagtttgggcagagggccctggatttctacagcattcatgtgaccaaggagtccacccaccccgtgaagcccctggcccagatcgccggaaacagatacgcctccggacctgtgggaaaggccctgagcgacgcatgtatgggcacaatcgcctccttcctgtctaagtaccaggacatcatcatcgaacaccagaaggtggtgaagggcaaccagaagagactggagagcctgcgggagctggccggcaaggaaaacctggaataccctagcgtgaccctgccacctcagcctcacaccaaggagggcgttgatgcctacaacgaagtgatcgcccgggtgcgaatgtgggtgaacctgaacctgtggcagaagctgaagctaagcagagatgatgccaagcctctgctgagactgaagggattcccttcctttcctctggtcgagagacaggccaacgaagtggactggtgggacatggtgtgtaacgtgaagaagctgatcaacgagaaaaaggaggatggcaaggtgttttggcagaatctggctggctacaagagacaggaagccctgagaccatacctgagcagcgaggaagatcggaagaagggaaagaaattcgctcggtaccagctgggcgacctgctgctgcacctggaaaagaagcacggcgaggactggggaaaggtgtacgacgaggcctgggagcggattgacaagaaagtggaaggcctgagcaagcacatcaagctggaagaggaacggagaagcgaggacgcccagagcaaggccgccctgaccgactggctgcgggctaaggccagcttcgtgatcgagggcctgaaggaggccgacaaggacgagttctgcagatgcgagctgaagctgcagaagtggtacggggacctgcggggaaagcccttcgccatcgaagccgagaacagcatcctggacatcagcggcttcagcaagcagtacaactgtgccttcatctggcagaaggacggcgtgaagaagctgaacctgtacctgatcatcaactacttcaagggcggcaagctgcggttcaagaagatcaaacctgaagccttcgaagccaacagattctacaccgtgatcaacaaaaagagcggcgagatcgtgcccatggaggtgaacttcaacttcgacgaccccaacctgatcatcctgcctctggcctttggcaagagacagggcagagaattcatctggaacgacctgctgtccctggaaaccggcagcctgaagctggccaacggaagagtgatcgagaagacactgtacaacagaagaacccggcaggatgagcctgccctgttcgtggccctgaccttcgagcggcgggaggtcctggactcctccaatatcaaaccaatgaacctgatcggcgtggcaagaggcgaaaacatccccgccgtgatcgccctgaccgaccccgagggctgcccactgagccggtttaaggatagcctgggaaacccaacccacatcctgagaatcggcgagagctataaggagaagcagcggaccatccaggccaagaaggaggtggagcagcggagagccggcggctacagccggaagtacgccagcaaagccaagaatctggcagacgatatggtgagaaacaccgctagagatctgctgtactacgccgtgacccaggatgccatgctgatcttcgccaacctgagccggggcttcggccggcagggcaagcggaccttcatggccgagagacagtacacacggatggaggactggctgaccgccaagctggcctacgagggcctgagcaagacctacctgtccaagacactggcccagtacacctccaagacatgcagcaactgtgggtttaccatcaccagcgccgactacgacagggtgctggagaagctgaagaagacagcaacaggctggatgaccacaattaacggcaaggagctgaaggtggagggccagattacctactacaacagatacaagagacagaacgtagtcaaggacctgtccgtcgagctggatagactgagcgaagaatctgtgaacaacgacatctcctcctggacaaagggcagaagcggagaagctctgagcctcctgaagaaaagattctcccatagacccgtgcaggagaagttcgtgtgcctgaactgcggcttcgagacacacgcagccgagcaagccgccctgaacatcgccagatcctggctgttcctgcggagccaggagtacaagaaataccagacaaacaagacaaccggcaacaccgataagagagccttcgtcgagacctggcagtccttttaccggaagaagcttaaggaggtgtggaaacctgccgtgcggtctggcggatctggcggaggctccaccagccccaagaaaaagagaaaagtctaagctgccttctgcggggcttgccttctggccatgcccttcttctctcccttgcacctgtacctcttggtctttgaataaagcctgagtaggaaggctagcaaaaaaaaaaaaaaaaaaaaaaaaaaaaaaaaaaaaaaaaaaaaaaaaaaaaaaaaaaaaaaaaaaaaaaaaaaaaaaaa

SEQ ID NO: 13186 - RNA, 5785 nt, synthetic construct
  source 1..5785: mol_type = other RNA
aggaaataagagagaaaagaagagtaagaagaaatataagagccaccatggcccctaagaagaagcgtaaagtgagccggatggaacgcctcgtctacgaggtgcggcagaagtgcagaaacatcgaggacatctgcatctcctgcggatctctgaacgtgaccctggagcacccactgttcatcggcggcatgtgccagaactgtaaaaactgttttctggagtgtgcctatcaatacgacgatgacggctaccagagctactgcaccatctgttgcggcggaagagaggtgctgatgtgtggaaataacaactgctgccggtgcttctgcgtggaatgcgtggacctgctggtgggccccggcgccgcccaggccgctattaaggaagatccttggaactgctacatgtgcggccacaagggcacatacggcctgctgagacggagagaggactggcctagcagactgcagatgttcttcgccaataaccacgaccaggagttcgacccccctaaggtgtaccctcccgtccccgccgagaagagaaagcccatccgggtcctgagcctgttcgatggcatcgccaccggtctgctggtgctgaaggacctgggcatccaggtggataggtacattgcctccgaggtgtgcgaggactccatcaccgtgggaatggtgcgtcatcagggcaagatcatgtacgtgggcgacgtgcggagcgtgacacagaagcatatccaggagtggggccctttcgacctggtgatcggcggcagcccttgcaatgacctgagcatcgtgaacccagcccggaagggcctgtacgagggaaccggcagactgttcttcgagttttacagactgctgcacgacgcccggcctaaggaaggcgacgaccggcccttcttttggctgttcgagaatgtggtggccatgggagtcagcgacaagcgggatattagccggttcctggagagcaaccccgtgatgatcgatgccaaggaagtgagcgccgcccaccgggccagatacttctggggcaatctgcctggcatgaacagacccctggccagcaccgtgaacgacaagctggagctgcaggagtgcctggagcacggccggatcgccaagttcagcaaggtgagaaccatcaccacccgaagcaacagcatcaaacaaggcaaggaccagcactttcctgtgttcatgaacgagaaggaggacatcctgtggtgtaccgagatggagagagtgttcgggttcccagtccactacacagatgtcagcaacatgtctagactggccagacagagactgctgggaagaagctggtccgtccctgtgatcagacacctgttcgcccctctgaaggagtacttcgcctgcgtgagcagcggcaacagcaacgccaacagccggggccccagcttctctagcggcctggtgccactgtccctgagagggagccacatgggccccatggagatctacaaaaccgtgagcgcctggaagcggcagcctgtgcgcgtgctgagcctgtttcggaatatcgataaagtcctgaaaagcctgggattcctggagagcggctctggctccggcggtggcaccctgaagtacgtggaggatgtgacaaacgtggtcagacgggatgtggagaagtggggccccttcgatctggtgtacggcagcacccaacccctgggcagctcttgtgaccggtgccctggctggtacatgtttcagttccaccggatcctgcagtacgccctgccgagacaggagtcccagcggccattcttttggattttcatggacaacttgctgctgaccgaggatgaccaggaaactaccactcggttcctgcagaccgaagccgtgaccctgcaggacgtgagaggccgggactaccagaacgccatgcgggtgtggtccaacatccctggactgaaaagcaagcacgcacctctgacccctaaagaagaggagtacctgcaggcccaggtgcggagcagaagcaagctggacgcccctaaggtggatctgctggtgaagaattgcctcctgcccctgagagagtacttcaagtatttcagccagaatagtctgcccctgggaggcagcggcggcggccagaccgacctggtgaccttcgacagcgtggccgtggagttcacccaggaggagtggaccctgctggaccccacccagaggaacctgtacagggacgtgatgctggagaactacaagaacctgagcagcgtgggctaccagctgttcaagcccagcctgatcagctggctggaggaggaggaggagctgagcaccctgcccagggtgctgcaggagtggaagatgtgcctgaagaccaagggcggcggcccaagcagcggcgcccctcctcccagcggcggcagcccagccggctccccaacctctaccgaggagggcacctctgagtccgccacccccgagagcggccctggcacctccaccgagcccagcgagggcagcgcacccggcagccctgccggcagccccacctccacagaggagggaaccagcaccgagcccagcgaaggcagcgccccaggcaccagcaccgagcctagtgagcaggagattaaacggatcaacaagatcagaagaagacttgtgaaagacagcaacaccaagaaggccggcaagacaggccccatgaaaaccctgctggttagagtgatgacacccgatctgagagagcggctggaaaacctgagaaagaagcctgaaaatatcccccagcccatcagcaatacatctagagccaacctgaataagctgctgaccgattacaccgaaatgaagaaggcgatcctgcatgtgtactgggaagagttccagaaggaccctgtgggcctgatgagccgggtggcccagcctgccagcaagaagatcgatcagaacaagctgaaacctgagatggacgagaagggcaacctgaccaccgccggctttgcctgctctcagtgtggccagcccctgttcgtgtacaagctggagcaggtgtctgagaagggcaaggcttacaccaactacttcggacggtgcaatgtggccgagcacgaaaagctgatcctgctggcccagctgaagcccgagaaggatagcgacgaagccgtgacatatagcctgggaaagtttgggcagagggccctggatttctacagcattcatgtgaccaaggagtccacccaccccgtgaagcccctggcccagatcgccggaaacagatacgcctccggacctgtgggaaaggccctgagcgacgcatgtatgggcacaatcgcctccttcctgtctaagtaccaggacatcatcatcgaacaccagaaggtggtgaagggcaaccagaagagactggagagcctgcgggagctggccggcaaggaaaacctggaataccctagcgtgaccctgccacctcagcctcacaccaaggagggcgttgatgcctacaacgaagtgatcgcccgggtgcgaatgtgggtgaacctgaacctgtggcagaagctgaagctaagcagagatgatgccaagcctctgctgagactgaagggattcccttcctttcctctggtcgagagacaggccaacgaagtggactggtgggacatggtgtgtaacgtgaagaagctgatcaacgagaaaaaggaggatggcaaggtgttttggcagaatctggctggctacaagagacaggaagccctgagaccatacctgagcagcgaggaagatcggaagaagggaaagaaattcgctcggtaccagctgggcgacctgctgctgcacctggaaaagaagcacggcgaggactggggaaaggtgtacgacgaggcctgggagcggattgacaagaaagtggaaggcctgagcaagcacatcaagctggaagaggaacggagaagcgaggacgcccagagcaaggccgccctgaccgactggctgcgggctaaggccagcttcgtgatcgagggcctgaaggaggccgacaaggacgagttctgcagatgcgagctgaagctgcagaagtggtacggggacctgcggggaaagcccttcgccatcgaagccgagaacagcatcctggacatcagcggcttcagcaagcagtacaactgtgccttcatctggcagaaggacggcgtgaagaagctgaacctgtacctgatcatcaactacttcaagggcggcaagctgcggttcaagaagatcaaacctgaagccttcgaagccaacagattctacaccgtgatcaacaaaaagagcggcgagatcgtgcccatggaggtgaacttcaacttcgacgaccccaacctgatcatcctgcctctggcctttggcaagagacagggcagagaattcatctggaacgacctgctgtccctggaaaccggcagcctgaagctggccaacggaagagtgatcgagaagacactgtacaacagaagaacccggcaggatgagcctgccctgttcgtggccctgaccttcgagcggcgggaggtcctggactcctccaatatcaaaccaatgaacctgatcggcgtggcaagaggcgaaaacatccccgccgtgatcgccctgaccgaccccgagggctgcccactgagccggtttaaggatagcctgggaaacccaacccacatcctgagaatcggcgagagctataaggagaagcagcggaccatccaggccaagaaggaggtggagcagcggagagccggcggctacagccggaagtacgccagcaaagccaagaatctggcagacgatatggtgagaaacaccgctagagatctgctgtactacgccgtgacccaggatgccatgctgatcttcgccaacctgagccggggcttcggccggcagggcaagcggaccttcatggccgagagacagtacacacggatggaggactggctgaccgccaagctggcctacgagggcctgagcaagacctacctgtccaagacactggcccagtacacctccaagacatgcagcaactgtgggtttaccatcaccagcgccgactacgacagggtgctggagaagctgaagaagacagcaacaggctggatgaccacaattaacggcaaggagctgaaggtggagggccagattacctactacaacagatacaagagacagaacgtagtcaaggacctgtccgtcgagctggatagactgagcgaagaatctgtgaacaacgacatctcctcctggacaaagggcagaagcggagaagctctgagcctcctgaagaaaagattctcccatagacccgtgcaggagaagttcgtgtgcctgaactgcggcttcgagacacacgcagccgagcaagccgccctgaacatcgccagatcctggctgttcctgcggagccaggagtacaagaaataccagacaaacaagacaaccggcaacaccgataagagagccttcgtcgagacctggcagtccttttaccggaagaagcttaaggaggtgtggaaacctgccgtgcggtctggcggatctggcggaggctccaccagccccaagaaaaagagaaaagtctaagctgccttctgcggggcttgccttctggccatgcccttcttctctcccttgcacctgtacctcttggtctttgaataaagcctgagtaggaaggctagcaaaaaaaaaaaaaaaaaaaaaaaaaaaaaaaaaaaaaaaaaaaaaaaaaaaaaaaaaaaaaaaaaaaaaaaaaaaaaaaa

SEQ ID NO: 13187 - RNA, 5785 nt, synthetic construct
  source 1..5785: mol_type = other RNA
aggaaataagagagaaaagaagagtaagaagaaatataagagccaccatggcccctaagaagaagcgtaaagtgagccggatggaacgcctcgtctacgaggtgcggcagaagtgcagaaacatcgaggacatctgcatctcctgcggatctctgaacgtgaccctggagcacccactgttcatcggcggcatgtgccagaactgtaaaaactgttttctggagtgtgcctatcaatacgacgatgacggctaccagagctactgcaccatctgttgcggcggaagagaggtgctgatgtgtggaaataacaactgctgccggtgcttctgcgtggaatgcgtggacctgctggtgggccccggcgccgcccaggccgctattaaggaagatccttggaactgctacatgtgcggccacaagggcacatacggcctgctgagacggagagaggactggcctagcagactgcagatgttcttcgccaataaccacgaccaggagttcgacccccctaaggtgtaccctcccgtccccgccgagaagagaaagcccatccgggtcctgagcctgttcgatggcatcgccaccggtctgctggtgctgaaggacctgggcatccaggtggataggtacattgcctccgaggtgtgcgaggactccatcaccgtgggaatggtgcgtcatcagggcaagatcatgtacgtgggcgacgtgcggagcgtgacacagaagcatatccaggagtggggccctttcgacctggtgatcggcggcagcccttgcaatgacctgagcatcgtgaacccagcccggaagggcctgtacgagggaaccggcagactgttcttcgagttttacagactgctgcacgacgcccggcctaaggaaggcgacgaccggcccttcttttggctgttcgagaatgtggtggccatgggagtcagcgacaagcgggatattagccggttcctggagagcaaccccgtgatgatcgatgccaaggaagtgagcgccgcccaccgggccagatacttctggggcaatctgcctggcatgaacagacccctggccagcaccgtgaacgacaagctggagctgcaggagtgcctggagcacggccggatcgccaagttcagcaaggtgagaaccatcaccacccgaagcaacagcatcaaacaaggcaaggaccagcactttcctgtgttcatgaacgagaaggaggacatcctgtggtgtaccgagatggagagagtgttcgggttcccagtccactacacagatgtcagcaacatgtctagactggccagacagagactgctgggaagaagctggtccgtccctgtgatcagacacctgttcgcccctctgaaggagtacttcgcctgcgtgagcagcggcaacagcaacgccaacagccggggccccagcttctctagcggcctggtgccactgtccctgagagggagccacatgggccccatggagatctacaaaaccgtgagcgcctggaagcggcagcctgtgcgcgtgctgagcctgtttcggaatatcgataaagtcctgaaaagcctgggattcctggagagcggctctggctccggcggtggcaccctgaagtacgtggaggatgtgacaaacgtggtcagacgggatgtggagaagtggggccccttcgatctggtgtacggcagcacccaacccctgggcagctcttgtgaccggtgccctggctggtacatgtttcagttccaccggatcctgcagtacgccctgccgagacaggagtcccagcggccattcttttggattttcatggacaacttgctgctgaccgaggatgaccaggaaactaccactcggttcctgcagaccgaagccgtgaccctgcaggacgtgagaggccgggactaccagaacgccatgcgggtgtggtccaacatccctggactgaaaagcaagcacgcacctctgacccctaaagaagaggagtacctgcaggcccaggtgcggagcagaagcaagctggacgcccctaaggtggatctgctggtgaagaattgcctcctgcccctgagagagtacttcaagtatttcagccagaatagtctgcccctgggaggcagcggcggcggcatggtgaccttcgaggacgtggccgtgcacttcaccaagaccgagtggaccggcctgagccccgcccagagggccctgtacaggagcgtgatgctggagaacttcggcaacctgaccgccctgggctaccccgtgcccaagcccgccctgatcagcctgctggagggcggcgacatggcctggggcctggaggcccaggacgacgcccccgccgagaggaccaagaacatctgcaaggtgatcggcggcccaagcagcggcgcccctcctcccagcggcggcagcccagccggctccccaacctctaccgaggagggcacctctgagtccgccacccccgagagcggccctggcacctccaccgagcccagcgagggcagcgcacccggcagccctgccggcagccccacctccacagaggagggaaccagcaccgagcccagcgaaggcagcgccccaggcaccagcaccgagcctagtgagcaggagattaaacggatcaacaagatcagaagaagacttgtgaaagacagcaacaccaagaaggccggcaagacaggccccatgaaaaccctgctggttagagtgatgacacccgatctgagagagcggctggaaaacctgagaaagaagcctgaaaatatcccccagcccatcagcaatacatctagagccaacctgaataagctgctgaccgattacaccgaaatgaagaaggcgatcctgcatgtgtactgggaagagttccagaaggaccctgtgggcctgatgagccgggtggcccagcctgccagcaagaagatcgatcagaacaagctgaaacctgagatggacgagaagggcaacctgaccaccgccggctttgcctgctctcagtgtggccagcccctgttcgtgtacaagctggagcaggtgtctgagaagggcaaggcttacaccaactacttcggacggtgcaatgtggccgagcacgaaaagctgatcctgctggcccagctgaagcccgagaaggatagcgacgaagccgtgacatatagcctgggaaagtttgggcagagggccctggatttctacagcattcatgtgaccaaggagtccacccaccccgtgaagcccctggcccagatcgccggaaacagatacgcctccggacctgtgggaaaggccctgagcgacgcatgtatgggcacaatcgcctccttcctgtctaagtaccaggacatcatcatcgaacaccagaaggtggtgaagggcaaccagaagagactggagagcctgcgggagctggccggcaaggaaaacctggaataccctagcgtgaccctgccacctcagcctcacaccaaggagggcgttgatgcctacaacgaagtgatcgcccgggtgcgaatgtgggtgaacctgaacctgtggcagaagctgaagctaagcagagatgatgccaagcctctgctgagactgaagggattcccttcctttcctctggtcgagagacaggccaacgaagtggactggtgggacatggtgtgtaacgtgaagaagctgatcaacgagaaaaaggaggatggcaaggtgttttggcagaatctggctggctacaagagacaggaagccctgagaccatacctgagcagcgaggaagatcggaagaagggaaagaaattcgctcggtaccagctgggcgacctgctgctgcacctggaaaagaagcacggcgaggactggggaaaggtgtacgacgaggcctgggagcggattgacaagaaagtggaaggcctgagcaagcacatcaagctggaagaggaacggagaagcgaggacgcccagagcaaggccgccctgaccgactggctgcgggctaaggccagcttcgtgatcgagggcctgaaggaggccgacaaggacgagttctgcagatgcgagctgaagctgcagaagtggtacggggacctgcggggaaagcccttcgccatcgaagccgagaacagcatcctggacatcagcggcttcagcaagcagtacaactgtgccttcatctggcagaaggacggcgtgaagaagctgaacctgtacctgatcatcaactacttcaagggcggcaagctgcggttcaagaagatcaaacctgaagccttcgaagccaacagattctacaccgtgatcaacaaaaagagcggcgagatcgtgcccatggaggtgaacttcaacttcgacgaccccaacctgatcatcctgcctctggcctttggcaagagacagggcagagaattcatctggaacgacctgctgtccctggaaaccggcagcctgaagctggccaacggaagagtgatcgagaagacactgtacaacagaagaacccggcaggatgagcctgccctgttcgtggccctgaccttcgagcggcgggaggtcctggactcctccaatatcaaaccaatgaacctgatcggcgtggcaagaggcgaaaacatccccgccgtgatcgccctgaccgaccccgagggctgcccactgagccggtttaaggatagcctgggaaacccaacccacatcctgagaatcggcgagagctataaggagaagcagcggaccatccaggccaagaaggaggtggagcagcggagagccggcggctacagccggaagtacgccagcaaagccaagaatctggcagacgatatggtgagaaacaccgctagagatctgctgtactacgccgtgacccaggatgccatgctgatcttcgccaacctgagccggggcttcggccggcagggcaagcggaccttcatggccgagagacagtacacacggatggaggactggctgaccgccaagctggcctacgagggcctgagcaagacctacctgtccaagacactggcccagtacacctccaagacatgcagcaactgtgggtttaccatcaccagcgccgactacgacagggtgctggagaagctgaagaagacagcaacaggctggatgaccacaattaacggcaaggagctgaaggtggagggccagattacctactacaacagatacaagagacagaacgtagtcaaggacctgtccgtcgagctggatagactgagcgaagaatctgtgaacaacgacatctcctcctggacaaagggcagaagcggagaagctctgagcctcctgaagaaaagattctcccatagacccgtgcaggagaagttcgtgtgcctgaactgcggcttcgagacacacgcagccgagcaagccgccctgaacatcgccagatcctggctgttcctgcggagccaggagtacaagaaataccagacaaacaagacaaccggcaacaccgataagagagccttcgtcgagacctggcagtccttttaccggaagaagcttaaggaggtgtggaaacctgccgtgcggtctggcggatctggcggaggctccaccagccccaagaaaaagagaaaagtctaagctgccttctgcggggcttgccttctggccatgcccttcttctctcccttgcacctgtacctcttggtctttgaataaagcctgagtaggaaggctagcaaaaaaaaaaaaaaaaaaaaaaaaaaaaaaaaaaaaaaaaaaaaaaaaaaaaaaaaaaaaaaaaaaaaaaaaaaaaaaaa

SEQ ID NO: 13188 - RNA, 5785 nt, synthetic construct
  source 1..5785: mol_type = other RNA
aggaaataagagagaaaagaagagtaagaagaaatataagagccaccatggcccctaagaagaagcgtaaagtgagccggatggaacgcctcgtctacgaggtgcggcagaagtgcagaaacatcgaggacatctgcatctcctgcggatctctgaacgtgaccctggagcacccactgttcatcggcggcatgtgccagaactgtaaaaactgttttctggagtgtgcctatcaatacgacgatgacggctaccagagctactgcaccatctgttgcggcggaagagaggtgctgatgtgtggaaataacaactgctgccggtgcttctgcgtggaatgcgtggacctgctggtgggccccggcgccgcccaggccgctattaaggaagatccttggaactgctacatgtgcggccacaagggcacatacggcctgctgagacggagagaggactggcctagcagactgcagatgttcttcgccaataaccacgaccaggagttcgacccccctaaggtgtaccctcccgtccccgccgagaagagaaagcccatccgggtcctgagcctgttcgatggcatcgccaccggtctgctggtgctgaaggacctgggcatccaggtggataggtacattgcctccgaggtgtgcgaggactccatcaccgtgggaatggtgcgtcatcagggcaagatcatgtacgtgggcgacgtgcggagcgtgacacagaagcatatccaggagtggggccctttcgacctggtgatcggcggcagcccttgcaatgacctgagcatcgtgaacccagcccggaagggcctgtacgagggaaccggcagactgttcttcgagttttacagactgctgcacgacgcccggcctaaggaaggcgacgaccggcccttcttttggctgttcgagaatgtggtggccatgggagtcagcgacaagcgggatattagccggttcctggagagcaaccccgtgatgatcgatgccaaggaagtgagcgccgcccaccgggccagatacttctggggcaatctgcctggcatgaacagacccctggccagcaccgtgaacgacaagctggagctgcaggagtgcctggagcacggccggatcgccaagttcagcaaggtgagaaccatcaccacccgaagcaacagcatcaaacaaggcaaggaccagcactttcctgtgttcatgaacgagaaggaggacatcctgtggtgtaccgagatggagagagtgttcgggttcccagtccactacacagatgtcagcaacatgtctagactggccagacagagactgctgggaagaagctggtccgtccctgtgatcagacacctgttcgcccctctgaaggagtacttcgcctgcgtgagcagcggcaacagcaacgccaacagccggggccccagcttctctagcggcctggtgccactgtccctgagagggagccacatgggccccatggagatctacaaaaccgtgagcgcctggaagcggcagcctgtgcgcgtgctgagcctgtttcggaatatcgataaagtcctgaaaagcctgggattcctggagagcggctctggctccggcggtggcaccctgaagtacgtggaggatgtgacaaacgtggtcagacgggatgtggagaagtggggccccttcgatctggtgtacggcagcacccaacccctgggcagctcttgtgaccggtgccctggctggtacatgtttcagttccaccggatcctgcagtacgccctgccgagacaggagtcccagcggccattcttttggattttcatggacaacttgctgctgaccgaggatgaccaggaaactaccactcggttcctgcagaccgaagccgtgaccctgcaggacgtgagaggccgggactaccagaacgccatgcgggtgtggtccaacatccctggactgaaaagcaagcacgcacctctgacccctaaagaagaggagtacctgcaggcccaggtgcggagcagaagcaagctggacgcccctaaggtggatctgctggtgaagaattgcctcctgcccctgagagagtacttcaagtatttcagccagaatagtctgcccctgggaggcagcggcggcggcagccaggtgagcgtgaccttcgaggacgtggccgtgctgttcaccagggacgagtggaggaagctggcccccagccagaggaacctgtaccaggacgtgatgctggagaactacagcaacctggtgagcctgggcctgcccttcagcaagcccgaggtgatcagcctgctgcagcagggcgaggacccctggaaggtggagaaggagagccccggcggcagcagcctgggcgagtggagcagcggcggcccaagcagcggcgcccctcctcccagcggcggcagcccagccggctccccaacctctaccgaggagggcacctctgagtccgccacccccgagagcggccctggcacctccaccgagcccagcgagggcagcgcacccggcagccctgccggcagccccacctccacagaggagggaaccagcaccgagcccagcgaaggcagcgccccaggcaccagcaccgagcctagtgagcaggagattaaacggatcaacaagatcagaagaagacttgtgaaagacagcaacaccaagaaggccggcaagacaggccccatgaaaaccctgctggttagagtgatgacacccgatctgagagagcggctggaaaacctgagaaagaagcctgaaaatatcccccagcccatcagcaatacatctagagccaacctgaataagctgctgaccgattacaccgaaatgaagaaggcgatcctgcatgtgtactgggaagagttccagaaggaccctgtgggcctgatgagccgggtggcccagcctgccagcaagaagatcgatcagaacaagctgaaacctgagatggacgagaagggcaacctgaccaccgccggctttgcctgctctcagtgtggccagcccctgttcgtgtacaagctggagcaggtgtctgagaagggcaaggcttacaccaactacttcggacggtgcaatgtggccgagcacgaaaagctgatcctgctggcccagctgaagcccgagaaggatagcgacgaagccgtgacatatagcctgggaaagtttgggcagagggccctggatttctacagcattcatgtgaccaaggagtccacccaccccgtgaagcccctggcccagatcgccggaaacagatacgcctccggacctgtgggaaaggccctgagcgacgcatgtatgggcacaatcgcctccttcctgtctaagtaccaggacatcatcatcgaacaccagaaggtggtgaagggcaaccagaagagactggagagcctgcgggagctggccggcaaggaaaacctggaataccctagcgtgaccctgccacctcagcctcacaccaaggagggcgttgatgcctacaacgaagtgatcgcccgggtgcgaatgtgggtgaacctgaacctgtggcagaagctgaagctaagcagagatgatgccaagcctctgctgagactgaagggattcccttcctttcctctggtcgagagacaggccaacgaagtggactggtgggacatggtgtgtaacgtgaagaagctgatcaacgagaaaaaggaggatggcaaggtgttttggcagaatctggctggctacaagagacaggaagccctgagaccatacctgagcagcgaggaagatcggaagaagggaaagaaattcgctcggtaccagctgggcgacctgctgctgcacctggaaaagaagcacggcgaggactggggaaaggtgtacgacgaggcctgggagcggattgacaagaaagtggaaggcctgagcaagcacatcaagctggaagaggaacggagaagcgaggacgcccagagcaaggccgccctgaccgactggctgcgggctaaggccagcttcgtgatcgagggcctgaaggaggccgacaaggacgagttctgcagatgcgagctgaagctgcagaagtggtacggggacctgcggggaaagcccttcgccatcgaagccgagaacagcatcctggacatcagcggcttcagcaagcagtacaactgtgccttcatctggcagaaggacggcgtgaagaagctgaacctgtacctgatcatcaactacttcaagggcggcaagctgcggttcaagaagatcaaacctgaagccttcgaagccaacagattctacaccgtgatcaacaaaaagagcggcgagatcgtgcccatggaggtgaacttcaacttcgacgaccccaacctgatcatcctgcctctggcctttggcaagagacagggcagagaattcatctggaacgacctgctgtccctggaaaccggcagcctgaagctggccaacggaagagtgatcgagaagacactgtacaacagaagaacccggcaggatgagcctgccctgttcgtggccctgaccttcgagcggcgggaggtcctggactcctccaatatcaaaccaatgaacctgatcggcgtggcaagaggcgaaaacatccccgccgtgatcgccctgaccgaccccgagggctgcccactgagccggtttaaggatagcctgggaaacccaacccacatcctgagaatcggcgagagctataaggagaagcagcggaccatccaggccaagaaggaggtggagcagcggagagccggcggctacagccggaagtacgccagcaaagccaagaatctggcagacgatatggtgagaaacaccgctagagatctgctgtactacgccgtgacccaggatgccatgctgatcttcgccaacctgagccggggcttcggccggcagggcaagcggaccttcatggccgagagacagtacacacggatggaggactggctgaccgccaagctggcctacgagggcctgagcaagacctacctgtccaagacactggcccagtacacctccaagacatgcagcaactgtgggtttaccatcaccagcgccgactacgacagggtgctggagaagctgaagaagacagcaacaggctggatgaccacaattaacggcaaggagctgaaggtggagggccagattacctactacaacagatacaagagacagaacgtagtcaaggacctgtccgtcgagctggatagactgagcgaagaatctgtgaacaacgacatctcctcctggacaaagggcagaagcggagaagctctgagcctcctgaagaaaagattctcccatagacccgtgcaggagaagttcgtgtgcctgaactgcggcttcgagacacacgcagccgagcaagccgccctgaacatcgccagatcctggctgttcctgcggagccaggagtacaagaaataccagacaaacaagacaaccggcaacaccgataagagagccttcgtcgagacctggcagtccttttaccggaagaagcttaaggaggtgtggaaacctgccgtgcggtctggcggatctggcggaggctccaccagccccaagaaaaagagaaaagtctaagctgccttctgcggggcttgccttctggccatgcccttcttctctcccttgcacctgtacctcttggtctttgaataaagcctgagtaggaaggctagcaaaaaaaaaaaaaaaaaaaaaaaaaaaaaaaaaaaaaaaaaaaaaaaaaaaaaaaaaaaaaaaaaaaaaaaaaaaaaaaa

SEQ ID NO: 13189 - RNA, 5785 nt, synthetic construct
  source 1..5785: mol_type = other RNA
aggaaataagagagaaaagaagagtaagaagaaatataagagccaccatggcccctaagaagaagcgtaaagtgagccggatggaacgcctcgtctacgaggtgcggcagaagtgcagaaacatcgaggacatctgcatctcctgcggatctctgaacgtgaccctggagcacccactgttcatcggcggcatgtgccagaactgtaaaaactgttttctggagtgtgcctatcaatacgacgatgacggctaccagagctactgcaccatctgttgcggcggaagagaggtgctgatgtgtggaaataacaactgctgccggtgcttctgcgtggaatgcgtggacctgctggtgggccccggcgccgcccaggccgctattaaggaagatccttggaactgctacatgtgcggccacaagggcacatacggcctgctgagacggagagaggactggcctagcagactgcagatgttcttcgccaataaccacgaccaggagttcgacccccctaaggtgtaccctcccgtccccgccgagaagagaaagcccatccgggtcctgagcctgttcgatggcatcgccaccggtctgctggtgctgaaggacctgggcatccaggtggataggtacattgcctccgaggtgtgcgaggactccatcaccgtgggaatggtgcgtcatcagggcaagatcatgtacgtgggcgacgtgcggagcgtgacacagaagcatatccaggagtggggccctttcgacctggtgatcggcggcagcccttgcaatgacctgagcatcgtgaacccagcccggaagggcctgtacgagggaaccggcagactgttcttcgagttttacagactgctgcacgacgcccggcctaaggaaggcgacgaccggcccttcttttggctgttcgagaatgtggtggccatgggagtcagcgacaagcgggatattagccggttcctggagagcaaccccgtgatgatcgatgccaaggaagtgagcgccgcccaccgggccagatacttctggggcaatctgcctggcatgaacagacccctggccagcaccgtgaacgacaagctggagctgcaggagtgcctggagcacggccggatcgccaagttcagcaaggtgagaaccatcaccacccgaagcaacagcatcaaacaaggcaaggaccagcactttcctgtgttcatgaacgagaaggaggacatcctgtggtgtaccgagatggagagagtgttcgggttcccagtccactacacagatgtcagcaacatgtctagactggccagacagagactgctgggaagaagctggtccgtccctgtgatcagacacctgttcgcccctctgaaggagtacttcgcctgcgtgagcagcggcaacagcaacgccaacagccggggccccagcttctctagcggcctggtgccactgtccctgagagggagccacatgggccccatggagatctacaaaaccgtgagcgcctggaagcggcagcctgtgcgcgtgctgagcctgtttcggaatatcgataaagtcctgaaaagcctgggattcctggagagcggctctggctccggcggtggcaccctgaagtacgtggaggatgtgacaaacgtggtcagacgggatgtggagaagtggggccccttcgatctggtgtacggcagcacccaacccctgggcagctcttgtgaccggtgccctggctggtacatgtttcagttccaccggatcctgcagtacgccctgccgagacaggagtcccagcggccattcttttggattttcatggacaacttgctgctgaccgaggatgaccaggaaactaccactcggttcctgcagaccgaagccgtgaccctgcaggacgtgagaggccgggactaccagaacgccatgcgggtgtggtccaacatccctggactgaaaagcaagcacgcacctctgacccctaaagaagaggagtacctgcaggcccaggtgcggagcagaagcaagctggacgcccctaaggtggatctgctggtgaagaattgcctcctgcccctgagagagtacttcaagtatttcagccagaatagtctgcccctgggaggcagcggcggcggcaggcaggagagggtgaccttcggcgacgtggccgtggacttcaccctggacgagtgggtgtgcctggacagcgcccagaaggccctgtacagggacgtgatgctggagaactacggccacctggtgtgcctgggcctggccggcgccaagcccgccgtgatccagaggctggagaggggcgaggccgcctggtgccccggcgtgcccggcagcaggctgcccgactgggagaccaggctggagggcggcccaagcagcggcgcccctcctcccagcggcggcagcccagccggctccccaacctctaccgaggagggcacctctgagtccgccacccccgagagcggccctggcacctccaccgagcccagcgagggcagcgcacccggcagccctgccggcagccccacctccacagaggagggaaccagcaccgagcccagcgaaggcagcgccccaggcaccagcaccgagcctagtgagcaggagattaaacggatcaacaagatcagaagaagacttgtgaaagacagcaacaccaagaaggccggcaagacaggccccatgaaaaccctgctggttagagtgatgacacccgatctgagagagcggctggaaaacctgagaaagaagcctgaaaatatcccccagcccatcagcaatacatctagagccaacctgaataagctgctgaccgattacaccgaaatgaagaaggcgatcctgcatgtgtactgggaagagttccagaaggaccctgtgggcctgatgagccgggtggcccagcctgccagcaagaagatcgatcagaacaagctgaaacctgagatggacgagaagggcaacctgaccaccgccggctttgcctgctctcagtgtggccagcccctgttcgtgtacaagctggagcaggtgtctgagaagggcaaggcttacaccaactacttcggacggtgcaatgtggccgagcacgaaaagctgatcctgctggcccagctgaagcccgagaaggatagcgacgaagccgtgacatatagcctgggaaagtttgggcagagggccctggatttctacagcattcatgtgaccaaggagtccacccaccccgtgaagcccctggcccagatcgccggaaacagatacgcctccggacctgtgggaaaggccctgagcgacgcatgtatgggcacaatcgcctccttcctgtctaagtaccaggacatcatcatcgaacaccagaaggtggtgaagggcaaccagaagagactggagagcctgcgggagctggccggcaaggaaaacctggaataccctagcgtgaccctgccacctcagcctcacaccaaggagggcgttgatgcctacaacgaagtgatcgcccgggtgcgaatgtgggtgaacctgaacctgtggcagaagctgaagctaagcagagatgatgccaagcctctgctgagactgaagggattcccttcctttcctctggtcgagagacaggccaacgaagtggactggtgggacatggtgtgtaacgtgaagaagctgatcaacgagaaaaaggaggatggcaaggtgttttggcagaatctggctggctacaagagacaggaagccctgagaccatacctgagcagcgaggaagatcggaagaagggaaagaaattcgctcggtaccagctgggcgacctgctgctgcacctggaaaagaagcacggcgaggactggggaaaggtgtacgacgaggcctgggagcggattgacaagaaagtggaaggcctgagcaagcacatcaagctggaagaggaacggagaagcgaggacgcccagagcaaggccgccctgaccgactggctgcgggctaaggccagcttcgtgatcgagggcctgaaggaggccgacaaggacgagttctgcagatgcgagctgaagctgcagaagtggtacggggacctgcggggaaagcccttcgccatcgaagccgagaacagcatcctggacatcagcggcttcagcaagcagtacaactgtgccttcatctggcagaaggacggcgtgaagaagctgaacctgtacctgatcatcaactacttcaagggcggcaagctgcggttcaagaagatcaaacctgaagccttcgaagccaacagattctacaccgtgatcaacaaaaagagcggcgagatcgtgcccatggaggtgaacttcaacttcgacgaccccaacctgatcatcctgcctctggcctttggcaagagacagggcagagaattcatctggaacgacctgctgtccctggaaaccggcagcctgaagctggccaacggaagagtgatcgagaagacactgtacaacagaagaacccggcaggatgagcctgccctgttcgtggccctgaccttcgagcggcgggaggtcctggactcctccaatatcaaaccaatgaacctgatcggcgtggcaagaggcgaaaacatccccgccgtgatcgccctgaccgaccccgagggctgcccactgagccggtttaaggatagcctgggaaacccaacccacatcctgagaatcggcgagagctataaggagaagcagcggaccatccaggccaagaaggaggtggagcagcggagagccggcggctacagccggaagtacgccagcaaagccaagaatctggcagacgatatggtgagaaacaccgctagagatctgctgtactacgccgtgacccaggatgccatgctgatcttcgccaacctgagccggggcttcggccggcagggcaagcggaccttcatggccgagagacagtacacacggatggaggactggctgaccgccaagctggcctacgagggcctgagcaagacctacctgtccaagacactggcccagtacacctccaagacatgcagcaactgtgggtttaccatcaccagcgccgactacgacagggtgctggagaagctgaagaagacagcaacaggctggatgaccacaattaacggcaaggagctgaaggtggagggccagattacctactacaacagatacaagagacagaacgtagtcaaggacctgtccgtcgagctggatagactgagcgaagaatctgtgaacaacgacatctcctcctggacaaagggcagaagcggagaagctctgagcctcctgaagaaaagattctcccatagacccgtgcaggagaagttcgtgtgcctgaactgcggcttcgagacacacgcagccgagcaagccgccctgaacatcgccagatcctggctgttcctgcggagccaggagtacaagaaataccagacaaacaagacaaccggcaacaccgataagagagccttcgtcgagacctggcagtccttttaccggaagaagcttaaggaggtgtggaaacctgccgtgcggtctggcggatctggcggaggctccaccagccccaagaaaaagagaaaagtctaagctgccttctgcggggcttgccttctggccatgcccttcttctctcccttgcacctgtacctcttggtctttgaataaagcctgagtaggaaggctagcaaaaaaaaaaaaaaaaaaaaaaaaaaaaaaaaaaaaaaaaaaaaaaaaaaaaaaaaaaaaaaaaaaaaaaaaaaaaaaaa

SEQ ID NO: 13190 - RNA, 5785 nt, synthetic construct
  source 1..5785: mol_type = other RNA
aggaaataagagagaaaagaagagtaagaagaaatataagagccaccatggcccctaagaagaagcgtaaagtgagccggatggaacgcctcgtctacgaggtgcggcagaagtgcagaaacatcgaggacatctgcatctcctgcggatctctgaacgtgaccctggagcacccactgttcatcggcggcatgtgccagaactgtaaaaactgttttctggagtgtgcctatcaatacgacgatgacggctaccagagctactgcaccatctgttgcggcggaagagaggtgctgatgtgtggaaataacaactgctgccggtgcttctgcgtggaatgcgtggacctgctggtgggccccggcgccgcccaggccgctattaaggaagatccttggaactgctacatgtgcggccacaagggcacatacggcctgctgagacggagagaggactggcctagcagactgcagatgttcttcgccaataaccacgaccaggagttcgacccccctaaggtgtaccctcccgtccccgccgagaagagaaagcccatccgggtcctgagcctgttcgatggcatcgccaccggtctgctggtgctgaaggacctgggcatccaggtggataggtacattgcctccgaggtgtgcgaggactccatcaccgtgggaatggtgcgtcatcagggcaagatcatgtacgtgggcgacgtgcggagcgtgacacagaagcatatccaggagtggggccctttcgacctggtgatcggcggcagcccttgcaatgacctgagcatcgtgaacccagcccggaagggcctgtacgagggaaccggcagactgttcttcgagttttacagactgctgcacgacgcccggcctaaggaaggcgacgaccggcccttcttttggctgttcgagaatgtggtggccatgggagtcagcgacaagcgggatattagccggttcctggagagcaaccccgtgatgatcgatgccaaggaagtgagcgccgcccaccgggccagatacttctggggcaatctgcctggcatgaacagacccctggccagcaccgtgaacgacaagctggagctgcaggagtgcctggagcacggccggatcgccaagttcagcaaggtgagaaccatcaccacccgaagcaacagcatcaaacaaggcaaggaccagcactttcctgtgttcatgaacgagaaggaggacatcctgtggtgtaccgagatggagagagtgttcgggttcccagtccactacacagatgtcagcaacatgtctagactggccagacagagactgctgggaagaagctggtccgtccctgtgatcagacacctgttcgcccctctgaaggagtacttcgcctgcgtgagcagcggcaacagcaacgccaacagccggggccccagcttctctagcggcctggtgccactgtccctgagagggagccacatgggccccatggagatctacaaaaccgtgagcgcctggaagcggcagcctgtgcgcgtgctgagcctgtttcggaatatcgataaagtcctgaaaagcctgggattcctggagagcggctctggctccggcggtggcaccctgaagtacgtggaggatgtgacaaacgtggtcagacgggatgtggagaagtggggccccttcgatctggtgtacggcagcacccaacccctgggcagctcttgtgaccggtgccctggctggtacatgtttcagttccaccggatcctgcagtacgccctgccgagacaggagtcccagcggccattcttttggattttcatggacaacttgctgctgaccgaggatgaccaggaaactaccactcggttcctgcagaccgaagccgtgaccctgcaggacgtgagaggccgggactaccagaacgccatgcgggtgtggtccaacatccctggactgaaaagcaagcacgcacctctgacccctaaagaagaggagtacctgcaggcccaggtgcggagcagaagcaagctggacgcccctaaggtggatctgctggtgaagaattgcctcctgcccctgagagagtacttcaagtatttcagccagaatagtctgcccctgggaggcagcggcggcggcagcgccgccagcgtgaccttcagggacgtggccgtggacttcagcagggaggagtggagcaggctggacgccgcccagagggccctgtacagggacgtgatgtgggagacctacgagaacctggtgagcaccggcatccccgtgagcaggctggacgtgatcagcctgctggccaagcaggaggcccagtggacccccgaggaggtgcccggctggaccagccccgacagcttcagcgaggagggcggcccaagcagcggcgcccctcctcccagcggcggcagcccagccggctccccaacctctaccgaggagggcacctctgagtccgccacccccgagagcggccctggcacctccaccgagcccagcgagggcagcgcacccggcagccctgccggcagccccacctccacagaggagggaaccagcaccgagcccagcgaaggcagcgccccaggcaccagcaccgagcctagtgagcaggagattaaacggatcaacaagatcagaagaagacttgtgaaagacagcaacaccaagaaggccggcaagacaggccccatgaaaaccctgctggttagagtgatgacacccgatctgagagagcggctggaaaacctgagaaagaagcctgaaaatatcccccagcccatcagcaatacatctagagccaacctgaataagctgctgaccgattacaccgaaatgaagaaggcgatcctgcatgtgtactgggaagagttccagaaggaccctgtgggcctgatgagccgggtggcccagcctgccagcaagaagatcgatcagaacaagctgaaacctgagatggacgagaagggcaacctgaccaccgccggctttgcctgctctcagtgtggccagcccctgttcgtgtacaagctggagcaggtgtctgagaagggcaaggcttacaccaactacttcggacggtgcaatgtggccgagcacgaaaagctgatcctgctggcccagctgaagcccgagaaggatagcgacgaagccgtgacatatagcctgggaaagtttgggcagagggccctggatttctacagcattcatgtgaccaaggagtccacccaccccgtgaagcccctggcccagatcgccggaaacagatacgcctccggacctgtgggaaaggccctgagcgacgcatgtatgggcacaatcgcctccttcctgtctaagtaccaggacatcatcatcgaacaccagaaggtggtgaagggcaaccagaagagactggagagcctgcgggagctggccggcaaggaaaacctggaataccctagcgtgaccctgccacctcagcctcacaccaaggagggcgttgatgcctacaacgaagtgatcgcccgggtgcgaatgtgggtgaacctgaacctgtggcagaagctgaagctaagcagagatgatgccaagcctctgctgagactgaagggattcccttcctttcctctggtcgagagacaggccaacgaagtggactggtgggacatggtgtgtaacgtgaagaagctgatcaacgagaaaaaggaggatggcaaggtgttttggcagaatctggctggctacaagagacaggaagccctgagaccatacctgagcagcgaggaagatcggaagaagggaaagaaattcgctcggtaccagctgggcgacctgctgctgcacctggaaaagaagcacggcgaggactggggaaaggtgtacgacgaggcctgggagcggattgacaagaaagtggaaggcctgagcaagcacatcaagctggaagaggaacggagaagcgaggacgcccagagcaaggccgccctgaccgactggctgcgggctaaggccagcttcgtgatcgagggcctgaaggaggccgacaaggacgagttctgcagatgcgagctgaagctgcagaagtggtacggggacctgcggggaaagcccttcgccatcgaagccgagaacagcatcctggacatcagcggcttcagcaagcagtacaactgtgccttcatctggcagaaggacggcgtgaagaagctgaacctgtacctgatcatcaactacttcaagggcggcaagctgcggttcaagaagatcaaacctgaagccttcgaagccaacagattctacaccgtgatcaacaaaaagagcggcgagatcgtgcccatggaggtgaacttcaacttcgacgaccccaacctgatcatcctgcctctggcctttggcaagagacagggcagagaattcatctggaacgacctgctgtccctggaaaccggcagcctgaagctggccaacggaagagtgatcgagaagacactgtacaacagaagaacccggcaggatgagcctgccctgttcgtggccctgaccttcgagcggcgggaggtcctggactcctccaatatcaaaccaatgaacctgatcggcgtggcaagaggcgaaaacatccccgccgtgatcgccctgaccgaccccgagggctgcccactgagccggtttaaggatagcctgggaaacccaacccacatcctgagaatcggcgagagctataaggagaagcagcggaccatccaggccaagaaggaggtggagcagcggagagccggcggctacagccggaagtacgccagcaaagccaagaatctggcagacgatatggtgagaaacaccgctagagatctgctgtactacgccgtgacccaggatgccatgctgatcttcgccaacctgagccggggcttcggccggcagggcaagcggaccttcatggccgagagacagtacacacggatggaggactggctgaccgccaagctggcctacgagggcctgagcaagacctacctgtccaagacactggcccagtacacctccaagacatgcagcaactgtgggtttaccatcaccagcgccgactacgacagggtgctggagaagctgaagaagacagcaacaggctggatgaccacaattaacggcaaggagctgaaggtggagggccagattacctactacaacagatacaagagacagaacgtagtcaaggacctgtccgtcgagctggatagactgagcgaagaatctgtgaacaacgacatctcctcctggacaaagggcagaagcggagaagctctgagcctcctgaagaaaagattctcccatagacccgtgcaggagaagttcgtgtgcctgaactgcggcttcgagacacacgcagccgagcaagccgccctgaacatcgccagatcctggctgttcctgcggagccaggagtacaagaaataccagacaaacaagacaaccggcaacaccgataagagagccttcgtcgagacctggcagtccttttaccggaagaagcttaaggaggtgtggaaacctgccgtgcggtctggcggatctggcggaggctccaccagccccaagaaaaagagaaaagtctaagctgccttctgcggggcttgccttctggccatgcccttcttctctcccttgcacctgtacctcttggtctttgaataaagcctgagtaggaaggctagcaaaaaaaaaaaaaaaaaaaaaaaaaaaaaaaaaaaaaaaaaaaaaaaaaaaaaaaaaaaaaaaaaaaaaaaaaaaaaaaa

SEQ ID NO: 13191 - RNA, 5785 nt, synthetic construct
  source 1..5785: mol_type = other RNA
aggaaataagagagaaaagaagagtaagaagaaatataagagccaccatggcccctaagaagaagcgtaaagtgagccggatggaacgcctcgtctacgaggtgcggcagaagtgcagaaacatcgaggacatctgcatctcctgcggatctctgaacgtgaccctggagcacccactgttcatcggcggcatgtgccagaactgtaaaaactgttttctggagtgtgcctatcaatacgacgatgacggctaccagagctactgcaccatctgttgcggcggaagagaggtgctgatgtgtggaaataacaactgctgccggtgcttctgcgtggaatgcgtggacctgctggtgggccccggcgccgcccaggccgctattaaggaagatccttggaactgctacatgtgcggccacaagggcacatacggcctgctgagacggagagaggactggcctagcagactgcagatgttcttcgccaataaccacgaccaggagttcgacccccctaaggtgtaccctcccgtccccgccgagaagagaaagcccatccgggtcctgagcctgttcgatggcatcgccaccggtctgctggtgctgaaggacctgggcatccaggtggataggtacattgcctccgaggtgtgcgaggactccatcaccgtgggaatggtgcgtcatcagggcaagatcatgtacgtgggcgacgtgcggagcgtgacacagaagcatatccaggagtggggccctttcgacctggtgatcggcggcagcccttgcaatgacctgagcatcgtgaacccagcccggaagggcctgtacgagggaaccggcagactgttcttcgagttttacagactgctgcacgacgcccggcctaaggaaggcgacgaccggcccttcttttggctgttcgagaatgtggtggccatgggagtcagcgacaagcgggatattagccggttcctggagagcaaccccgtgatgatcgatgccaaggaagtgagcgccgcccaccgggccagatacttctggggcaatctgcctggcatgaacagacccctggccagcaccgtgaacgacaagctggagctgcaggagtgcctggagcacggccggatcgccaagttcagcaaggtgagaaccatcaccacccgaagcaacagcatcaaacaaggcaaggaccagcactttcctgtgttcatgaacgagaaggaggacatcctgtggtgtaccgagatggagagagtgttcgggttcccagtccactacacagatgtcagcaacatgtctagactggccagacagagactgctgggaagaagctggtccgtccctgtgatcagacacctgttcgcccctctgaaggagtacttcgcctgcgtgagcagcggcaacagcaacgccaacagccggggccccagcttctctagcggcctggtgccactgtccctgagagggagccacatgggccccatggagatctacaaaaccgtgagcgcctggaagcggcagcctgtgcgcgtgctgagcctgtttcggaatatcgataaagtcctgaaaagcctgggattcctggagagcggctctggctccggcggtggcaccctgaagtacgtggaggatgtgacaaacgtggtcagacgggatgtggagaagtggggccccttcgatctggtgtacggcagcacccaacccctgggcagctcttgtgaccggtgccctggctggtacatgtttcagttccaccggatcctgcagtacgccctgccgagacaggagtcccagcggccattcttttggattttcatggacaacttgctgctgaccgaggatgaccaggaaactaccactcggttcctgcagaccgaagccgtgaccctgcaggacgtgagaggccgggactaccagaacgccatgcgggtgtggtccaacatccctggactgaaaagcaagcacgcacctctgacccctaaagaagaggagtacctgcaggcccaggtgcggagcagaagcaagctggacgcccctaaggtggatctgctggtgaagaattgcctcctgcccctgagagagtacttcaagtatttcagccagaatagtctgcccctgggaggcagcggcggcggcccccaggtgctggtgagcttcgaggacgtggccgtgttcctgagcagggaggagtggggctgcctgggccccgcccagaggggcctgtacagggacgtgatgctggagacctacaggaacctgatcagcctgggcttccaggacagcaagcccgacgtgatcagcaagctggaggagggcgaggagccctgggccccctacagccccaggatcgaggagggctggatccagagccacggcagcggcggcccaagcagcggcgcccctcctcccagcggcggcagcccagccggctccccaacctctaccgaggagggcacctctgagtccgccacccccgagagcggccctggcacctccaccgagcccagcgagggcagcgcacccggcagccctgccggcagccccacctccacagaggagggaaccagcaccgagcccagcgaaggcagcgccccaggcaccagcaccgagcctagtgagcaggagattaaacggatcaacaagatcagaagaagacttgtgaaagacagcaacaccaagaaggccggcaagacaggccccatgaaaaccctgctggttagagtgatgacacccgatctgagagagcggctggaaaacctgagaaagaagcctgaaaatatcccccagcccatcagcaatacatctagagccaacctgaataagctgctgaccgattacaccgaaatgaagaaggcgatcctgcatgtgtactgggaagagttccagaaggaccctgtgggcctgatgagccgggtggcccagcctgccagcaagaagatcgatcagaacaagctgaaacctgagatggacgagaagggcaacctgaccaccgccggctttgcctgctctcagtgtggccagcccctgttcgtgtacaagctggagcaggtgtctgagaagggcaaggcttacaccaactacttcggacggtgcaatgtggccgagcacgaaaagctgatcctgctggcccagctgaagcccgagaaggatagcgacgaagccgtgacatatagcctgggaaagtttgggcagagggccctggatttctacagcattcatgtgaccaaggagtccacccaccccgtgaagcccctggcccagatcgccggaaacagatacgcctccggacctgtgggaaaggccctgagcgacgcatgtatgggcacaatcgcctccttcctgtctaagtaccaggacatcatcatcgaacaccagaaggtggtgaagggcaaccagaagagactggagagcctgcgggagctggccggcaaggaaaacctggaataccctagcgtgaccctgccacctcagcctcacaccaaggagggcgttgatgcctacaacgaagtgatcgcccgggtgcgaatgtgggtgaacctgaacctgtggcagaagctgaagctaagcagagatgatgccaagcctctgctgagactgaagggattcccttcctttcctctggtcgagagacaggccaacgaagtggactggtgggacatggtgtgtaacgtgaagaagctgatcaacgagaaaaaggaggatggcaaggtgttttggcagaatctggctggctacaagagacaggaagccctgagaccatacctgagcagcgaggaagatcggaagaagggaaagaaattcgctcggtaccagctgggcgacctgctgctgcacctggaaaagaagcacggcgaggactggggaaaggtgtacgacgaggcctgggagcggattgacaagaaagtggaaggcctgagcaagcacatcaagctggaagaggaacggagaagcgaggacgcccagagcaaggccgccctgaccgactggctgcgggctaaggccagcttcgtgatcgagggcctgaaggaggccgacaaggacgagttctgcagatgcgagctgaagctgcagaagtggtacggggacctgcggggaaagcccttcgccatcgaagccgagaacagcatcctggacatcagcggcttcagcaagcagtacaactgtgccttcatctggcagaaggacggcgtgaagaagctgaacctgtacctgatcatcaactacttcaagggcggcaagctgcggttcaagaagatcaaacctgaagccttcgaagccaacagattctacaccgtgatcaacaaaaagagcggcgagatcgtgcccatggaggtgaacttcaacttcgacgaccccaacctgatcatcctgcctctggcctttggcaagagacagggcagagaattcatctggaacgacctgctgtccctggaaaccggcagcctgaagctggccaacggaagagtgatcgagaagacactgtacaacagaagaacccggcaggatgagcctgccctgttcgtggccctgaccttcgagcggcgggaggtcctggactcctccaatatcaaaccaatgaacctgatcggcgtggcaagaggcgaaaacatccccgccgtgatcgccctgaccgaccccgagggctgcccactgagccggtttaaggatagcctgggaaacccaacccacatcctgagaatcggcgagagctataaggagaagcagcggaccatccaggccaagaaggaggtggagcagcggagagccggcggctacagccggaagtacgccagcaaagccaagaatctggcagacgatatggtgagaaacaccgctagagatctgctgtactacgccgtgacccaggatgccatgctgatcttcgccaacctgagccggggcttcggccggcagggcaagcggaccttcatggccgagagacagtacacacggatggaggactggctgaccgccaagctggcctacgagggcctgagcaagacctacctgtccaagacactggcccagtacacctccaagacatgcagcaactgtgggtttaccatcaccagcgccgactacgacagggtgctggagaagctgaagaagacagcaacaggctggatgaccacaattaacggcaaggagctgaaggtggagggccagattacctactacaacagatacaagagacagaacgtagtcaaggacctgtccgtcgagctggatagactgagcgaagaatctgtgaacaacgacatctcctcctggacaaagggcagaagcggagaagctctgagcctcctgaagaaaagattctcccatagacccgtgcaggagaagttcgtgtgcctgaactgcggcttcgagacacacgcagccgagcaagccgccctgaacatcgccagatcctggctgttcctgcggagccaggagtacaagaaataccagacaaacaagacaaccggcaacaccgataagagagccttcgtcgagacctggcagtccttttaccggaagaagcttaaggaggtgtggaaacctgccgtgcggtctggcggatctggcggaggctccaccagccccaagaaaaagagaaaagtctaagctgccttctgcggggcttgccttctggccatgcccttcttctctcccttgcacctgtacctcttggtctttgaataaagcctgagtaggaaggctagcaaaaaaaaaaaaaaaaaaaaaaaaaaaaaaaaaaaaaaaaaaaaaaaaaaaaaaaaaaaaaaaaaaaaaaaaaaaaaaaa

SEQ ID NO: 13192 - RNA, 5785 nt, synthetic construct
  source 1..5785: mol_type = other RNA
aggaaataagagagaaaagaagagtaagaagaaatataagagccaccatggcccctaagaagaagcgtaaagtgagccggatggaacgcctcgtctacgaggtgcggcagaagtgcagaaacatcgaggacatctgcatctcctgcggatctctgaacgtgaccctggagcacccactgttcatcggcggcatgtgccagaactgtaaaaactgttttctggagtgtgcctatcaatacgacgatgacggctaccagagctactgcaccatctgttgcggcggaagagaggtgctgatgtgtggaaataacaactgctgccggtgcttctgcgtggaatgcgtggacctgctggtgggccccggcgccgcccaggccgctattaaggaagatccttggaactgctacatgtgcggccacaagggcacatacggcctgctgagacggagagaggactggcctagcagactgcagatgttcttcgccaataaccacgaccaggagttcgacccccctaaggtgtaccctcccgtccccgccgagaagagaaagcccatccgggtcctgagcctgttcgatggcatcgccaccggtctgctggtgctgaaggacctgggcatccaggtggataggtacattgcctccgaggtgtgcgaggactccatcaccgtgggaatggtgcgtcatcagggcaagatcatgtacgtgggcgacgtgcggagcgtgacacagaagcatatccaggagtggggccctttcgacctggtgatcggcggcagcccttgcaatgacctgagcatcgtgaacccagcccggaagggcctgtacgagggaaccggcagactgttcttcgagttttacagactgctgcacgacgcccggcctaaggaaggcgacgaccggcccttcttttggctgttcgagaatgtggtggccatgggagtcagcgacaagcgggatattagccggttcctggagagcaaccccgtgatgatcgatgccaaggaagtgagcgccgcccaccgggccagatacttctggggcaatctgcctggcatgaacagacccctggccagcaccgtgaacgacaagctggagctgcaggagtgcctggagcacggccggatcgccaagttcagcaaggtgagaaccatcaccacccgaagcaacagcatcaaacaaggcaaggaccagcactttcctgtgttcatgaacgagaaggaggacatcctgtggtgtaccgagatggagagagtgttcgggttcccagtccactacacagatgtcagcaacatgtctagactggccagacagagactgctgggaagaagctggtccgtccctgtgatcagacacctgttcgcccctctgaaggagtacttcgcctgcgtgagcagcggcaacagcaacgccaacagccggggccccagcttctctagcggcctggtgccactgtccctgagagggagccacatgggccccatggagatctacaaaaccgtgagcgcctggaagcggcagcctgtgcgcgtgctgagcctgtttcggaatatcgataaagtcctgaaaagcctgggattcctggagagcggctctggctccggcggtggcaccctgaagtacgtggaggatgtgacaaacgtggtcagacgggatgtggagaagtggggccccttcgatctggtgtacggcagcacccaacccctgggcagctcttgtgaccggtgccctggctggtacatgtttcagttccaccggatcctgcagtacgccctgccgagacaggagtcccagcggccattcttttggattttcatggacaacttgctgctgaccgaggatgaccaggaaactaccactcggttcctgcagaccgaagccgtgaccctgcaggacgtgagaggccgggactaccagaacgccatgcgggtgtggtccaacatccctggactgaaaagcaagcacgcacctctgacccctaaagaagaggagtacctgcaggcccaggtgcggagcagaagcaagctggacgcccctaaggtggatctgctggtgaagaattgcctcctgcccctgagagagtacttcaagtatttcagccagaatagtctgcccctgggaggcagcggcggcggcatgaacggcatgacctacgacgacgtgcacgtgaacttcaccggcgaggagtgggccctgctgagccccagccagaagaggctgtacaaggacgtgatgctggagacctacaggaacctgaccgccatcggctacagctgggaggacaggaacatcgaggagcacttccagaggagcaggaggcacggcaggcacgagaggagccacaccggcgagaaccccagcgtgtacacccagtgcaacggcggcccaagcagcggcgcccctcctcccagcggcggcagcccagccggctccccaacctctaccgaggagggcacctctgagtccgccacccccgagagcggccctggcacctccaccgagcccagcgagggcagcgcacccggcagccctgccggcagccccacctccacagaggagggaaccagcaccgagcccagcgaaggcagcgccccaggcaccagcaccgagcctagtgagcaggagattaaacggatcaacaagatcagaagaagacttgtgaaagacagcaacaccaagaaggccggcaagacaggccccatgaaaaccctgctggttagagtgatgacacccgatctgagagagcggctggaaaacctgagaaagaagcctgaaaatatcccccagcccatcagcaatacatctagagccaacctgaataagctgctgaccgattacaccgaaatgaagaaggcgatcctgcatgtgtactgggaagagttccagaaggaccctgtgggcctgatgagccgggtggcccagcctgccagcaagaagatcgatcagaacaagctgaaacctgagatggacgagaagggcaacctgaccaccgccggctttgcctgctctcagtgtggccagcccctgttcgtgtacaagctggagcaggtgtctgagaagggcaaggcttacaccaactacttcggacggtgcaatgtggccgagcacgaaaagctgatcctgctggcccagctgaagcccgagaaggatagcgacgaagccgtgacatatagcctgggaaagtttgggcagagggccctggatttctacagcattcatgtgaccaaggagtccacccaccccgtgaagcccctggcccagatcgccggaaacagatacgcctccggacctgtgggaaaggccctgagcgacgcatgtatgggcacaatcgcctccttcctgtctaagtaccaggacatcatcatcgaacaccagaaggtggtgaagggcaaccagaagagactggagagcctgcgggagctggccggcaaggaaaacctggaataccctagcgtgaccctgccacctcagcctcacaccaaggagggcgttgatgcctacaacgaagtgatcgcccgggtgcgaatgtgggtgaacctgaacctgtggcagaagctgaagctaagcagagatgatgccaagcctctgctgagactgaagggattcccttcctttcctctggtcgagagacaggccaacgaagtggactggtgggacatggtgtgtaacgtgaagaagctgatcaacgagaaaaaggaggatggcaaggtgttttggcagaatctggctggctacaagagacaggaagccctgagaccatacctgagcagcgaggaagatcggaagaagggaaagaaattcgctcggtaccagctgggcgacctgctgctgcacctggaaaagaagcacggcgaggactggggaaaggtgtacgacgaggcctgggagcggattgacaagaaagtggaaggcctgagcaagcacatcaagctggaagaggaacggagaagcgaggacgcccagagcaaggccgccctgaccgactggctgcgggctaaggccagcttcgtgatcgagggcctgaaggaggccgacaaggacgagttctgcagatgcgagctgaagctgcagaagtggtacggggacctgcggggaaagcccttcgccatcgaagccgagaacagcatcctggacatcagcggcttcagcaagcagtacaactgtgccttcatctggcagaaggacggcgtgaagaagctgaacctgtacctgatcatcaactacttcaagggcggcaagctgcggttcaagaagatcaaacctgaagccttcgaagccaacagattctacaccgtgatcaacaaaaagagcggcgagatcgtgcccatggaggtgaacttcaacttcgacgaccccaacctgatcatcctgcctctggcctttggcaagagacagggcagagaattcatctggaacgacctgctgtccctggaaaccggcagcctgaagctggccaacggaagagtgatcgagaagacactgtacaacagaagaacccggcaggatgagcctgccctgttcgtggccctgaccttcgagcggcgggaggtcctggactcctccaatatcaaaccaatgaacctgatcggcgtggcaagaggcgaaaacatccccgccgtgatcgccctgaccgaccccgagggctgcccactgagccggtttaaggatagcctgggaaacccaacccacatcctgagaatcggcgagagctataaggagaagcagcggaccatccaggccaagaaggaggtggagcagcggagagccggcggctacagccggaagtacgccagcaaagccaagaatctggcagacgatatggtgagaaacaccgctagagatctgctgtactacgccgtgacccaggatgccatgctgatcttcgccaacctgagccggggcttcggccggcagggcaagcggaccttcatggccgagagacagtacacacggatggaggactggctgaccgccaagctggcctacgagggcctgagcaagacctacctgtccaagacactggcccagtacacctccaagacatgcagcaactgtgggtttaccatcaccagcgccgactacgacagggtgctggagaagctgaagaagacagcaacaggctggatgaccacaattaacggcaaggagctgaaggtggagggccagattacctactacaacagatacaagagacagaacgtagtcaaggacctgtccgtcgagctggatagactgagcgaagaatctgtgaacaacgacatctcctcctggacaaagggcagaagcggagaagctctgagcctcctgaagaaaagattctcccatagacccgtgcaggagaagttcgtgtgcctgaactgcggcttcgagacacacgcagccgagcaagccgccctgaacatcgccagatcctggctgttcctgcggagccaggagtacaagaaataccagacaaacaagacaaccggcaacaccgataagagagccttcgtcgagacctggcagtccttttaccggaagaagcttaaggaggtgtggaaacctgccgtgcggtctggcggatctggcggaggctccaccagccccaagaaaaagagaaaagtctaagctgccttctgcggggcttgccttctggccatgcccttcttctctcccttgcacctgtacctcttggtctttgaataaagcctgagtaggaaggctagcaaaaaaaaaaaaaaaaaaaaaaaaaaaaaaaaaaaaaaaaaaaaaaaaaaaaaaaaaaaaaaaaaaaaaaaaaaaaaaaa

SEQ ID NO: 13193 - RNA, 5785 nt, synthetic construct
  source 1..5785: mol_type = other RNA
aggaaataagagagaaaagaagagtaagaagaaatataagagccaccatggcccctaagaagaagcgtaaagtgagccggatggaacgcctcgtctacgaggtgcggcagaagtgcagaaacatcgaggacatctgcatctcctgcggatctctgaacgtgaccctggagcacccactgttcatcggcggcatgtgccagaactgtaaaaactgttttctggagtgtgcctatcaatacgacgatgacggctaccagagctactgcaccatctgttgcggcggaagagaggtgctgatgtgtggaaataacaactgctgccggtgcttctgcgtggaatgcgtggacctgctggtgggccccggcgccgcccaggccgctattaaggaagatccttggaactgctacatgtgcggccacaagggcacatacggcctgctgagacggagagaggactggcctagcagactgcagatgttcttcgccaataaccacgaccaggagttcgacccccctaaggtgtaccctcccgtccccgccgagaagagaaagcccatccgggtcctgagcctgttcgatggcatcgccaccggtctgctggtgctgaaggacctgggcatccaggtggataggtacattgcctccgaggtgtgcgaggactccatcaccgtgggaatggtgcgtcatcagggcaagatcatgtacgtgggcgacgtgcggagcgtgacacagaagcatatccaggagtggggccctttcgacctggtgatcggcggcagcccttgcaatgacctgagcatcgtgaacccagcccggaagggcctgtacgagggaaccggcagactgttcttcgagttttacagactgctgcacgacgcccggcctaaggaaggcgacgaccggcccttcttttggctgttcgagaatgtggtggccatgggagtcagcgacaagcgggatattagccggttcctggagagcaaccccgtgatgatcgatgccaaggaagtgagcgccgcccaccgggccagatacttctggggcaatctgcctggcatgaacagacccctggccagcaccgtgaacgacaagctggagctgcaggagtgcctggagcacggccggatcgccaagttcagcaaggtgagaaccatcaccacccgaagcaacagcatcaaacaaggcaaggaccagcactttcctgtgttcatgaacgagaaggaggacatcctgtggtgtaccgagatggagagagtgttcgggttcccagtccactacacagatgtcagcaacatgtctagactggccagacagagactgctgggaagaagctggtccgtccctgtgatcagacacctgttcgcccctctgaaggagtacttcgcctgcgtgagcagcggcaacagcaacgccaacagccggggccccagcttctctagcggcctggtgccactgtccctgagagggagccacatgggccccatggagatctacaaaaccgtgagcgcctggaagcggcagcctgtgcgcgtgctgagcctgtttcggaatatcgataaagtcctgaaaagcctgggattcctggagagcggctctggctccggcggtggcaccctgaagtacgtggaggatgtgacaaacgtggtcagacgggatgtggagaagtggggccccttcgatctggtgtacggcagcacccaacccctgggcagctcttgtgaccggtgccctggctggtacatgtttcagttccaccggatcctgcagtacgccctgccgagacaggagtcccagcggccattcttttggattttcatggacaacttgctgctgaccgaggatgaccaggaaactaccactcggttcctgcagaccgaagccgtgaccctgcaggacgtgagaggccgggactaccagaacgccatgcgggtgtggtccaacatccctggactgaaaagcaagcacgcacctctgacccctaaagaagaggagtacctgcaggcccaggtgcggagcagaagcaagctggacgcccctaaggtggatctgctggtgaagaattgcctcctgcccctgagagagtacttcaagtatttcagccagaatagtctgcccctgggaggcagcggcggcggcgcccaggagagcgtgaccttcgaggacgtggccgtgaacttcaccgacagggagtggcagtgcctgacctacgcccagaggcacctgtacaaggacgtgatgctggagaactacggcaacatggtgagcgtgggcttcctgttccccaagccccccctgatcagccacctggagaggggcgtggagccctgcgtgcaggacccccaggacagggagagcctgagctgcagctgcctggtgagcggcggcccaagcagcggcgcccctcctcccagcggcggcagcccagccggctccccaacctctaccgaggagggcacctctgagtccgccacccccgagagcggccctggcacctccaccgagcccagcgagggcagcgcacccggcagccctgccggcagccccacctccacagaggagggaaccagcaccgagcccagcgaaggcagcgccccaggcaccagcaccgagcctagtgagcaggagattaaacggatcaacaagatcagaagaagacttgtgaaagacagcaacaccaagaaggccggcaagacaggccccatgaaaaccctgctggttagagtgatgacacccgatctgagagagcggctggaaaacctgagaaagaagcctgaaaatatcccccagcccatcagcaatacatctagagccaacctgaataagctgctgaccgattacaccgaaatgaagaaggcgatcctgcatgtgtactgggaagagttccagaaggaccctgtgggcctgatgagccgggtggcccagcctgccagcaagaagatcgatcagaacaagctgaaacctgagatggacgagaagggcaacctgaccaccgccggctttgcctgctctcagtgtggccagcccctgttcgtgtacaagctggagcaggtgtctgagaagggcaaggcttacaccaactacttcggacggtgcaatgtggccgagcacgaaaagctgatcctgctggcccagctgaagcccgagaaggatagcgacgaagccgtgacatatagcctgggaaagtttgggcagagggccctggatttctacagcattcatgtgaccaaggagtccacccaccccgtgaagcccctggcccagatcgccggaaacagatacgcctccggacctgtgggaaaggccctgagcgacgcatgtatgggcacaatcgcctccttcctgtctaagtaccaggacatcatcatcgaacaccagaaggtggtgaagggcaaccagaagagactggagagcctgcgggagctggccggcaaggaaaacctggaataccctagcgtgaccctgccacctcagcctcacaccaaggagggcgttgatgcctacaacgaagtgatcgcccgggtgcgaatgtgggtgaacctgaacctgtggcagaagctgaagctaagcagagatgatgccaagcctctgctgagactgaagggattcccttcctttcctctggtcgagagacaggccaacgaagtggactggtgggacatggtgtgtaacgtgaagaagctgatcaacgagaaaaaggaggatggcaaggtgttttggcagaatctggctggctacaagagacaggaagccctgagaccatacctgagcagcgaggaagatcggaagaagggaaagaaattcgctcggtaccagctgggcgacctgctgctgcacctggaaaagaagcacggcgaggactggggaaaggtgtacgacgaggcctgggagcggattgacaagaaagtggaaggcctgagcaagcacatcaagctggaagaggaacggagaagcgaggacgcccagagcaaggccgccctgaccgactggctgcgggctaaggccagcttcgtgatcgagggcctgaaggaggccgacaaggacgagttctgcagatgcgagctgaagctgcagaagtggtacggggacctgcggggaaagcccttcgccatcgaagccgagaacagcatcctggacatcagcggcttcagcaagcagtacaactgtgccttcatctggcagaaggacggcgtgaagaagctgaacctgtacctgatcatcaactacttcaagggcggcaagctgcggttcaagaagatcaaacctgaagccttcgaagccaacagattctacaccgtgatcaacaaaaagagcggcgagatcgtgcccatggaggtgaacttcaacttcgacgaccccaacctgatcatcctgcctctggcctttggcaagagacagggcagagaattcatctggaacgacctgctgtccctggaaaccggcagcctgaagctggccaacggaagagtgatcgagaagacactgtacaacagaagaacccggcaggatgagcctgccctgttcgtggccctgaccttcgagcggcgggaggtcctggactcctccaatatcaaaccaatgaacctgatcggcgtggcaagaggcgaaaacatccccgccgtgatcgccctgaccgaccccgagggctgcccactgagccggtttaaggatagcctgggaaacccaacccacatcctgagaatcggcgagagctataaggagaagcagcggaccatccaggccaagaaggaggtggagcagcggagagccggcggctacagccggaagtacgccagcaaagccaagaatctggcagacgatatggtgagaaacaccgctagagatctgctgtactacgccgtgacccaggatgccatgctgatcttcgccaacctgagccggggcttcggccggcagggcaagcggaccttcatggccgagagacagtacacacggatggaggactggctgaccgccaagctggcctacgagggcctgagcaagacctacctgtccaagacactggcccagtacacctccaagacatgcagcaactgtgggtttaccatcaccagcgccgactacgacagggtgctggagaagctgaagaagacagcaacaggctggatgaccacaattaacggcaaggagctgaaggtggagggccagattacctactacaacagatacaagagacagaacgtagtcaaggacctgtccgtcgagctggatagactgagcgaagaatctgtgaacaacgacatctcctcctggacaaagggcagaagcggagaagctctgagcctcctgaagaaaagattctcccatagacccgtgcaggagaagttcgtgtgcctgaactgcggcttcgagacacacgcagccgagcaagccgccctgaacatcgccagatcctggctgttcctgcggagccaggagtacaagaaataccagacaaacaagacaaccggcaacaccgataagagagccttcgtcgagacctggcagtccttttaccggaagaagcttaaggaggtgtggaaacctgccgtgcggtctggcggatctggcggaggctccaccagccccaagaaaaagagaaaagtctaagctgccttctgcggggcttgccttctggccatgcccttcttctctcccttgcacctgtacctcttggtctttgaataaagcctgagtaggaaggctagcaaaaaaaaaaaaaaaaaaaaaaaaaaaaaaaaaaaaaaaaaaaaaaaaaaaaaaaaaaaaaaaaaaaaaaaaaaaaaaaa

SEQ ID NO: 13194 - RNA, 5785 nt, synthetic construct
  source 1..5785: mol_type = other RNA
aggaaataagagagaaaagaagagtaagaagaaatataagagccaccatggcccctaagaagaagcgtaaagtgagccggatggaacgcctcgtctacgaggtgcggcagaagtgcagaaacatcgaggacatctgcatctcctgcggatctctgaacgtgaccctggagcacccactgttcatcggcggcatgtgccagaactgtaaaaactgttttctggagtgtgcctatcaatacgacgatgacggctaccagagctactgcaccatctgttgcggcggaagagaggtgctgatgtgtggaaataacaactgctgccggtgcttctgcgtggaatgcgtggacctgctggtgggccccggcgccgcccaggccgctattaaggaagatccttggaactgctacatgtgcggccacaagggcacatacggcctgctgagacggagagaggactggcctagcagactgcagatgttcttcgccaataaccacgaccaggagttcgacccccctaaggtgtaccctcccgtccccgccgagaagagaaagcccatccgggtcctgagcctgttcgatggcatcgccaccggtctgctggtgctgaaggacctgggcatccaggtggataggtacattgcctccgaggtgtgcgaggactccatcaccgtgggaatggtgcgtcatcagggcaagatcatgtacgtgggcgacgtgcggagcgtgacacagaagcatatccaggagtggggccctttcgacctggtgatcggcggcagcccttgcaatgacctgagcatcgtgaacccagcccggaagggcctgtacgagggaaccggcagactgttcttcgagttttacagactgctgcacgacgcccggcctaaggaaggcgacgaccggcccttcttttggctgttcgagaatgtggtggccatgggagtcagcgacaagcgggatattagccggttcctggagagcaaccccgtgatgatcgatgccaaggaagtgagcgccgcccaccgggccagatacttctggggcaatctgcctggcatgaacagacccctggccagcaccgtgaacgacaagctggagctgcaggagtgcctggagcacggccggatcgccaagttcagcaaggtgagaaccatcaccacccgaagcaacagcatcaaacaaggcaaggaccagcactttcctgtgttcatgaacgagaaggaggacatcctgtggtgtaccgagatggagagagtgttcgggttcccagtccactacacagatgtcagcaacatgtctagactggccagacagagactgctgggaagaagctggtccgtccctgtgatcagacacctgttcgcccctctgaaggagtacttcgcctgcgtgagcagcggcaacagcaacgccaacagccggggccccagcttctctagcggcctggtgccactgtccctgagagggagccacatgggccccatggagatctacaaaaccgtgagcgcctggaagcggcagcctgtgcgcgtgctgagcctgtttcggaatatcgataaagtcctgaaaagcctgggattcctggagagcggctctggctccggcggtggcaccctgaagtacgtggaggatgtgacaaacgtggtcagacgggatgtggagaagtggggccccttcgatctggtgtacggcagcacccaacccctgggcagctcttgtgaccggtgccctggctggtacatgtttcagttccaccggatcctgcagtacgccctgccgagacaggagtcccagcggccattcttttggattttcatggacaacttgctgctgaccgaggatgaccaggaaactaccactcggttcctgcagaccgaagccgtgaccctgcaggacgtgagaggccgggactaccagaacgccatgcgggtgtggtccaacatccctggactgaaaagcaagcacgcacctctgacccctaaagaagaggagtacctgcaggcccaggtgcggagcagaagcaagctggacgcccctaaggtggatctgctggtgaagaattgcctcctgcccctgagagagtacttcaagtatttcagccagaatagtctgcccctgggaggcagcggcggcggcagccagagcctggtgaccttcggcgacgtggccatcaacttcagccaggaggagtgggagtggctgaacagcgcccagaggaacctgtacaggagcgtgatgctggagaactacaggaacctggtgagcctgggcctgtgcgtgagcaagcccgacatgatcagcagcctggagcagaggaaggagccctggatggtgaagaggaagctgaccaggggcaggtgccccgacctgaaggccgtgggcggcccaagcagcggcgcccctcctcccagcggcggcagcccagccggctccccaacctctaccgaggagggcacctctgagtccgccacccccgagagcggccctggcacctccaccgagcccagcgagggcagcgcacccggcagccctgccggcagccccacctccacagaggagggaaccagcaccgagcccagcgaaggcagcgccccaggcaccagcaccgagcctagtgagcaggagattaaacggatcaacaagatcagaagaagacttgtgaaagacagcaacaccaagaaggccggcaagacaggccccatgaaaaccctgctggttagagtgatgacacccgatctgagagagcggctggaaaacctgagaaagaagcctgaaaatatcccccagcccatcagcaatacatctagagccaacctgaataagctgctgaccgattacaccgaaatgaagaaggcgatcctgcatgtgtactgggaagagttccagaaggaccctgtgggcctgatgagccgggtggcccagcctgccagcaagaagatcgatcagaacaagctgaaacctgagatggacgagaagggcaacctgaccaccgccggctttgcctgctctcagtgtggccagcccctgttcgtgtacaagctggagcaggtgtctgagaagggcaaggcttacaccaactacttcggacggtgcaatgtggccgagcacgaaaagctgatcctgctggcccagctgaagcccgagaaggatagcgacgaagccgtgacatatagcctgggaaagtttgggcagagggccctggatttctacagcattcatgtgaccaaggagtccacccaccccgtgaagcccctggcccagatcgccggaaacagatacgcctccggacctgtgggaaaggccctgagcgacgcatgtatgggcacaatcgcctccttcctgtctaagtaccaggacatcatcatcgaacaccagaaggtggtgaagggcaaccagaagagactggagagcctgcgggagctggccggcaaggaaaacctggaataccctagcgtgaccctgccacctcagcctcacaccaaggagggcgttgatgcctacaacgaagtgatcgcccgggtgcgaatgtgggtgaacctgaacctgtggcagaagctgaagctaagcagagatgatgccaagcctctgctgagactgaagggattcccttcctttcctctggtcgagagacaggccaacgaagtggactggtgggacatggtgtgtaacgtgaagaagctgatcaacgagaaaaaggaggatggcaaggtgttttggcagaatctggctggctacaagagacaggaagccctgagaccatacctgagcagcgaggaagatcggaagaagggaaagaaattcgctcggtaccagctgggcgacctgctgctgcacctggaaaagaagcacggcgaggactggggaaaggtgtacgacgaggcctgggagcggattgacaagaaagtggaaggcctgagcaagcacatcaagctggaagaggaacggagaagcgaggacgcccagagcaaggccgccctgaccgactggctgcgggctaaggccagcttcgtgatcgagggcctgaaggaggccgacaaggacgagttctgcagatgcgagctgaagctgcagaagtggtacggggacctgcggggaaagcccttcgccatcgaagccgagaacagcatcctggacatcagcggcttcagcaagcagtacaactgtgccttcatctggcagaaggacggcgtgaagaagctgaacctgtacctgatcatcaactacttcaagggcggcaagctgcggttcaagaagatcaaacctgaagccttcgaagccaacagattctacaccgtgatcaacaaaaagagcggcgagatcgtgcccatggaggtgaacttcaacttcgacgaccccaacctgatcatcctgcctctggcctttggcaagagacagggcagagaattcatctggaacgacctgctgtccctggaaaccggcagcctgaagctggccaacggaagagtgatcgagaagacactgtacaacagaagaacccggcaggatgagcctgccctgttcgtggccctgaccttcgagcggcgggaggtcctggactcctccaatatcaaaccaatgaacctgatcggcgtggcaagaggcgaaaacatccccgccgtgatcgccctgaccgaccccgagggctgcccactgagccggtttaaggatagcctgggaaacccaacccacatcctgagaatcggcgagagctataaggagaagcagcggaccatccaggccaagaaggaggtggagcagcggagagccggcggctacagccggaagtacgccagcaaagccaagaatctggcagacgatatggtgagaaacaccgctagagatctgctgtactacgccgtgacccaggatgccatgctgatcttcgccaacctgagccggggcttcggccggcagggcaagcggaccttcatggccgagagacagtacacacggatggaggactggctgaccgccaagctggcctacgagggcctgagcaagacctacctgtccaagacactggcccagtacacctccaagacatgcagcaactgtgggtttaccatcaccagcgccgactacgacagggtgctggagaagctgaagaagacagcaacaggctggatgaccacaattaacggcaaggagctgaaggtggagggccagattacctactacaacagatacaagagacagaacgtagtcaaggacctgtccgtcgagctggatagactgagcgaagaatctgtgaacaacgacatctcctcctggacaaagggcagaagcggagaagctctgagcctcctgaagaaaagattctcccatagacccgtgcaggagaagttcgtgtgcctgaactgcggcttcgagacacacgcagccgagcaagccgccctgaacatcgccagatcctggctgttcctgcggagccaggagtacaagaaataccagacaaacaagacaaccggcaacaccgataagagagccttcgtcgagacctggcagtccttttaccggaagaagcttaaggaggtgtggaaacctgccgtgcggtctggcggatctggcggaggctccaccagccccaagaaaaagagaaaagtctaagctgccttctgcggggcttgccttctggccatgcccttcttctctcccttgcacctgtacctcttggtctttgaataaagcctgagtaggaaggctagcaaaaaaaaaaaaaaaaaaaaaaaaaaaaaaaaaaaaaaaaaaaaaaaaaaaaaaaaaaaaaaaaaaaaaaaaaaaaaaaa

SEQ ID NO: 13195 - RNA, 5785 nt, synthetic construct
  source 1..5785: mol_type = other RNA
aggaaataagagagaaaagaagagtaagaagaaatataagagccaccatggcccctaagaagaagcgtaaagtgagccggatggaacgcctcgtctacgaggtgcggcagaagtgcagaaacatcgaggacatctgcatctcctgcggatctctgaacgtgaccctggagcacccactgttcatcggcggcatgtgccagaactgtaaaaactgttttctggagtgtgcctatcaatacgacgatgacggctaccagagctactgcaccatctgttgcggcggaagagaggtgctgatgtgtggaaataacaactgctgccggtgcttctgcgtggaatgcgtggacctgctggtgggccccggcgccgcccaggccgctattaaggaagatccttggaactgctacatgtgcggccacaagggcacatacggcctgctgagacggagagaggactggcctagcagactgcagatgttcttcgccaataaccacgaccaggagttcgacccccctaaggtgtaccctcccgtccccgccgagaagagaaagcccatccgggtcctgagcctgttcgatggcatcgccaccggtctgctggtgctgaaggacctgggcatccaggtggataggtacattgcctccgaggtgtgcgaggactccatcaccgtgggaatggtgcgtcatcagggcaagatcatgtacgtgggcgacgtgcggagcgtgacacagaagcatatccaggagtggggccctttcgacctggtgatcggcggcagcccttgcaatgacctgagcatcgtgaacccagcccggaagggcctgtacgagggaaccggcagactgttcttcgagttttacagactgctgcacgacgcccggcctaaggaaggcgacgaccggcccttcttttggctgttcgagaatgtggtggccatgggagtcagcgacaagcgggatattagccggttcctggagagcaaccccgtgatgatcgatgccaaggaagtgagcgccgcccaccgggccagatacttctggggcaatctgcctggcatgaacagacccctggccagcaccgtgaacgacaagctggagctgcaggagtgcctggagcacggccggatcgccaagttcagcaaggtgagaaccatcaccacccgaagcaacagcatcaaacaaggcaaggaccagcactttcctgtgttcatgaacgagaaggaggacatcctgtggtgtaccgagatggagagagtgttcgggttcccagtccactacacagatgtcagcaacatgtctagactggccagacagagactgctgggaagaagctggtccgtccctgtgatcagacacctgttcgcccctctgaaggagtacttcgcctgcgtgagcagcggcaacagcaacgccaacagccggggccccagcttctctagcggcctggtgccactgtccctgagagggagccacatgggccccatggagatctacaaaaccgtgagcgcctggaagcggcagcctgtgcgcgtgctgagcctgtttcggaatatcgataaagtcctgaaaagcctgggattcctggagagcggctctggctccggcggtggcaccctgaagtacgtggaggatgtgacaaacgtggtcagacgggatgtggagaagtggggccccttcgatctggtgtacggcagcacccaacccctgggcagctcttgtgaccggtgccctggctggtacatgtttcagttccaccggatcctgcagtacgccctgccgagacaggagtcccagcggccattcttttggattttcatggacaacttgctgctgaccgaggatgaccaggaaactaccactcggttcctgcagaccgaagccgtgaccctgcaggacgtgagaggccgggactaccagaacgccatgcgggtgtggtccaacatccctggactgaaaagcaagcacgcacctctgacccctaaagaagaggagtacctgcaggcccaggtgcggagcagaagcaagctggacgcccctaaggtggatctgctggtgaagaattgcctcctgcccctgagagagtacttcaagtatttcagccagaatagtctgcccctgggaggcagcggcggcggcttccagggcagcgtgaccttcagggacgtggccatcgacttcagccaggaggagtgggagtggctgcagcccgcccagagggacctgtacaggcacgtgatgctggagaactacggccacctggtgagcctgggcctgaacatcagcaagccccacgtggtgagcctgctggagcagggcagggacccctggcccgacaacggcgccgtgggcggcggcctgttcagcgagagcaagggcgagggcggcccaagcagcggcgcccctcctcccagcggcggcagcccagccggctccccaacctctaccgaggagggcacctctgagtccgccacccccgagagcggccctggcacctccaccgagcccagcgagggcagcgcacccggcagccctgccggcagccccacctccacagaggagggaaccagcaccgagcccagcgaaggcagcgccccaggcaccagcaccgagcctagtgagcaggagattaaacggatcaacaagatcagaagaagacttgtgaaagacagcaacaccaagaaggccggcaagacaggccccatgaaaaccctgctggttagagtgatgacacccgatctgagagagcggctggaaaacctgagaaagaagcctgaaaatatcccccagcccatcagcaatacatctagagccaacctgaataagctgctgaccgattacaccgaaatgaagaaggcgatcctgcatgtgtactgggaagagttccagaaggaccctgtgggcctgatgagccgggtggcccagcctgccagcaagaagatcgatcagaacaagctgaaacctgagatggacgagaagggcaacctgaccaccgccggctttgcctgctctcagtgtggccagcccctgttcgtgtacaagctggagcaggtgtctgagaagggcaaggcttacaccaactacttcggacggtgcaatgtggccgagcacgaaaagctgatcctgctggcccagctgaagcccgagaaggatagcgacgaagccgtgacatatagcctgggaaagtttgggcagagggccctggatttctacagcattcatgtgaccaaggagtccacccaccccgtgaagcccctggcccagatcgccggaaacagatacgcctccggacctgtgggaaaggccctgagcgacgcatgtatgggcacaatcgcctccttcctgtctaagtaccaggacatcatcatcgaacaccagaaggtggtgaagggcaaccagaagagactggagagcctgcgggagctggccggcaaggaaaacctggaataccctagcgtgaccctgccacctcagcctcacaccaaggagggcgttgatgcctacaacgaagtgatcgcccgggtgcgaatgtgggtgaacctgaacctgtggcagaagctgaagctaagcagagatgatgccaagcctctgctgagactgaagggattcccttcctttcctctggtcgagagacaggccaacgaagtggactggtgggacatggtgtgtaacgtgaagaagctgatcaacgagaaaaaggaggatggcaaggtgttttggcagaatctggctggctacaagagacaggaagccctgagaccatacctgagcagcgaggaagatcggaagaagggaaagaaattcgctcggtaccagctgggcgacctgctgctgcacctggaaaagaagcacggcgaggactggggaaaggtgtacgacgaggcctgggagcggattgacaagaaagtggaaggcctgagcaagcacatcaagctggaagaggaacggagaagcgaggacgcccagagcaaggccgccctgaccgactggctgcgggctaaggccagcttcgtgatcgagggcctgaaggaggccgacaaggacgagttctgcagatgcgagctgaagctgcagaagtggtacggggacctgcggggaaagcccttcgccatcgaagccgagaacagcatcctggacatcagcggcttcagcaagcagtacaactgtgccttcatctggcagaaggacggcgtgaagaagctgaacctgtacctgatcatcaactacttcaagggcggcaagctgcggttcaagaagatcaaacctgaagccttcgaagccaacagattctacaccgtgatcaacaaaaagagcggcgagatcgtgcccatggaggtgaacttcaacttcgacgaccccaacctgatcatcctgcctctggcctttggcaagagacagggcagagaattcatctggaacgacctgctgtccctggaaaccggcagcctgaagctggccaacggaagagtgatcgagaagacactgtacaacagaagaacccggcaggatgagcctgccctgttcgtggccctgaccttcgagcggcgggaggtcctggactcctccaatatcaaaccaatgaacctgatcggcgtggcaagaggcgaaaacatccccgccgtgatcgccctgaccgaccccgagggctgcccactgagccggtttaaggatagcctgggaaacccaacccacatcctgagaatcggcgagagctataaggagaagcagcggaccatccaggccaagaaggaggtggagcagcggagagccggcggctacagccggaagtacgccagcaaagccaagaatctggcagacgatatggtgagaaacaccgctagagatctgctgtactacgccgtgacccaggatgccatgctgatcttcgccaacctgagccggggcttcggccggcagggcaagcggaccttcatggccgagagacagtacacacggatggaggactggctgaccgccaagctggcctacgagggcctgagcaagacctacctgtccaagacactggcccagtacacctccaagacatgcagcaactgtgggtttaccatcaccagcgccgactacgacagggtgctggagaagctgaagaagacagcaacaggctggatgaccacaattaacggcaaggagctgaaggtggagggccagattacctactacaacagatacaagagacagaacgtagtcaaggacctgtccgtcgagctggatagactgagcgaagaatctgtgaacaacgacatctcctcctggacaaagggcagaagcggagaagctctgagcctcctgaagaaaagattctcccatagacccgtgcaggagaagttcgtgtgcctgaactgcggcttcgagacacacgcagccgagcaagccgccctgaacatcgccagatcctggctgttcctgcggagccaggagtacaagaaataccagacaaacaagacaaccggcaacaccgataagagagccttcgtcgagacctggcagtccttttaccggaagaagcttaaggaggtgtggaaacctgccgtgcggtctggcggatctggcggaggctccaccagccccaagaaaaagagaaaagtctaagctgccttctgcggggcttgccttctggccatgcccttcttctctcccttgcacctgtacctcttggtctttgaataaagcctgagtaggaaggctagcaaaaaaaaaaaaaaaaaaaaaaaaaaaaaaaaaaaaaaaaaaaaaaaaaaaaaaaaaaaaaaaaaaaaaaaaaaaaaaaa

SEQ ID NO: 13196 - RNA, 5785 nt, synthetic construct
  source 1..5785: mol_type = other RNA
aggaaataagagagaaaagaagagtaagaagaaatataagagccaccatggcccctaagaagaagcgtaaagtgagccggatggaacgcctcgtctacgaggtgcggcagaagtgcagaaacatcgaggacatctgcatctcctgcggatctctgaacgtgaccctggagcacccactgttcatcggcggcatgtgccagaactgtaaaaactgttttctggagtgtgcctatcaatacgacgatgacggctaccagagctactgcaccatctgttgcggcggaagagaggtgctgatgtgtggaaataacaactgctgccggtgcttctgcgtggaatgcgtggacctgctggtgggccccggcgccgcccaggccgctattaaggaagatccttggaactgctacatgtgcggccacaagggcacatacggcctgctgagacggagagaggactggcctagcagactgcagatgttcttcgccaataaccacgaccaggagttcgacccccctaaggtgtaccctcccgtccccgccgagaagagaaagcccatccgggtcctgagcctgttcgatggcatcgccaccggtctgctggtgctgaaggacctgggcatccaggtggataggtacattgcctccgaggtgtgcgaggactccatcaccgtgggaatggtgcgtcatcagggcaagatcatgtacgtgggcgacgtgcggagcgtgacacagaagcatatccaggagtggggccctttcgacctggtgatcggcggcagcccttgcaatgacctgagcatcgtgaacccagcccggaagggcctgtacgagggaaccggcagactgttcttcgagttttacagactgctgcacgacgcccggcctaaggaaggcgacgaccggcccttcttttggctgttcgagaatgtggtggccatgggagtcagcgacaagcgggatattagccggttcctggagagcaaccccgtgatgatcgatgccaaggaagtgagcgccgcccaccgggccagatacttctggggcaatctgcctggcatgaacagacccctggccagcaccgtgaacgacaagctggagctgcaggagtgcctggagcacggccggatcgccaagttcagcaaggtgagaaccatcaccacccgaagcaacagcatcaaacaaggcaaggaccagcactttcctgtgttcatgaacgagaaggaggacatcctgtggtgtaccgagatggagagagtgttcgggttcccagtccactacacagatgtcagcaacatgtctagactggccagacagagactgctgggaagaagctggtccgtccctgtgatcagacacctgttcgcccctctgaaggagtacttcgcctgcgtgagcagcggcaacagcaacgccaacagccggggccccagcttctctagcggcctggtgccactgtccctgagagggagccacatgggccccatggagatctacaaaaccgtgagcgcctggaagcggcagcctgtgcgcgtgctgagcctgtttcggaatatcgataaagtcctgaaaagcctgggattcctggagagcggctctggctccggcggtggcaccctgaagtacgtggaggatgtgacaaacgtggtcagacgggatgtggagaagtggggccccttcgatctggtgtacggcagcacccaacccctgggcagctcttgtgaccggtgccctggctggtacatgtttcagttccaccggatcctgcagtacgccctgccgagacaggagtcccagcggccattcttttggattttcatggacaacttgctgctgaccgaggatgaccaggaaactaccactcggttcctgcagaccgaagccgtgaccctgcaggacgtgagaggccgggactaccagaacgccatgcgggtgtggtccaacatccctggactgaaaagcaagcacgcacctctgacccctaaagaagaggagtacctgcaggcccaggtgcggagcagaagcaagctggacgcccctaaggtggatctgctggtgaagaattgcctcctgcccctgagagagtacttcaagtatttcagccagaatagtctgcccctgggaggcagcggcggcggcatggacagcgtgaccatcgaggacgtggccgtggacttcaccctggaggagtgggccctgctggaccccagccagaggaagctgtacagggacgtgatgcaggagaccctgaggaacctggccgccgtgggcgccaagagggagtaccacgacatcgaggaccagtacaagaaccagggcaggaagctgaggaccttcatggtggagaggttctgcaagagcaaggacatcagcctgtgcggcggcggcccaagcagcggcgcccctcctcccagcggcggcagcccagccggctccccaacctctaccgaggagggcacctctgagtccgccacccccgagagcggccctggcacctccaccgagcccagcgagggcagcgcacccggcagccctgccggcagccccacctccacagaggagggaaccagcaccgagcccagcgaaggcagcgccccaggcaccagcaccgagcctagtgagcaggagattaaacggatcaacaagatcagaagaagacttgtgaaagacagcaacaccaagaaggccggcaagacaggccccatgaaaaccctgctggttagagtgatgacacccgatctgagagagcggctggaaaacctgagaaagaagcctgaaaatatcccccagcccatcagcaatacatctagagccaacctgaataagctgctgaccgattacaccgaaatgaagaaggcgatcctgcatgtgtactgggaagagttccagaaggaccctgtgggcctgatgagccgggtggcccagcctgccagcaagaagatcgatcagaacaagctgaaacctgagatggacgagaagggcaacctgaccaccgccggctttgcctgctctcagtgtggccagcccctgttcgtgtacaagctggagcaggtgtctgagaagggcaaggcttacaccaactacttcggacggtgcaatgtggccgagcacgaaaagctgatcctgctggcccagctgaagcccgagaaggatagcgacgaagccgtgacatatagcctgggaaagtttgggcagagggccctggatttctacagcattcatgtgaccaaggagtccacccaccccgtgaagcccctggcccagatcgccggaaacagatacgcctccggacctgtgggaaaggccctgagcgacgcatgtatgggcacaatcgcctccttcctgtctaagtaccaggacatcatcatcgaacaccagaaggtggtgaagggcaaccagaagagactggagagcctgcgggagctggccggcaaggaaaacctggaataccctagcgtgaccctgccacctcagcctcacaccaaggagggcgttgatgcctacaacgaagtgatcgcccgggtgcgaatgtgggtgaacctgaacctgtggcagaagctgaagctaagcagagatgatgccaagcctctgctgagactgaagggattcccttcctttcctctggtcgagagacaggccaacgaagtggactggtgggacatggtgtgtaacgtgaagaagctgatcaacgagaaaaaggaggatggcaaggtgttttggcagaatctggctggctacaagagacaggaagccctgagaccatacctgagcagcgaggaagatcggaagaagggaaagaaattcgctcggtaccagctgggcgacctgctgctgcacctggaaaagaagcacggcgaggactggggaaaggtgtacgacgaggcctgggagcggattgacaagaaagtggaaggcctgagcaagcacatcaagctggaagaggaacggagaagcgaggacgcccagagcaaggccgccctgaccgactggctgcgggctaaggccagcttcgtgatcgagggcctgaaggaggccgacaaggacgagttctgcagatgcgagctgaagctgcagaagtggtacggggacctgcggggaaagcccttcgccatcgaagccgagaacagcatcctggacatcagcggcttcagcaagcagtacaactgtgccttcatctggcagaaggacggcgtgaagaagctgaacctgtacctgatcatcaactacttcaagggcggcaagctgcggttcaagaagatcaaacctgaagccttcgaagccaacagattctacaccgtgatcaacaaaaagagcggcgagatcgtgcccatggaggtgaacttcaacttcgacgaccccaacctgatcatcctgcctctggcctttggcaagagacagggcagagaattcatctggaacgacctgctgtccctggaaaccggcagcctgaagctggccaacggaagagtgatcgagaagacactgtacaacagaagaacccggcaggatgagcctgccctgttcgtggccctgaccttcgagcggcgggaggtcctggactcctccaatatcaaaccaatgaacctgatcggcgtggcaagaggcgaaaacatccccgccgtgatcgccctgaccgaccccgagggctgcccactgagccggtttaaggatagcctgggaaacccaacccacatcctgagaatcggcgagagctataaggagaagcagcggaccatccaggccaagaaggaggtggagcagcggagagccggcggctacagccggaagtacgccagcaaagccaagaatctggcagacgatatggtgagaaacaccgctagagatctgctgtactacgccgtgacccaggatgccatgctgatcttcgccaacctgagccggggcttcggccggcagggcaagcggaccttcatggccgagagacagtacacacggatggaggactggctgaccgccaagctggcctacgagggcctgagcaagacctacctgtccaagacactggcccagtacacctccaagacatgcagcaactgtgggtttaccatcaccagcgccgactacgacagggtgctggagaagctgaagaagacagcaacaggctggatgaccacaattaacggcaaggagctgaaggtggagggccagattacctactacaacagatacaagagacagaacgtagtcaaggacctgtccgtcgagctggatagactgagcgaagaatctgtgaacaacgacatctcctcctggacaaagggcagaagcggagaagctctgagcctcctgaagaaaagattctcccatagacccgtgcaggagaagttcgtgtgcctgaactgcggcttcgagacacacgcagccgagcaagccgccctgaacatcgccagatcctggctgttcctgcggagccaggagtacaagaaataccagacaaacaagacaaccggcaacaccgataagagagccttcgtcgagacctggcagtccttttaccggaagaagcttaaggaggtgtggaaacctgccgtgcggtctggcggatctggcggaggctccaccagccccaagaaaaagagaaaagtctaagctgccttctgcggggcttgccttctggccatgcccttcttctctcccttgcacctgtacctcttggtctttgaataaagcctgagtaggaaggctagcaaaaaaaaaaaaaaaaaaaaaaaaaaaaaaaaaaaaaaaaaaaaaaaaaaaaaaaaaaaaaaaaaaaaaaaaaaaaaaaa

SEQ ID NO: 13197 - RNA, 5785 nt, synthetic construct
  source 1..5785: mol_type = other RNA
aggaaataagagagaaaagaagagtaagaagaaatataagagccaccatggcccctaagaagaagcgtaaagtgagccggatggaacgcctcgtctacgaggtgcggcagaagtgcagaaacatcgaggacatctgcatctcctgcggatctctgaacgtgaccctggagcacccactgttcatcggcggcatgtgccagaactgtaaaaactgttttctggagtgtgcctatcaatacgacgatgacggctaccagagctactgcaccatctgttgcggcggaagagaggtgctgatgtgtggaaataacaactgctgccggtgcttctgcgtggaatgcgtggacctgctggtgggccccggcgccgcccaggccgctattaaggaagatccttggaactgctacatgtgcggccacaagggcacatacggcctgctgagacggagagaggactggcctagcagactgcagatgttcttcgccaataaccacgaccaggagttcgacccccctaaggtgtaccctcccgtccccgccgagaagagaaagcccatccgggtcctgagcctgttcgatggcatcgccaccggtctgctggtgctgaaggacctgggcatccaggtggataggtacattgcctccgaggtgtgcgaggactccatcaccgtgggaatggtgcgtcatcagggcaagatcatgtacgtgggcgacgtgcggagcgtgacacagaagcatatccaggagtggggccctttcgacctggtgatcggcggcagcccttgcaatgacctgagcatcgtgaacccagcccggaagggcctgtacgagggaaccggcagactgttcttcgagttttacagactgctgcacgacgcccggcctaaggaaggcgacgaccggcccttcttttggctgttcgagaatgtggtggccatgggagtcagcgacaagcgggatattagccggttcctggagagcaaccccgtgatgatcgatgccaaggaagtgagcgccgcccaccgggccagatacttctggggcaatctgcctggcatgaacagacccctggccagcaccgtgaacgacaagctggagctgcaggagtgcctggagcacggccggatcgccaagttcagcaaggtgagaaccatcaccacccgaagcaacagcatcaaacaaggcaaggaccagcactttcctgtgttcatgaacgagaaggaggacatcctgtggtgtaccgagatggagagagtgttcgggttcccagtccactacacagatgtcagcaacatgtctagactggccagacagagactgctgggaagaagctggtccgtccctgtgatcagacacctgttcgcccctctgaaggagtacttcgcctgcgtgagcagcggcaacagcaacgccaacagccggggccccagcttctctagcggcctggtgccactgtccctgagagggagccacatgggccccatggagatctacaaaaccgtgagcgcctggaagcggcagcctgtgcgcgtgctgagcctgtttcggaatatcgataaagtcctgaaaagcctgggattcctggagagcggctctggctccggcggtggcaccctgaagtacgtggaggatgtgacaaacgtggtcagacgggatgtggagaagtggggccccttcgatctggtgtacggcagcacccaacccctgggcagctcttgtgaccggtgccctggctggtacatgtttcagttccaccggatcctgcagtacgccctgccgagacaggagtcccagcggccattcttttggattttcatggacaacttgctgctgaccgaggatgaccaggaaactaccactcggttcctgcagaccgaagccgtgaccctgcaggacgtgagaggccgggactaccagaacgccatgcgggtgtggtccaacatccctggactgaaaagcaagcacgcacctctgacccctaaagaagaggagtacctgcaggcccaggtgcggagcagaagcaagctggacgcccctaaggtggatctgctggtgaagaattgcctcctgcccctgagagagtacttcaagtatttcagccagaatagtctgcccctgggaggcagcggcggcggcatgggccccctgaccttcaccgacgtggccatcgagttcagcctggaggagtggcagtgcctggacaccgcccagcagaacctgtacaggaacgtgatgctggagaactacaggaacctggtgttcctgggcatcgccgtgagcaagcccgacctgatcacctgcctggagaaggagaaggagccctgcaagatgaagaggcacgagatggtggacgagccccccgacggcgtgagcctgctgggcggcccaagcagcggcgcccctcctcccagcggcggcagcccagccggctccccaacctctaccgaggagggcacctctgagtccgccacccccgagagcggccctggcacctccaccgagcccagcgagggcagcgcacccggcagccctgccggcagccccacctccacagaggagggaaccagcaccgagcccagcgaaggcagcgccccaggcaccagcaccgagcctagtgagcaggagattaaacggatcaacaagatcagaagaagacttgtgaaagacagcaacaccaagaaggccggcaagacaggccccatgaaaaccctgctggttagagtgatgacacccgatctgagagagcggctggaaaacctgagaaagaagcctgaaaatatcccccagcccatcagcaatacatctagagccaacctgaataagctgctgaccgattacaccgaaatgaagaaggcgatcctgcatgtgtactgggaagagttccagaaggaccctgtgggcctgatgagccgggtggcccagcctgccagcaagaagatcgatcagaacaagctgaaacctgagatggacgagaagggcaacctgaccaccgccggctttgcctgctctcagtgtggccagcccctgttcgtgtacaagctggagcaggtgtctgagaagggcaaggcttacaccaactacttcggacggtgcaatgtggccgagcacgaaaagctgatcctgctggcccagctgaagcccgagaaggatagcgacgaagccgtgacatatagcctgggaaagtttgggcagagggccctggatttctacagcattcatgtgaccaaggagtccacccaccccgtgaagcccctggcccagatcgccggaaacagatacgcctccggacctgtgggaaaggccctgagcgacgcatgtatgggcacaatcgcctccttcctgtctaagtaccaggacatcatcatcgaacaccagaaggtggtgaagggcaaccagaagagactggagagcctgcgggagctggccggcaaggaaaacctggaataccctagcgtgaccctgccacctcagcctcacaccaaggagggcgttgatgcctacaacgaagtgatcgcccgggtgcgaatgtgggtgaacctgaacctgtggcagaagctgaagctaagcagagatgatgccaagcctctgctgagactgaagggattcccttcctttcctctggtcgagagacaggccaacgaagtggactggtgggacatggtgtgtaacgtgaagaagctgatcaacgagaaaaaggaggatggcaaggtgttttggcagaatctggctggctacaagagacaggaagccctgagaccatacctgagcagcgaggaagatcggaagaagggaaagaaattcgctcggtaccagctgggcgacctgctgctgcacctggaaaagaagcacggcgaggactggggaaaggtgtacgacgaggcctgggagcggattgacaagaaagtggaaggcctgagcaagcacatcaagctggaagaggaacggagaagcgaggacgcccagagcaaggccgccctgaccgactggctgcgggctaaggccagcttcgtgatcgagggcctgaaggaggccgacaaggacgagttctgcagatgcgagctgaagctgcagaagtggtacggggacctgcggggaaagcccttcgccatcgaagccgagaacagcatcctggacatcagcggcttcagcaagcagtacaactgtgccttcatctggcagaaggacggcgtgaagaagctgaacctgtacctgatcatcaactacttcaagggcggcaagctgcggttcaagaagatcaaacctgaagccttcgaagccaacagattctacaccgtgatcaacaaaaagagcggcgagatcgtgcccatggaggtgaacttcaacttcgacgaccccaacctgatcatcctgcctctggcctttggcaagagacagggcagagaattcatctggaacgacctgctgtccctggaaaccggcagcctgaagctggccaacggaagagtgatcgagaagacactgtacaacagaagaacccggcaggatgagcctgccctgttcgtggccctgaccttcgagcggcgggaggtcctggactcctccaatatcaaaccaatgaacctgatcggcgtggcaagaggcgaaaacatccccgccgtgatcgccctgaccgaccccgagggctgcccactgagccggtttaaggatagcctgggaaacccaacccacatcctgagaatcggcgagagctataaggagaagcagcggaccatccaggccaagaaggaggtggagcagcggagagccggcggctacagccggaagtacgccagcaaagccaagaatctggcagacgatatggtgagaaacaccgctagagatctgctgtactacgccgtgacccaggatgccatgctgatcttcgccaacctgagccggggcttcggccggcagggcaagcggaccttcatggccgagagacagtacacacggatggaggactggctgaccgccaagctggcctacgagggcctgagcaagacctacctgtccaagacactggcccagtacacctccaagacatgcagcaactgtgggtttaccatcaccagcgccgactacgacagggtgctggagaagctgaagaagacagcaacaggctggatgaccacaattaacggcaaggagctgaaggtggagggccagattacctactacaacagatacaagagacagaacgtagtcaaggacctgtccgtcgagctggatagactgagcgaagaatctgtgaacaacgacatctcctcctggacaaagggcagaagcggagaagctctgagcctcctgaagaaaagattctcccatagacccgtgcaggagaagttcgtgtgcctgaactgcggcttcgagacacacgcagccgagcaagccgccctgaacatcgccagatcctggctgttcctgcggagccaggagtacaagaaataccagacaaacaagacaaccggcaacaccgataagagagccttcgtcgagacctggcagtccttttaccggaagaagcttaaggaggtgtggaaacctgccgtgcggtctggcggatctggcggaggctccaccagccccaagaaaaagagaaaagtctaagctgccttctgcggggcttgccttctggccatgcccttcttctctcccttgcacctgtacctcttggtctttgaataaagcctgagtaggaaggctagcaaaaaaaaaaaaaaaaaaaaaaaaaaaaaaaaaaaaaaaaaaaaaaaaaaaaaaaaaaaaaaaaaaaaaaaaaaaaaaaa

SEQ ID NO: 13198 - RNA, 5785 nt, synthetic construct
  source 1..5785: mol_type = other RNA
aggaaataagagagaaaagaagagtaagaagaaatataagagccaccatggcccctaagaagaagcgtaaagtgagccggatggaacgcctcgtctacgaggtgcggcagaagtgcagaaacatcgaggacatctgcatctcctgcggatctctgaacgtgaccctggagcacccactgttcatcggcggcatgtgccagaactgtaaaaactgttttctggagtgtgcctatcaatacgacgatgacggctaccagagctactgcaccatctgttgcggcggaagagaggtgctgatgtgtggaaataacaactgctgccggtgcttctgcgtggaatgcgtggacctgctggtgggccccggcgccgcccaggccgctattaaggaagatccttggaactgctacatgtgcggccacaagggcacatacggcctgctgagacggagagaggactggcctagcagactgcagatgttcttcgccaataaccacgaccaggagttcgacccccctaaggtgtaccctcccgtccccgccgagaagagaaagcccatccgggtcctgagcctgttcgatggcatcgccaccggtctgctggtgctgaaggacctgggcatccaggtggataggtacattgcctccgaggtgtgcgaggactccatcaccgtgggaatggtgcgtcatcagggcaagatcatgtacgtgggcgacgtgcggagcgtgacacagaagcatatccaggagtggggccctttcgacctggtgatcggcggcagcccttgcaatgacctgagcatcgtgaacccagcccggaagggcctgtacgagggaaccggcagactgttcttcgagttttacagactgctgcacgacgcccggcctaaggaaggcgacgaccggcccttcttttggctgttcgagaatgtggtggccatgggagtcagcgacaagcgggatattagccggttcctggagagcaaccccgtgatgatcgatgccaaggaagtgagcgccgcccaccgggccagatacttctggggcaatctgcctggcatgaacagacccctggccagcaccgtgaacgacaagctggagctgcaggagtgcctggagcacggccggatcgccaagttcagcaaggtgagaaccatcaccacccgaagcaacagcatcaaacaaggcaaggaccagcactttcctgtgttcatgaacgagaaggaggacatcctgtggtgtaccgagatggagagagtgttcgggttcccagtccactacacagatgtcagcaacatgtctagactggccagacagagactgctgggaagaagctggtccgtccctgtgatcagacacctgttcgcccctctgaaggagtacttcgcctgcgtgagcagcggcaacagcaacgccaacagccggggccccagcttctctagcggcctggtgccactgtccctgagagggagccacatgggccccatggagatctacaaaaccgtgagcgcctggaagcggcagcctgtgcgcgtgctgagcctgtttcggaatatcgataaagtcctgaaaagcctgggattcctggagagcggctctggctccggcggtggcaccctgaagtacgtggaggatgtgacaaacgtggtcagacgggatgtggagaagtggggccccttcgatctggtgtacggcagcacccaacccctgggcagctcttgtgaccggtgccctggctggtacatgtttcagttccaccggatcctgcagtacgccctgccgagacaggagtcccagcggccattcttttggattttcatggacaacttgctgctgaccgaggatgaccaggaaactaccactcggttcctgcagaccgaagccgtgaccctgcaggacgtgagaggccgggactaccagaacgccatgcgggtgtggtccaacatccctggactgaaaagcaagcacgcacctctgacccctaaagaagaggagtacctgcaggcccaggtgcggagcagaagcaagctggacgcccctaaggtggatctgctggtgaagaattgcctcctgcccctgagagagtacttcaagtatttcagccagaatagtctgcccctgggaggcagcggcggcggcttccagggcagcctgagcttcagggacgtggccgtgggcttcaccaggaaggagtggcagcagctggaccccacccagaggaccctgtacagggacgtgatgctggagaactacagccacctggtgagcgtgggctgccaggtgaccaagcccgccgtgatcagcaggctggagcagggccaggagccctggatgaaggaggaggagatcctgaggtggagcttccccgaggtgctgcaggtgggcggcccaagcagcggcgcccctcctcccagcggcggcagcccagccggctccccaacctctaccgaggagggcacctctgagtccgccacccccgagagcggccctggcacctccaccgagcccagcgagggcagcgcacccggcagccctgccggcagccccacctccacagaggagggaaccagcaccgagcccagcgaaggcagcgccccaggcaccagcaccgagcctagtgagcaggagattaaacggatcaacaagatcagaagaagacttgtgaaagacagcaacaccaagaaggccggcaagacaggccccatgaaaaccctgctggttagagtgatgacacccgatctgagagagcggctggaaaacctgagaaagaagcctgaaaatatcccccagcccatcagcaatacatctagagccaacctgaataagctgctgaccgattacaccgaaatgaagaaggcgatcctgcatgtgtactgggaagagttccagaaggaccctgtgggcctgatgagccgggtggcccagcctgccagcaagaagatcgatcagaacaagctgaaacctgagatggacgagaagggcaacctgaccaccgccggctttgcctgctctcagtgtggccagcccctgttcgtgtacaagctggagcaggtgtctgagaagggcaaggcttacaccaactacttcggacggtgcaatgtggccgagcacgaaaagctgatcctgctggcccagctgaagcccgagaaggatagcgacgaagccgtgacatatagcctgggaaagtttgggcagagggccctggatttctacagcattcatgtgaccaaggagtccacccaccccgtgaagcccctggcccagatcgccggaaacagatacgcctccggacctgtgggaaaggccctgagcgacgcatgtatgggcacaatcgcctccttcctgtctaagtaccaggacatcatcatcgaacaccagaaggtggtgaagggcaaccagaagagactggagagcctgcgggagctggccggcaaggaaaacctggaataccctagcgtgaccctgccacctcagcctcacaccaaggagggcgttgatgcctacaacgaagtgatcgcccgggtgcgaatgtgggtgaacctgaacctgtggcagaagctgaagctaagcagagatgatgccaagcctctgctgagactgaagggattcccttcctttcctctggtcgagagacaggccaacgaagtggactggtgggacatggtgtgtaacgtgaagaagctgatcaacgagaaaaaggaggatggcaaggtgttttggcagaatctggctggctacaagagacaggaagccctgagaccatacctgagcagcgaggaagatcggaagaagggaaagaaattcgctcggtaccagctgggcgacctgctgctgcacctggaaaagaagcacggcgaggactggggaaaggtgtacgacgaggcctgggagcggattgacaagaaagtggaaggcctgagcaagcacatcaagctggaagaggaacggagaagcgaggacgcccagagcaaggccgccctgaccgactggctgcgggctaaggccagcttcgtgatcgagggcctgaaggaggccgacaaggacgagttctgcagatgcgagctgaagctgcagaagtggtacggggacctgcggggaaagcccttcgccatcgaagccgagaacagcatcctggacatcagcggcttcagcaagcagtacaactgtgccttcatctggcagaaggacggcgtgaagaagctgaacctgtacctgatcatcaactacttcaagggcggcaagctgcggttcaagaagatcaaacctgaagccttcgaagccaacagattctacaccgtgatcaacaaaaagagcggcgagatcgtgcccatggaggtgaacttcaacttcgacgaccccaacctgatcatcctgcctctggcctttggcaagagacagggcagagaattcatctggaacgacctgctgtccctggaaaccggcagcctgaagctggccaacggaagagtgatcgagaagacactgtacaacagaagaacccggcaggatgagcctgccctgttcgtggccctgaccttcgagcggcgggaggtcctggactcctccaatatcaaaccaatgaacctgatcggcgtggcaagaggcgaaaacatccccgccgtgatcgccctgaccgaccccgagggctgcccactgagccggtttaaggatagcctgggaaacccaacccacatcctgagaatcggcgagagctataaggagaagcagcggaccatccaggccaagaaggaggtggagcagcggagagccggcggctacagccggaagtacgccagcaaagccaagaatctggcagacgatatggtgagaaacaccgctagagatctgctgtactacgccgtgacccaggatgccatgctgatcttcgccaacctgagccggggcttcggccggcagggcaagcggaccttcatggccgagagacagtacacacggatggaggactggctgaccgccaagctggcctacgagggcctgagcaagacctacctgtccaagacactggcccagtacacctccaagacatgcagcaactgtgggtttaccatcaccagcgccgactacgacagggtgctggagaagctgaagaagacagcaacaggctggatgaccacaattaacggcaaggagctgaaggtggagggccagattacctactacaacagatacaagagacagaacgtagtcaaggacctgtccgtcgagctggatagactgagcgaagaatctgtgaacaacgacatctcctcctggacaaagggcagaagcggagaagctctgagcctcctgaagaaaagattctcccatagacccgtgcaggagaagttcgtgtgcctgaactgcggcttcgagacacacgcagccgagcaagccgccctgaacatcgccagatcctggctgttcctgcggagccaggagtacaagaaataccagacaaacaagacaaccggcaacaccgataagagagccttcgtcgagacctggcagtccttttaccggaagaagcttaaggaggtgtggaaacctgccgtgcggtctggcggatctggcggaggctccaccagccccaagaaaaagagaaaagtctaagctgccttctgcggggcttgccttctggccatgcccttcttctctcccttgcacctgtacctcttggtctttgaataaagcctgagtaggaaggctagcaaaaaaaaaaaaaaaaaaaaaaaaaaaaaaaaaaaaaaaaaaaaaaaaaaaaaaaaaaaaaaaaaaaaaaaaaaaaaaaa

SEQ ID NO: 13199 - RNA, 5785 nt, synthetic construct
  source 1..5785: mol_type = other RNA
aggaaataagagagaaaagaagagtaagaagaaatataagagccaccatggcccctaagaagaagcgtaaagtgagccggatggaacgcctcgtctacgaggtgcggcagaagtgcagaaacatcgaggacatctgcatctcctgcggatctctgaacgtgaccctggagcacccactgttcatcggcggcatgtgccagaactgtaaaaactgttttctggagtgtgcctatcaatacgacgatgacggctaccagagctactgcaccatctgttgcggcggaagagaggtgctgatgtgtggaaataacaactgctgccggtgcttctgcgtggaatgcgtggacctgctggtgggccccggcgccgcccaggccgctattaaggaagatccttggaactgctacatgtgcggccacaagggcacatacggcctgctgagacggagagaggactggcctagcagactgcagatgttcttcgccaataaccacgaccaggagttcgacccccctaaggtgtaccctcccgtccccgccgagaagagaaagcccatccgggtcctgagcctgttcgatggcatcgccaccggtctgctggtgctgaaggacctgggcatccaggtggataggtacattgcctccgaggtgtgcgaggactccatcaccgtgggaatggtgcgtcatcagggcaagatcatgtacgtgggcgacgtgcggagcgtgacacagaagcatatccaggagtggggccctttcgacctggtgatcggcggcagcccttgcaatgacctgagcatcgtgaacccagcccggaagggcctgtacgagggaaccggcagactgttcttcgagttttacagactgctgcacgacgcccggcctaaggaaggcgacgaccggcccttcttttggctgttcgagaatgtggtggccatgggagtcagcgacaagcgggatattagccggttcctggagagcaaccccgtgatgatcgatgccaaggaagtgagcgccgcccaccgggccagatacttctggggcaatctgcctggcatgaacagacccctggccagcaccgtgaacgacaagctggagctgcaggagtgcctggagcacggccggatcgccaagttcagcaaggtgagaaccatcaccacccgaagcaacagcatcaaacaaggcaaggaccagcactttcctgtgttcatgaacgagaaggaggacatcctgtggtgtaccgagatggagagagtgttcgggttcccagtccactacacagatgtcagcaacatgtctagactggccagacagagactgctgggaagaagctggtccgtccctgtgatcagacacctgttcgcccctctgaaggagtacttcgcctgcgtgagcagcggcaacagcaacgccaacagccggggccccagcttctctagcggcctggtgccactgtccctgagagggagccacatgggccccatggagatctacaaaaccgtgagcgcctggaagcggcagcctgtgcgcgtgctgagcctgtttcggaatatcgataaagtcctgaaaagcctgggattcctggagagcggctctggctccggcggtggcaccctgaagtacgtggaggatgtgacaaacgtggtcagacgggatgtggagaagtggggccccttcgatctggtgtacggcagcacccaacccctgggcagctcttgtgaccggtgccctggctggtacatgtttcagttccaccggatcctgcagtacgccctgccgagacaggagtcccagcggccattcttttggattttcatggacaacttgctgctgaccgaggatgaccaggaaactaccactcggttcctgcagaccgaagccgtgaccctgcaggacgtgagaggccgggactaccagaacgccatgcgggtgtggtccaacatccctggactgaaaagcaagcacgcacctctgacccctaaagaagaggagtacctgcaggcccaggtgcggagcagaagcaagctggacgcccctaaggtggatctgctggtgaagaattgcctcctgcccctgagagagtacttcaagtatttcagccagaatagtctgcccctgggaggcagcggcggcggcgagatgagggtgatgttcgaggagatcaccgtgagcttcagccaggaggagtgggagtacctggacgagggccagaaggagctgtaccaggaggtgatgaaggagaaccacgagaccctgatcttcctggagaccaacctgcagttcgtgaaccccgacatgctgagcaagatcaggagggacagcaggatgagcaggaagaggaaggccaccaggagctacgccgccgacgacgaggccaagggcggcccaagcagcggcgcccctcctcccagcggcggcagcccagccggctccccaacctctaccgaggagggcacctctgagtccgccacccccgagagcggccctggcacctccaccgagcccagcgagggcagcgcacccggcagccctgccggcagccccacctccacagaggagggaaccagcaccgagcccagcgaaggcagcgccccaggcaccagcaccgagcctagtgagcaggagattaaacggatcaacaagatcagaagaagacttgtgaaagacagcaacaccaagaaggccggcaagacaggccccatgaaaaccctgctggttagagtgatgacacccgatctgagagagcggctggaaaacctgagaaagaagcctgaaaatatcccccagcccatcagcaatacatctagagccaacctgaataagctgctgaccgattacaccgaaatgaagaaggcgatcctgcatgtgtactgggaagagttccagaaggaccctgtgggcctgatgagccgggtggcccagcctgccagcaagaagatcgatcagaacaagctgaaacctgagatggacgagaagggcaacctgaccaccgccggctttgcctgctctcagtgtggccagcccctgttcgtgtacaagctggagcaggtgtctgagaagggcaaggcttacaccaactacttcggacggtgcaatgtggccgagcacgaaaagctgatcctgctggcccagctgaagcccgagaaggatagcgacgaagccgtgacatatagcctgggaaagtttgggcagagggccctggatttctacagcattcatgtgaccaaggagtccacccaccccgtgaagcccctggcccagatcgccggaaacagatacgcctccggacctgtgggaaaggccctgagcgacgcatgtatgggcacaatcgcctccttcctgtctaagtaccaggacatcatcatcgaacaccagaaggtggtgaagggcaaccagaagagactggagagcctgcgggagctggccggcaaggaaaacctggaataccctagcgtgaccctgccacctcagcctcacaccaaggagggcgttgatgcctacaacgaagtgatcgcccgggtgcgaatgtgggtgaacctgaacctgtggcagaagctgaagctaagcagagatgatgccaagcctctgctgagactgaagggattcccttcctttcctctggtcgagagacaggccaacgaagtggactggtgggacatggtgtgtaacgtgaagaagctgatcaacgagaaaaaggaggatggcaaggtgttttggcagaatctggctggctacaagagacaggaagccctgagaccatacctgagcagcgaggaagatcggaagaagggaaagaaattcgctcggtaccagctgggcgacctgctgctgcacctggaaaagaagcacggcgaggactggggaaaggtgtacgacgaggcctgggagcggattgacaagaaagtggaaggcctgagcaagcacatcaagctggaagaggaacggagaagcgaggacgcccagagcaaggccgccctgaccgactggctgcgggctaaggccagcttcgtgatcgagggcctgaaggaggccgacaaggacgagttctgcagatgcgagctgaagctgcagaagtggtacggggacctgcggggaaagcccttcgccatcgaagccgagaacagcatcctggacatcagcggcttcagcaagcagtacaactgtgccttcatctggcagaaggacggcgtgaagaagctgaacctgtacctgatcatcaactacttcaagggcggcaagctgcggttcaagaagatcaaacctgaagccttcgaagccaacagattctacaccgtgatcaacaaaaagagcggcgagatcgtgcccatggaggtgaacttcaacttcgacgaccccaacctgatcatcctgcctctggcctttggcaagagacagggcagagaattcatctggaacgacctgctgtccctggaaaccggcagcctgaagctggccaacggaagagtgatcgagaagacactgtacaacagaagaacccggcaggatgagcctgccctgttcgtggccctgaccttcgagcggcgggaggtcctggactcctccaatatcaaaccaatgaacctgatcggcgtggcaagaggcgaaaacatccccgccgtgatcgccctgaccgaccccgagggctgcccactgagccggtttaaggatagcctgggaaacccaacccacatcctgagaatcggcgagagctataaggagaagcagcggaccatccaggccaagaaggaggtggagcagcggagagccggcggctacagccggaagtacgccagcaaagccaagaatctggcagacgatatggtgagaaacaccgctagagatctgctgtactacgccgtgacccaggatgccatgctgatcttcgccaacctgagccggggcttcggccggcagggcaagcggaccttcatggccgagagacagtacacacggatggaggactggctgaccgccaagctggcctacgagggcctgagcaagacctacctgtccaagacactggcccagtacacctccaagacatgcagcaactgtgggtttaccatcaccagcgccgactacgacagggtgctggagaagctgaagaagacagcaacaggctggatgaccacaattaacggcaaggagctgaaggtggagggccagattacctactacaacagatacaagagacagaacgtagtcaaggacctgtccgtcgagctggatagactgagcgaagaatctgtgaacaacgacatctcctcctggacaaagggcagaagcggagaagctctgagcctcctgaagaaaagattctcccatagacccgtgcaggagaagttcgtgtgcctgaactgcggcttcgagacacacgcagccgagcaagccgccctgaacatcgccagatcctggctgttcctgcggagccaggagtacaagaaataccagacaaacaagacaaccggcaacaccgataagagagccttcgtcgagacctggcagtccttttaccggaagaagcttaaggaggtgtggaaacctgccgtgcggtctggcggatctggcggaggctccaccagccccaagaaaaagagaaaagtctaagctgccttctgcggggcttgccttctggccatgcccttcttctctcccttgcacctgtacctcttggtctttgaataaagcctgagtaggaaggctagcaaaaaaaaaaaaaaaaaaaaaaaaaaaaaaaaaaaaaaaaaaaaaaaaaaaaaaaaaaaaaaaaaaaaaaaaaaaaaaaa

SEQ ID NO: 13200 - RNA, 5785 nt, synthetic construct
  source 1..5785: mol_type = other RNA
aggaaataagagagaaaagaagagtaagaagaaatataagagccaccatggcccctaagaagaagcgtaaagtgagccggatggaacgcctcgtctacgaggtgcggcagaagtgcagaaacatcgaggacatctgcatctcctgcggatctctgaacgtgaccctggagcacccactgttcatcggcggcatgtgccagaactgtaaaaactgttttctggagtgtgcctatcaatacgacgatgacggctaccagagctactgcaccatctgttgcggcggaagagaggtgctgatgtgtggaaataacaactgctgccggtgcttctgcgtggaatgcgtggacctgctggtgggccccggcgccgcccaggccgctattaaggaagatccttggaactgctacatgtgcggccacaagggcacatacggcctgctgagacggagagaggactggcctagcagactgcagatgttcttcgccaataaccacgaccaggagttcgacccccctaaggtgtaccctcccgtccccgccgagaagagaaagcccatccgggtcctgagcctgttcgatggcatcgccaccggtctgctggtgctgaaggacctgggcatccaggtggataggtacattgcctccgaggtgtgcgaggactccatcaccgtgggaatggtgcgtcatcagggcaagatcatgtacgtgggcgacgtgcggagcgtgacacagaagcatatccaggagtggggccctttcgacctggtgatcggcggcagcccttgcaatgacctgagcatcgtgaacccagcccggaagggcctgtacgagggaaccggcagactgttcttcgagttttacagactgctgcacgacgcccggcctaaggaaggcgacgaccggcccttcttttggctgttcgagaatgtggtggccatgggagtcagcgacaagcgggatattagccggttcctggagagcaaccccgtgatgatcgatgccaaggaagtgagcgccgcccaccgggccagatacttctggggcaatctgcctggcatgaacagacccctggccagcaccgtgaacgacaagctggagctgcaggagtgcctggagcacggccggatcgccaagttcagcaaggtgagaaccatcaccacccgaagcaacagcatcaaacaaggcaaggaccagcactttcctgtgttcatgaacgagaaggaggacatcctgtggtgtaccgagatggagagagtgttcgggttcccagtccactacacagatgtcagcaacatgtctagactggccagacagagactgctgggaagaagctggtccgtccctgtgatcagacacctgttcgcccctctgaaggagtacttcgcctgcgtgagcagcggcaacagcaacgccaacagccggggccccagcttctctagcggcctggtgccactgtccctgagagggagccacatgggccccatggagatctacaaaaccgtgagcgcctggaagcggcagcctgtgcgcgtgctgagcctgtttcggaatatcgataaagtcctgaaaagcctgggattcctggagagcggctctggctccggcggtggcaccctgaagtacgtggaggatgtgacaaacgtggtcagacgggatgtggagaagtggggccccttcgatctggtgtacggcagcacccaacccctgggcagctcttgtgaccggtgccctggctggtacatgtttcagttccaccggatcctgcagtacgccctgccgagacaggagtcccagcggccattcttttggattttcatggacaacttgctgctgaccgaggatgaccaggaaactaccactcggttcctgcagaccgaagccgtgaccctgcaggacgtgagaggccgggactaccagaacgccatgcgggtgtggtccaacatccctggactgaaaagcaagcacgcacctctgacccctaaagaagaggagtacctgcaggcccaggtgcggagcagaagcaagctggacgcccctaaggtggatctgctggtgaagaattgcctcctgcccctgagagagtacttcaagtatttcagccagaatagtctgcccctgggaggcagcggcggcggcccccaggaggccgtgaccttcaaggacgtggtggtggacttcacccaggaggagtggaagtgcctggacagcagccagaaggagttctacagggacgtgatgctggagaactacagcaacctggtgagcctgggcctggccttccccaagccctacgtgatcgaccagctggagaggagggaggccccctggatccccgagggcgacatccccaggatcagccaccccgagaggaagaagaagggcggcccaagcagcggcgcccctcctcccagcggcggcagcccagccggctccccaacctctaccgaggagggcacctctgagtccgccacccccgagagcggccctggcacctccaccgagcccagcgagggcagcgcacccggcagccctgccggcagccccacctccacagaggagggaaccagcaccgagcccagcgaaggcagcgccccaggcaccagcaccgagcctagtgagcaggagattaaacggatcaacaagatcagaagaagacttgtgaaagacagcaacaccaagaaggccggcaagacaggccccatgaaaaccctgctggttagagtgatgacacccgatctgagagagcggctggaaaacctgagaaagaagcctgaaaatatcccccagcccatcagcaatacatctagagccaacctgaataagctgctgaccgattacaccgaaatgaagaaggcgatcctgcatgtgtactgggaagagttccagaaggaccctgtgggcctgatgagccgggtggcccagcctgccagcaagaagatcgatcagaacaagctgaaacctgagatggacgagaagggcaacctgaccaccgccggctttgcctgctctcagtgtggccagcccctgttcgtgtacaagctggagcaggtgtctgagaagggcaaggcttacaccaactacttcggacggtgcaatgtggccgagcacgaaaagctgatcctgctggcccagctgaagcccgagaaggatagcgacgaagccgtgacatatagcctgggaaagtttgggcagagggccctggatttctacagcattcatgtgaccaaggagtccacccaccccgtgaagcccctggcccagatcgccggaaacagatacgcctccggacctgtgggaaaggccctgagcgacgcatgtatgggcacaatcgcctccttcctgtctaagtaccaggacatcatcatcgaacaccagaaggtggtgaagggcaaccagaagagactggagagcctgcgggagctggccggcaaggaaaacctggaataccctagcgtgaccctgccacctcagcctcacaccaaggagggcgttgatgcctacaacgaagtgatcgcccgggtgcgaatgtgggtgaacctgaacctgtggcagaagctgaagctaagcagagatgatgccaagcctctgctgagactgaagggattcccttcctttcctctggtcgagagacaggccaacgaagtggactggtgggacatggtgtgtaacgtgaagaagctgatcaacgagaaaaaggaggatggcaaggtgttttggcagaatctggctggctacaagagacaggaagccctgagaccatacctgagcagcgaggaagatcggaagaagggaaagaaattcgctcggtaccagctgggcgacctgctgctgcacctggaaaagaagcacggcgaggactggggaaaggtgtacgacgaggcctgggagcggattgacaagaaagtggaaggcctgagcaagcacatcaagctggaagaggaacggagaagcgaggacgcccagagcaaggccgccctgaccgactggctgcgggctaaggccagcttcgtgatcgagggcctgaaggaggccgacaaggacgagttctgcagatgcgagctgaagctgcagaagtggtacggggacctgcggggaaagcccttcgccatcgaagccgagaacagcatcctggacatcagcggcttcagcaagcagtacaactgtgccttcatctggcagaaggacggcgtgaagaagctgaacctgtacctgatcatcaactacttcaagggcggcaagctgcggttcaagaagatcaaacctgaagccttcgaagccaacagattctacaccgtgatcaacaaaaagagcggcgagatcgtgcccatggaggtgaacttcaacttcgacgaccccaacctgatcatcctgcctctggcctttggcaagagacagggcagagaattcatctggaacgacctgctgtccctggaaaccggcagcctgaagctggccaacggaagagtgatcgagaagacactgtacaacagaagaacccggcaggatgagcctgccctgttcgtggccctgaccttcgagcggcgggaggtcctggactcctccaatatcaaaccaatgaacctgatcggcgtggcaagaggcgaaaacatccccgccgtgatcgccctgaccgaccccgagggctgcccactgagccggtttaaggatagcctgggaaacccaacccacatcctgagaatcggcgagagctataaggagaagcagcggaccatccaggccaagaaggaggtggagcagcggagagccggcggctacagccggaagtacgccagcaaagccaagaatctggcagacgatatggtgagaaacaccgctagagatctgctgtactacgccgtgacccaggatgccatgctgatcttcgccaacctgagccggggcttcggccggcagggcaagcggaccttcatggccgagagacagtacacacggatggaggactggctgaccgccaagctggcctacgagggcctgagcaagacctacctgtccaagacactggcccagtacacctccaagacatgcagcaactgtgggtttaccatcaccagcgccgactacgacagggtgctggagaagctgaagaagacagcaacaggctggatgaccacaattaacggcaaggagctgaaggtggagggccagattacctactacaacagatacaagagacagaacgtagtcaaggacctgtccgtcgagctggatagactgagcgaagaatctgtgaacaacgacatctcctcctggacaaagggcagaagcggagaagctctgagcctcctgaagaaaagattctcccatagacccgtgcaggagaagttcgtgtgcctgaactgcggcttcgagacacacgcagccgagcaagccgccctgaacatcgccagatcctggctgttcctgcggagccaggagtacaagaaataccagacaaacaagacaaccggcaacaccgataagagagccttcgtcgagacctggcagtccttttaccggaagaagcttaaggaggtgtggaaacctgccgtgcggtctggcggatctggcggaggctccaccagccccaagaaaaagagaaaagtctaagctgccttctgcggggcttgccttctggccatgcccttcttctctcccttgcacctgtacctcttggtctttgaataaagcctgagtaggaaggctagcaaaaaaaaaaaaaaaaaaaaaaaaaaaaaaaaaaaaaaaaaaaaaaaaaaaaaaaaaaaaaaaaaaaaaaaaaaaaaaaa

SEQ ID NO: 13201 - RNA, 5785 nt, synthetic construct
  source 1..5785: mol_type = other RNA
aggaaataagagagaaaagaagagtaagaagaaatataagagccaccatggcccctaagaagaagcgtaaagtgagccggatggaacgcctcgtctacgaggtgcggcagaagtgcagaaacatcgaggacatctgcatctcctgcggatctctgaacgtgaccctggagcacccactgttcatcggcggcatgtgccagaactgtaaaaactgttttctggagtgtgcctatcaatacgacgatgacggctaccagagctactgcaccatctgttgcggcggaagagaggtgctgatgtgtggaaataacaactgctgccggtgcttctgcgtggaatgcgtggacctgctggtgggccccggcgccgcccaggccgctattaaggaagatccttggaactgctacatgtgcggccacaagggcacatacggcctgctgagacggagagaggactggcctagcagactgcagatgttcttcgccaataaccacgaccaggagttcgacccccctaaggtgtaccctcccgtccccgccgagaagagaaagcccatccgggtcctgagcctgttcgatggcatcgccaccggtctgctggtgctgaaggacctgggcatccaggtggataggtacattgcctccgaggtgtgcgaggactccatcaccgtgggaatggtgcgtcatcagggcaagatcatgtacgtgggcgacgtgcggagcgtgacacagaagcatatccaggagtggggccctttcgacctggtgatcggcggcagcccttgcaatgacctgagcatcgtgaacccagcccggaagggcctgtacgagggaaccggcagactgttcttcgagttttacagactgctgcacgacgcccggcctaaggaaggcgacgaccggcccttcttttggctgttcgagaatgtggtggccatgggagtcagcgacaagcgggatattagccggttcctggagagcaaccccgtgatgatcgatgccaaggaagtgagcgccgcccaccgggccagatacttctggggcaatctgcctggcatgaacagacccctggccagcaccgtgaacgacaagctggagctgcaggagtgcctggagcacggccggatcgccaagttcagcaaggtgagaaccatcaccacccgaagcaacagcatcaaacaaggcaaggaccagcactttcctgtgttcatgaacgagaaggaggacatcctgtggtgtaccgagatggagagagtgttcgggttcccagtccactacacagatgtcagcaacatgtctagactggccagacagagactgctgggaagaagctggtccgtccctgtgatcagacacctgttcgcccctctgaaggagtacttcgcctgcgtgagcagcggcaacagcaacgccaacagccggggccccagcttctctagcggcctggtgccactgtccctgagagggagccacatgggccccatggagatctacaaaaccgtgagcgcctggaagcggcagcctgtgcgcgtgctgagcctgtttcggaatatcgataaagtcctgaaaagcctgggattcctggagagcggctctggctccggcggtggcaccctgaagtacgtggaggatgtgacaaacgtggtcagacgggatgtggagaagtggggccccttcgatctggtgtacggcagcacccaacccctgggcagctcttgtgaccggtgccctggctggtacatgtttcagttccaccggatcctgcagtacgccctgccgagacaggagtcccagcggccattcttttggattttcatggacaacttgctgctgaccgaggatgaccaggaaactaccactcggttcctgcagaccgaagccgtgaccctgcaggacgtgagaggccgggactaccagaacgccatgcgggtgtggtccaacatccctggactgaaaagcaagcacgcacctctgacccctaaagaagaggagtacctgcaggcccaggtgcggagcagaagcaagctggacgcccctaaggtggatctgctggtgaagaattgcctcctgcccctgagagagtacttcaagtatttcagccagaatagtctgcccctgggaggcagcggcggcggcccccagggccccgtgaccttccaggacgtggccgtggtgttcacccaggaggagtggaggtacctggaccccagccagaaggagctgtacagggacgtgatgctggagaactacaggaacctgctgtacctgggcctggtggtgagcaagcccaacgtgatctacaggttcgagcagggcgaggccagctggaggcccgaccagagggacagcggcagcacctgcagcgacgaggagaccggcggcggcccaagcagcggcgcccctcctcccagcggcggcagcccagccggctccccaacctctaccgaggagggcacctctgagtccgccacccccgagagcggccctggcacctccaccgagcccagcgagggcagcgcacccggcagccctgccggcagccccacctccacagaggagggaaccagcaccgagcccagcgaaggcagcgccccaggcaccagcaccgagcctagtgagcaggagattaaacggatcaacaagatcagaagaagacttgtgaaagacagcaacaccaagaaggccggcaagacaggccccatgaaaaccctgctggttagagtgatgacacccgatctgagagagcggctggaaaacctgagaaagaagcctgaaaatatcccccagcccatcagcaatacatctagagccaacctgaataagctgctgaccgattacaccgaaatgaagaaggcgatcctgcatgtgtactgggaagagttccagaaggaccctgtgggcctgatgagccgggtggcccagcctgccagcaagaagatcgatcagaacaagctgaaacctgagatggacgagaagggcaacctgaccaccgccggctttgcctgctctcagtgtggccagcccctgttcgtgtacaagctggagcaggtgtctgagaagggcaaggcttacaccaactacttcggacggtgcaatgtggccgagcacgaaaagctgatcctgctggcccagctgaagcccgagaaggatagcgacgaagccgtgacatatagcctgggaaagtttgggcagagggccctggatttctacagcattcatgtgaccaaggagtccacccaccccgtgaagcccctggcccagatcgccggaaacagatacgcctccggacctgtgggaaaggccctgagcgacgcatgtatgggcacaatcgcctccttcctgtctaagtaccaggacatcatcatcgaacaccagaaggtggtgaagggcaaccagaagagactggagagcctgcgggagctggccggcaaggaaaacctggaataccctagcgtgaccctgccacctcagcctcacaccaaggagggcgttgatgcctacaacgaagtgatcgcccgggtgcgaatgtgggtgaacctgaacctgtggcagaagctgaagctaagcagagatgatgccaagcctctgctgagactgaagggattcccttcctttcctctggtcgagagacaggccaacgaagtggactggtgggacatggtgtgtaacgtgaagaagctgatcaacgagaaaaaggaggatggcaaggtgttttggcagaatctggctggctacaagagacaggaagccctgagaccatacctgagcagcgaggaagatcggaagaagggaaagaaattcgctcggtaccagctgggcgacctgctgctgcacctggaaaagaagcacggcgaggactggggaaaggtgtacgacgaggcctgggagcggattgacaagaaagtggaaggcctgagcaagcacatcaagctggaagaggaacggagaagcgaggacgcccagagcaaggccgccctgaccgactggctgcgggctaaggccagcttcgtgatcgagggcctgaaggaggccgacaaggacgagttctgcagatgcgagctgaagctgcagaagtggtacggggacctgcggggaaagcccttcgccatcgaagccgagaacagcatcctggacatcagcggcttcagcaagcagtacaactgtgccttcatctggcagaaggacggcgtgaagaagctgaacctgtacctgatcatcaactacttcaagggcggcaagctgcggttcaagaagatcaaacctgaagccttcgaagccaacagattctacaccgtgatcaacaaaaagagcggcgagatcgtgcccatggaggtgaacttcaacttcgacgaccccaacctgatcatcctgcctctggcctttggcaagagacagggcagagaattcatctggaacgacctgctgtccctggaaaccggcagcctgaagctggccaacggaagagtgatcgagaagacactgtacaacagaagaacccggcaggatgagcctgccctgttcgtggccctgaccttcgagcggcgggaggtcctggactcctccaatatcaaaccaatgaacctgatcggcgtggcaagaggcgaaaacatccccgccgtgatcgccctgaccgaccccgagggctgcccactgagccggtttaaggatagcctgggaaacccaacccacatcctgagaatcggcgagagctataaggagaagcagcggaccatccaggccaagaaggaggtggagcagcggagagccggcggctacagccggaagtacgccagcaaagccaagaatctggcagacgatatggtgagaaacaccgctagagatctgctgtactacgccgtgacccaggatgccatgctgatcttcgccaacctgagccggggcttcggccggcagggcaagcggaccttcatggccgagagacagtacacacggatggaggactggctgaccgccaagctggcctacgagggcctgagcaagacctacctgtccaagacactggcccagtacacctccaagacatgcagcaactgtgggtttaccatcaccagcgccgactacgacagggtgctggagaagctgaagaagacagcaacaggctggatgaccacaattaacggcaaggagctgaaggtggagggccagattacctactacaacagatacaagagacagaacgtagtcaaggacctgtccgtcgagctggatagactgagcgaagaatctgtgaacaacgacatctcctcctggacaaagggcagaagcggagaagctctgagcctcctgaagaaaagattctcccatagacccgtgcaggagaagttcgtgtgcctgaactgcggcttcgagacacacgcagccgagcaagccgccctgaacatcgccagatcctggctgttcctgcggagccaggagtacaagaaataccagacaaacaagacaaccggcaacaccgataagagagccttcgtcgagacctggcagtccttttaccggaagaagcttaaggaggtgtggaaacctgccgtgcggtctggcggatctggcggaggctccaccagccccaagaaaaagagaaaagtctaagctgccttctgcggggcttgccttctggccatgcccttcttctctcccttgcacctgtacctcttggtctttgaataaagcctgagtaggaaggctagcaaaaaaaaaaaaaaaaaaaaaaaaaaaaaaaaaaaaaaaaaaaaaaaaaaaaaaaaaaaaaaaaaaaaaaaaaaaaaaaa

SEQ ID NO: 13202 - RNA, 5785 nt, synthetic construct
  source 1..5785: mol_type = other RNA
aggaaataagagagaaaagaagagtaagaagaaatataagagccaccatggcccctaagaagaagcgtaaagtgagccggatggaacgcctcgtctacgaggtgcggcagaagtgcagaaacatcgaggacatctgcatctcctgcggatctctgaacgtgaccctggagcacccactgttcatcggcggcatgtgccagaactgtaaaaactgttttctggagtgtgcctatcaatacgacgatgacggctaccagagctactgcaccatctgttgcggcggaagagaggtgctgatgtgtggaaataacaactgctgccggtgcttctgcgtggaatgcgtggacctgctggtgggccccggcgccgcccaggccgctattaaggaagatccttggaactgctacatgtgcggccacaagggcacatacggcctgctgagacggagagaggactggcctagcagactgcagatgttcttcgccaataaccacgaccaggagttcgacccccctaaggtgtaccctcccgtccccgccgagaagagaaagcccatccgggtcctgagcctgttcgatggcatcgccaccggtctgctggtgctgaaggacctgggcatccaggtggataggtacattgcctccgaggtgtgcgaggactccatcaccgtgggaatggtgcgtcatcagggcaagatcatgtacgtgggcgacgtgcggagcgtgacacagaagcatatccaggagtggggccctttcgacctggtgatcggcggcagcccttgcaatgacctgagcatcgtgaacccagcccggaagggcctgtacgagggaaccggcagactgttcttcgagttttacagactgctgcacgacgcccggcctaaggaaggcgacgaccggcccttcttttggctgttcgagaatgtggtggccatgggagtcagcgacaagcgggatattagccggttcctggagagcaaccccgtgatgatcgatgccaaggaagtgagcgccgcccaccgggccagatacttctggggcaatctgcctggcatgaacagacccctggccagcaccgtgaacgacaagctggagctgcaggagtgcctggagcacggccggatcgccaagttcagcaaggtgagaaccatcaccacccgaagcaacagcatcaaacaaggcaaggaccagcactttcctgtgttcatgaacgagaaggaggacatcctgtggtgtaccgagatggagagagtgttcgggttcccagtccactacacagatgtcagcaacatgtctagactggccagacagagactgctgggaagaagctggtccgtccctgtgatcagacacctgttcgcccctctgaaggagtacttcgcctgcgtgagcagcggcaacagcaacgccaacagccggggccccagcttctctagcggcctggtgccactgtccctgagagggagccacatgggccccatggagatctacaaaaccgtgagcgcctggaagcggcagcctgtgcgcgtgctgagcctgtttcggaatatcgataaagtcctgaaaagcctgggattcctggagagcggctctggctccggcggtggcaccctgaagtacgtggaggatgtgacaaacgtggtcagacgggatgtggagaagtggggccccttcgatctggtgtacggcagcacccaacccctgggcagctcttgtgaccggtgccctggctggtacatgtttcagttccaccggatcctgcagtacgccctgccgagacaggagtcccagcggccattcttttggattttcatggacaacttgctgctgaccgaggatgaccaggaaactaccactcggttcctgcagaccgaagccgtgaccctgcaggacgtgagaggccgggactaccagaacgccatgcgggtgtggtccaacatccctggactgaaaagcaagcacgcacctctgacccctaaagaagaggagtacctgcaggcccaggtgcggagcagaagcaagctggacgcccctaaggtggatctgctggtgaagaattgcctcctgcccctgagagagtacttcaagtatttcagccagaatagtctgcccctgggaggcagcggcggcggcctgcaggtgagcgtgagcttcgaggacgtgaccgtggacttcagcagggaggagtggcagcacctggacagcgcccagaggaggctgtaccaggacgtgatgctggagaactacagccacctgctgagcctgggctacgaggtgcccaagcccgaggtgatcttcaagctggagcagggcgaggagccctgggccctgaaggagaagaccctgcaccacagctgcagcgacgacaccaccctgggcggcccaagcagcggcgcccctcctcccagcggcggcagcccagccggctccccaacctctaccgaggagggcacctctgagtccgccacccccgagagcggccctggcacctccaccgagcccagcgagggcagcgcacccggcagccctgccggcagccccacctccacagaggagggaaccagcaccgagcccagcgaaggcagcgccccaggcaccagcaccgagcctagtgagcaggagattaaacggatcaacaagatcagaagaagacttgtgaaagacagcaacaccaagaaggccggcaagacaggccccatgaaaaccctgctggttagagtgatgacacccgatctgagagagcggctggaaaacctgagaaagaagcctgaaaatatcccccagcccatcagcaatacatctagagccaacctgaataagctgctgaccgattacaccgaaatgaagaaggcgatcctgcatgtgtactgggaagagttccagaaggaccctgtgggcctgatgagccgggtggcccagcctgccagcaagaagatcgatcagaacaagctgaaacctgagatggacgagaagggcaacctgaccaccgccggctttgcctgctctcagtgtggccagcccctgttcgtgtacaagctggagcaggtgtctgagaagggcaaggcttacaccaactacttcggacggtgcaatgtggccgagcacgaaaagctgatcctgctggcccagctgaagcccgagaaggatagcgacgaagccgtgacatatagcctgggaaagtttgggcagagggccctggatttctacagcattcatgtgaccaaggagtccacccaccccgtgaagcccctggcccagatcgccggaaacagatacgcctccggacctgtgggaaaggccctgagcgacgcatgtatgggcacaatcgcctccttcctgtctaagtaccaggacatcatcatcgaacaccagaaggtggtgaagggcaaccagaagagactggagagcctgcgggagctggccggcaaggaaaacctggaataccctagcgtgaccctgccacctcagcctcacaccaaggagggcgttgatgcctacaacgaagtgatcgcccgggtgcgaatgtgggtgaacctgaacctgtggcagaagctgaagctaagcagagatgatgccaagcctctgctgagactgaagggattcccttcctttcctctggtcgagagacaggccaacgaagtggactggtgggacatggtgtgtaacgtgaagaagctgatcaacgagaaaaaggaggatggcaaggtgttttggcagaatctggctggctacaagagacaggaagccctgagaccatacctgagcagcgaggaagatcggaagaagggaaagaaattcgctcggtaccagctgggcgacctgctgctgcacctggaaaagaagcacggcgaggactggggaaaggtgtacgacgaggcctgggagcggattgacaagaaagtggaaggcctgagcaagcacatcaagctggaagaggaacggagaagcgaggacgcccagagcaaggccgccctgaccgactggctgcgggctaaggccagcttcgtgatcgagggcctgaaggaggccgacaaggacgagttctgcagatgcgagctgaagctgcagaagtggtacggggacctgcggggaaagcccttcgccatcgaagccgagaacagcatcctggacatcagcggcttcagcaagcagtacaactgtgccttcatctggcagaaggacggcgtgaagaagctgaacctgtacctgatcatcaactacttcaagggcggcaagctgcggttcaagaagatcaaacctgaagccttcgaagccaacagattctacaccgtgatcaacaaaaagagcggcgagatcgtgcccatggaggtgaacttcaacttcgacgaccccaacctgatcatcctgcctctggcctttggcaagagacagggcagagaattcatctggaacgacctgctgtccctggaaaccggcagcctgaagctggccaacggaagagtgatcgagaagacactgtacaacagaagaacccggcaggatgagcctgccctgttcgtggccctgaccttcgagcggcgggaggtcctggactcctccaatatcaaaccaatgaacctgatcggcgtggcaagaggcgaaaacatccccgccgtgatcgccctgaccgaccccgagggctgcccactgagccggtttaaggatagcctgggaaacccaacccacatcctgagaatcggcgagagctataaggagaagcagcggaccatccaggccaagaaggaggtggagcagcggagagccggcggctacagccggaagtacgccagcaaagccaagaatctggcagacgatatggtgagaaacaccgctagagatctgctgtactacgccgtgacccaggatgccatgctgatcttcgccaacctgagccggggcttcggccggcagggcaagcggaccttcatggccgagagacagtacacacggatggaggactggctgaccgccaagctggcctacgagggcctgagcaagacctacctgtccaagacactggcccagtacacctccaagacatgcagcaactgtgggtttaccatcaccagcgccgactacgacagggtgctggagaagctgaagaagacagcaacaggctggatgaccacaattaacggcaaggagctgaaggtggagggccagattacctactacaacagatacaagagacagaacgtagtcaaggacctgtccgtcgagctggatagactgagcgaagaatctgtgaacaacgacatctcctcctggacaaagggcagaagcggagaagctctgagcctcctgaagaaaagattctcccatagacccgtgcaggagaagttcgtgtgcctgaactgcggcttcgagacacacgcagccgagcaagccgccctgaacatcgccagatcctggctgttcctgcggagccaggagtacaagaaataccagacaaacaagacaaccggcaacaccgataagagagccttcgtcgagacctggcagtccttttaccggaagaagcttaaggaggtgtggaaacctgccgtgcggtctggcggatctggcggaggctccaccagccccaagaaaaagagaaaagtctaagctgccttctgcggggcttgccttctggccatgcccttcttctctcccttgcacctgtacctcttggtctttgaataaagcctgagtaggaaggctagcaaaaaaaaaaaaaaaaaaaaaaaaaaaaaaaaaaaaaaaaaaaaaaaaaaaaaaaaaaaaaaaaaaaaaaaaaaaaaaaa

SEQ ID NO: 13203 - RNA, 5785 nt, synthetic construct
  source 1..5785: mol_type = other RNA
aggaaataagagagaaaagaagagtaagaagaaatataagagccaccatggcccctaagaagaagcgtaaagtgagccggatggaacgcctcgtctacgaggtgcggcagaagtgcagaaacatcgaggacatctgcatctcctgcggatctctgaacgtgaccctggagcacccactgttcatcggcggcatgtgccagaactgtaaaaactgttttctggagtgtgcctatcaatacgacgatgacggctaccagagctactgcaccatctgttgcggcggaagagaggtgctgatgtgtggaaataacaactgctgccggtgcttctgcgtggaatgcgtggacctgctggtgggccccggcgccgcccaggccgctattaaggaagatccttggaactgctacatgtgcggccacaagggcacatacggcctgctgagacggagagaggactggcctagcagactgcagatgttcttcgccaataaccacgaccaggagttcgacccccctaaggtgtaccctcccgtccccgccgagaagagaaagcccatccgggtcctgagcctgttcgatggcatcgccaccggtctgctggtgctgaaggacctgggcatccaggtggataggtacattgcctccgaggtgtgcgaggactccatcaccgtgggaatggtgcgtcatcagggcaagatcatgtacgtgggcgacgtgcggagcgtgacacagaagcatatccaggagtggggccctttcgacctggtgatcggcggcagcccttgcaatgacctgagcatcgtgaacccagcccggaagggcctgtacgagggaaccggcagactgttcttcgagttttacagactgctgcacgacgcccggcctaaggaaggcgacgaccggcccttcttttggctgttcgagaatgtggtggccatgggagtcagcgacaagcgggatattagccggttcctggagagcaaccccgtgatgatcgatgccaaggaagtgagcgccgcccaccgggccagatacttctggggcaatctgcctggcatgaacagacccctggccagcaccgtgaacgacaagctggagctgcaggagtgcctggagcacggccggatcgccaagttcagcaaggtgagaaccatcaccacccgaagcaacagcatcaaacaaggcaaggaccagcactttcctgtgttcatgaacgagaaggaggacatcctgtggtgtaccgagatggagagagtgttcgggttcccagtccactacacagatgtcagcaacatgtctagactggccagacagagactgctgggaagaagctggtccgtccctgtgatcagacacctgttcgcccctctgaaggagtacttcgcctgcgtgagcagcggcaacagcaacgccaacagccggggccccagcttctctagcggcctggtgccactgtccctgagagggagccacatgggccccatggagatctacaaaaccgtgagcgcctggaagcggcagcctgtgcgcgtgctgagcctgtttcggaatatcgataaagtcctgaaaagcctgggattcctggagagcggctctggctccggcggtggcaccctgaagtacgtggaggatgtgacaaacgtggtcagacgggatgtggagaagtggggccccttcgatctggtgtacggcagcacccaacccctgggcagctcttgtgaccggtgccctggctggtacatgtttcagttccaccggatcctgcagtacgccctgccgagacaggagtcccagcggccattcttttggattttcatggacaacttgctgctgaccgaggatgaccaggaaactaccactcggttcctgcagaccgaagccgtgaccctgcaggacgtgagaggccgggactaccagaacgccatgcgggtgtggtccaacatccctggactgaaaagcaagcacgcacctctgacccctaaagaagaggagtacctgcaggcccaggtgcggagcagaagcaagctggacgcccctaaggtggatctgctggtgaagaattgcctcctgcccctgagagagtacttcaagtatttcagccagaatagtctgcccctgggaggcagcggcggcggcgcccagggcctggtgcccttcgaggaggtggccgtgtacttcaccaggaccgagtgggccctgctggaccccgcccagagggccctgtacagggccgtgatgcaggagaactacgagaacgtgaccagcctgggcttcgccgtgagcaagcccgacgtgatcagccagctggagaggggcgaggagccctgggtgcccgagctgcagggcagcgagcacagggagatcctgggcggcaccggcggcggcccaagcagcggcgcccctcctcccagcggcggcagcccagccggctccccaacctctaccgaggagggcacctctgagtccgccacccccgagagcggccctggcacctccaccgagcccagcgagggcagcgcacccggcagccctgccggcagccccacctccacagaggagggaaccagcaccgagcccagcgaaggcagcgccccaggcaccagcaccgagcctagtgagcaggagattaaacggatcaacaagatcagaagaagacttgtgaaagacagcaacaccaagaaggccggcaagacaggccccatgaaaaccctgctggttagagtgatgacacccgatctgagagagcggctggaaaacctgagaaagaagcctgaaaatatcccccagcccatcagcaatacatctagagccaacctgaataagctgctgaccgattacaccgaaatgaagaaggcgatcctgcatgtgtactgggaagagttccagaaggaccctgtgggcctgatgagccgggtggcccagcctgccagcaagaagatcgatcagaacaagctgaaacctgagatggacgagaagggcaacctgaccaccgccggctttgcctgctctcagtgtggccagcccctgttcgtgtacaagctggagcaggtgtctgagaagggcaaggcttacaccaactacttcggacggtgcaatgtggccgagcacgaaaagctgatcctgctggcccagctgaagcccgagaaggatagcgacgaagccgtgacatatagcctgggaaagtttgggcagagggccctggatttctacagcattcatgtgaccaaggagtccacccaccccgtgaagcccctggcccagatcgccggaaacagatacgcctccggacctgtgggaaaggccctgagcgacgcatgtatgggcacaatcgcctccttcctgtctaagtaccaggacatcatcatcgaacaccagaaggtggtgaagggcaaccagaagagactggagagcctgcgggagctggccggcaaggaaaacctggaataccctagcgtgaccctgccacctcagcctcacaccaaggagggcgttgatgcctacaacgaagtgatcgcccgggtgcgaatgtgggtgaacctgaacctgtggcagaagctgaagctaagcagagatgatgccaagcctctgctgagactgaagggattcccttcctttcctctggtcgagagacaggccaacgaagtggactggtgggacatggtgtgtaacgtgaagaagctgatcaacgagaaaaaggaggatggcaaggtgttttggcagaatctggctggctacaagagacaggaagccctgagaccatacctgagcagcgaggaagatcggaagaagggaaagaaattcgctcggtaccagctgggcgacctgctgctgcacctggaaaagaagcacggcgaggactggggaaaggtgtacgacgaggcctgggagcggattgacaagaaagtggaaggcctgagcaagcacatcaagctggaagaggaacggagaagcgaggacgcccagagcaaggccgccctgaccgactggctgcgggctaaggccagcttcgtgatcgagggcctgaaggaggccgacaaggacgagttctgcagatgcgagctgaagctgcagaagtggtacggggacctgcggggaaagcccttcgccatcgaagccgagaacagcatcctggacatcagcggcttcagcaagcagtacaactgtgccttcatctggcagaaggacggcgtgaagaagctgaacctgtacctgatcatcaactacttcaagggcggcaagctgcggttcaagaagatcaaacctgaagccttcgaagccaacagattctacaccgtgatcaacaaaaagagcggcgagatcgtgcccatggaggtgaacttcaacttcgacgaccccaacctgatcatcctgcctctggcctttggcaagagacagggcagagaattcatctggaacgacctgctgtccctggaaaccggcagcctgaagctggccaacggaagagtgatcgagaagacactgtacaacagaagaacccggcaggatgagcctgccctgttcgtggccctgaccttcgagcggcgggaggtcctggactcctccaatatcaaaccaatgaacctgatcggcgtggcaagaggcgaaaacatccccgccgtgatcgccctgaccgaccccgagggctgcccactgagccggtttaaggatagcctgggaaacccaacccacatcctgagaatcggcgagagctataaggagaagcagcggaccatccaggccaagaaggaggtggagcagcggagagccggcggctacagccggaagtacgccagcaaagccaagaatctggcagacgatatggtgagaaacaccgctagagatctgctgtactacgccgtgacccaggatgccatgctgatcttcgccaacctgagccggggcttcggccggcagggcaagcggaccttcatggccgagagacagtacacacggatggaggactggctgaccgccaagctggcctacgagggcctgagcaagacctacctgtccaagacactggcccagtacacctccaagacatgcagcaactgtgggtttaccatcaccagcgccgactacgacagggtgctggagaagctgaagaagacagcaacaggctggatgaccacaattaacggcaaggagctgaaggtggagggccagattacctactacaacagatacaagagacagaacgtagtcaaggacctgtccgtcgagctggatagactgagcgaagaatctgtgaacaacgacatctcctcctggacaaagggcagaagcggagaagctctgagcctcctgaagaaaagattctcccatagacccgtgcaggagaagttcgtgtgcctgaactgcggcttcgagacacacgcagccgagcaagccgccctgaacatcgccagatcctggctgttcctgcggagccaggagtacaagaaataccagacaaacaagacaaccggcaacaccgataagagagccttcgtcgagacctggcagtccttttaccggaagaagcttaaggaggtgtggaaacctgccgtgcggtctggcggatctggcggaggctccaccagccccaagaaaaagagaaaagtctaagctgccttctgcggggcttgccttctggccatgcccttcttctctcccttgcacctgtacctcttggtctttgaataaagcctgagtaggaaggctagcaaaaaaaaaaaaaaaaaaaaaaaaaaaaaaaaaaaaaaaaaaaaaaaaaaaaaaaaaaaaaaaaaaaaaaaaaaaaaaaa

SEQ ID NO: 13204 - RNA, 5785 nt, synthetic construct
  source 1..5785: mol_type = other RNA
aggaaataagagagaaaagaagagtaagaagaaatataagagccaccatggcccctaagaagaagcgtaaagtgagccggatggaacgcctcgtctacgaggtgcggcagaagtgcagaaacatcgaggacatctgcatctcctgcggatctctgaacgtgaccctggagcacccactgttcatcggcggcatgtgccagaactgtaaaaactgttttctggagtgtgcctatcaatacgacgatgacggctaccagagctactgcaccatctgttgcggcggaagagaggtgctgatgtgtggaaataacaactgctgccggtgcttctgcgtggaatgcgtggacctgctggtgggccccggcgccgcccaggccgctattaaggaagatccttggaactgctacatgtgcggccacaagggcacatacggcctgctgagacggagagaggactggcctagcagactgcagatgttcttcgccaataaccacgaccaggagttcgacccccctaaggtgtaccctcccgtccccgccgagaagagaaagcccatccgggtcctgagcctgttcgatggcatcgccaccggtctgctggtgctgaaggacctgggcatccaggtggataggtacattgcctccgaggtgtgcgaggactccatcaccgtgggaatggtgcgtcatcagggcaagatcatgtacgtgggcgacgtgcggagcgtgacacagaagcatatccaggagtggggccctttcgacctggtgatcggcggcagcccttgcaatgacctgagcatcgtgaacccagcccggaagggcctgtacgagggaaccggcagactgttcttcgagttttacagactgctgcacgacgcccggcctaaggaaggcgacgaccggcccttcttttggctgttcgagaatgtggtggccatgggagtcagcgacaagcgggatattagccggttcctggagagcaaccccgtgatgatcgatgccaaggaagtgagcgccgcccaccgggccagatacttctggggcaatctgcctggcatgaacagacccctggccagcaccgtgaacgacaagctggagctgcaggagtgcctggagcacggccggatcgccaagttcagcaaggtgagaaccatcaccacccgaagcaacagcatcaaacaaggcaaggaccagcactttcctgtgttcatgaacgagaaggaggacatcctgtggtgtaccgagatggagagagtgttcgggttcccagtccactacacagatgtcagcaacatgtctagactggccagacagagactgctgggaagaagctggtccgtccctgtgatcagacacctgttcgcccctctgaaggagtacttcgcctgcgtgagcagcggcaacagcaacgccaacagccggggccccagcttctctagcggcctggtgccactgtccctgagagggagccacatgggccccatggagatctacaaaaccgtgagcgcctggaagcggcagcctgtgcgcgtgctgagcctgtttcggaatatcgataaagtcctgaaaagcctgggattcctggagagcggctctggctccggcggtggcaccctgaagtacgtggaggatgtgacaaacgtggtcagacgggatgtggagaagtggggccccttcgatctggtgtacggcagcacccaacccctgggcagctcttgtgaccggtgccctggctggtacatgtttcagttccaccggatcctgcagtacgccctgccgagacaggagtcccagcggccattcttttggattttcatggacaacttgctgctgaccgaggatgaccaggaaactaccactcggttcctgcagaccgaagccgtgaccctgcaggacgtgagaggccgggactaccagaacgccatgcgggtgtggtccaacatccctggactgaaaagcaagcacgcacctctgacccctaaagaagaggagtacctgcaggcccaggtgcggagcagaagcaagctggacgcccctaaggtggatctgctggtgaagaattgcctcctgcccctgagagagtacttcaagtatttcagccagaatagtctgcccctgggaggcagcggcggcggcagccagggcagcgtgagcttcaaggacgtgaccgtggacttcacccaggaggagtggcagcagctggaccccgcccagaaggccctgtacagggacgtgatgctggagaactactgccacttcgtgagcgtgggcttccacatgaccaagcccgacatgatcaggaagctggagcagggcgaggagctgtggacccagaggatcttccccagctacagctacctggccgaggacggcaagaccggcggcccaagcagcggcgcccctcctcccagcggcggcagcccagccggctccccaacctctaccgaggagggcacctctgagtccgccacccccgagagcggccctggcacctccaccgagcccagcgagggcagcgcacccggcagccctgccggcagccccacctccacagaggagggaaccagcaccgagcccagcgaaggcagcgccccaggcaccagcaccgagcctagtgagcaggagattaaacggatcaacaagatcagaagaagacttgtgaaagacagcaacaccaagaaggccggcaagacaggccccatgaaaaccctgctggttagagtgatgacacccgatctgagagagcggctggaaaacctgagaaagaagcctgaaaatatcccccagcccatcagcaatacatctagagccaacctgaataagctgctgaccgattacaccgaaatgaagaaggcgatcctgcatgtgtactgggaagagttccagaaggaccctgtgggcctgatgagccgggtggcccagcctgccagcaagaagatcgatcagaacaagctgaaacctgagatggacgagaagggcaacctgaccaccgccggctttgcctgctctcagtgtggccagcccctgttcgtgtacaagctggagcaggtgtctgagaagggcaaggcttacaccaactacttcggacggtgcaatgtggccgagcacgaaaagctgatcctgctggcccagctgaagcccgagaaggatagcgacgaagccgtgacatatagcctgggaaagtttgggcagagggccctggatttctacagcattcatgtgaccaaggagtccacccaccccgtgaagcccctggcccagatcgccggaaacagatacgcctccggacctgtgggaaaggccctgagcgacgcatgtatgggcacaatcgcctccttcctgtctaagtaccaggacatcatcatcgaacaccagaaggtggtgaagggcaaccagaagagactggagagcctgcgggagctggccggcaaggaaaacctggaataccctagcgtgaccctgccacctcagcctcacaccaaggagggcgttgatgcctacaacgaagtgatcgcccgggtgcgaatgtgggtgaacctgaacctgtggcagaagctgaagctaagcagagatgatgccaagcctctgctgagactgaagggattcccttcctttcctctggtcgagagacaggccaacgaagtggactggtgggacatggtgtgtaacgtgaagaagctgatcaacgagaaaaaggaggatggcaaggtgttttggcagaatctggctggctacaagagacaggaagccctgagaccatacctgagcagcgaggaagatcggaagaagggaaagaaattcgctcggtaccagctgggcgacctgctgctgcacctggaaaagaagcacggcgaggactggggaaaggtgtacgacgaggcctgggagcggattgacaagaaagtggaaggcctgagcaagcacatcaagctggaagaggaacggagaagcgaggacgcccagagcaaggccgccctgaccgactggctgcgggctaaggccagcttcgtgatcgagggcctgaaggaggccgacaaggacgagttctgcagatgcgagctgaagctgcagaagtggtacggggacctgcggggaaagcccttcgccatcgaagccgagaacagcatcctggacatcagcggcttcagcaagcagtacaactgtgccttcatctggcagaaggacggcgtgaagaagctgaacctgtacctgatcatcaactacttcaagggcggcaagctgcggttcaagaagatcaaacctgaagccttcgaagccaacagattctacaccgtgatcaacaaaaagagcggcgagatcgtgcccatggaggtgaacttcaacttcgacgaccccaacctgatcatcctgcctctggcctttggcaagagacagggcagagaattcatctggaacgacctgctgtccctggaaaccggcagcctgaagctggccaacggaagagtgatcgagaagacactgtacaacagaagaacccggcaggatgagcctgccctgttcgtggccctgaccttcgagcggcgggaggtcctggactcctccaatatcaaaccaatgaacctgatcggcgtggcaagaggcgaaaacatccccgccgtgatcgccctgaccgaccccgagggctgcccactgagccggtttaaggatagcctgggaaacccaacccacatcctgagaatcggcgagagctataaggagaagcagcggaccatccaggccaagaaggaggtggagcagcggagagccggcggctacagccggaagtacgccagcaaagccaagaatctggcagacgatatggtgagaaacaccgctagagatctgctgtactacgccgtgacccaggatgccatgctgatcttcgccaacctgagccggggcttcggccggcagggcaagcggaccttcatggccgagagacagtacacacggatggaggactggctgaccgccaagctggcctacgagggcctgagcaagacctacctgtccaagacactggcccagtacacctccaagacatgcagcaactgtgggtttaccatcaccagcgccgactacgacagggtgctggagaagctgaagaagacagcaacaggctggatgaccacaattaacggcaaggagctgaaggtggagggccagattacctactacaacagatacaagagacagaacgtagtcaaggacctgtccgtcgagctggatagactgagcgaagaatctgtgaacaacgacatctcctcctggacaaagggcagaagcggagaagctctgagcctcctgaagaaaagattctcccatagacccgtgcaggagaagttcgtgtgcctgaactgcggcttcgagacacacgcagccgagcaagccgccctgaacatcgccagatcctggctgttcctgcggagccaggagtacaagaaataccagacaaacaagacaaccggcaacaccgataagagagccttcgtcgagacctggcagtccttttaccggaagaagcttaaggaggtgtggaaacctgccgtgcggtctggcggatctggcggaggctccaccagccccaagaaaaagagaaaagtctaagctgccttctgcggggcttgccttctggccatgcccttcttctctcccttgcacctgtacctcttggtctttgaataaagcctgagtaggaaggctagcaaaaaaaaaaaaaaaaaaaaaaaaaaaaaaaaaaaaaaaaaaaaaaaaaaaaaaaaaaaaaaaaaaaaaaaaaaaaaaaa

SEQ ID NO: 13205 - RNA, 5785 nt, synthetic construct
  source 1..5785: mol_type = other RNA
aggaaataagagagaaaagaagagtaagaagaaatataagagccaccatggcccctaagaagaagcgtaaagtgagccggatggaacgcctcgtctacgaggtgcggcagaagtgcagaaacatcgaggacatctgcatctcctgcggatctctgaacgtgaccctggagcacccactgttcatcggcggcatgtgccagaactgtaaaaactgttttctggagtgtgcctatcaatacgacgatgacggctaccagagctactgcaccatctgttgcggcggaagagaggtgctgatgtgtggaaataacaactgctgccggtgcttctgcgtggaatgcgtggacctgctggtgggccccggcgccgcccaggccgctattaaggaagatccttggaactgctacatgtgcggccacaagggcacatacggcctgctgagacggagagaggactggcctagcagactgcagatgttcttcgccaataaccacgaccaggagttcgacccccctaaggtgtaccctcccgtccccgccgagaagagaaagcccatccgggtcctgagcctgttcgatggcatcgccaccggtctgctggtgctgaaggacctgggcatccaggtggataggtacattgcctccgaggtgtgcgaggactccatcaccgtgggaatggtgcgtcatcagggcaagatcatgtacgtgggcgacgtgcggagcgtgacacagaagcatatccaggagtggggccctttcgacctggtgatcggcggcagcccttgcaatgacctgagcatcgtgaacccagcccggaagggcctgtacgagggaaccggcagactgttcttcgagttttacagactgctgcacgacgcccggcctaaggaaggcgacgaccggcccttcttttggctgttcgagaatgtggtggccatgggagtcagcgacaagcgggatattagccggttcctggagagcaaccccgtgatgatcgatgccaaggaagtgagcgccgcccaccgggccagatacttctggggcaatctgcctggcatgaacagacccctggccagcaccgtgaacgacaagctggagctgcaggagtgcctggagcacggccggatcgccaagttcagcaaggtgagaaccatcaccacccgaagcaacagcatcaaacaaggcaaggaccagcactttcctgtgttcatgaacgagaaggaggacatcctgtggtgtaccgagatggagagagtgttcgggttcccagtccactacacagatgtcagcaacatgtctagactggccagacagagactgctgggaagaagctggtccgtccctgtgatcagacacctgttcgcccctctgaaggagtacttcgcctgcgtgagcagcggcaacagcaacgccaacagccggggccccagcttctctagcggcctggtgccactgtccctgagagggagccacatgggccccatggagatctacaaaaccgtgagcgcctggaagcggcagcctgtgcgcgtgctgagcctgtttcggaatatcgataaagtcctgaaaagcctgggattcctggagagcggctctggctccggcggtggcaccctgaagtacgtggaggatgtgacaaacgtggtcagacgggatgtggagaagtggggccccttcgatctggtgtacggcagcacccaacccctgggcagctcttgtgaccggtgccctggctggtacatgtttcagttccaccggatcctgcagtacgccctgccgagacaggagtcccagcggccattcttttggattttcatggacaacttgctgctgaccgaggatgaccaggaaactaccactcggttcctgcagaccgaagccgtgaccctgcaggacgtgagaggccgggactaccagaacgccatgcgggtgtggtccaacatccctggactgaaaagcaagcacgcacctctgacccctaaagaagaggagtacctgcaggcccaggtgcggagcagaagcaagctggacgcccctaaggtggatctgctggtgaagaattgcctcctgcccctgagagagtacttcaagtatttcagccagaatagtctgcccctgggaggcagcggcggcggcaccctgctgaccttcagggacgtggccatcgagttcagcctggaggagtggaagtgcctggaccccgcccagcagaacctgtacagggacgtgatgctggagaactacaggaacctgttcagcatcggcctgaccgtgagcaagcccggcctgatcacctgcctggagcagaggaaggagccctggaacgtgaagaggcaggaggccgtggacggccaccccgccatgagcagccacgtgaccggcggcccaagcagcggcgcccctcctcccagcggcggcagcccagccggctccccaacctctaccgaggagggcacctctgagtccgccacccccgagagcggccctggcacctccaccgagcccagcgagggcagcgcacccggcagccctgccggcagccccacctccacagaggagggaaccagcaccgagcccagcgaaggcagcgccccaggcaccagcaccgagcctagtgagcaggagattaaacggatcaacaagatcagaagaagacttgtgaaagacagcaacaccaagaaggccggcaagacaggccccatgaaaaccctgctggttagagtgatgacacccgatctgagagagcggctggaaaacctgagaaagaagcctgaaaatatcccccagcccatcagcaatacatctagagccaacctgaataagctgctgaccgattacaccgaaatgaagaaggcgatcctgcatgtgtactgggaagagttccagaaggaccctgtgggcctgatgagccgggtggcccagcctgccagcaagaagatcgatcagaacaagctgaaacctgagatggacgagaagggcaacctgaccaccgccggctttgcctgctctcagtgtggccagcccctgttcgtgtacaagctggagcaggtgtctgagaagggcaaggcttacaccaactacttcggacggtgcaatgtggccgagcacgaaaagctgatcctgctggcccagctgaagcccgagaaggatagcgacgaagccgtgacatatagcctgggaaagtttgggcagagggccctggatttctacagcattcatgtgaccaaggagtccacccaccccgtgaagcccctggcccagatcgccggaaacagatacgcctccggacctgtgggaaaggccctgagcgacgcatgtatgggcacaatcgcctccttcctgtctaagtaccaggacatcatcatcgaacaccagaaggtggtgaagggcaaccagaagagactggagagcctgcgggagctggccggcaaggaaaacctggaataccctagcgtgaccctgccacctcagcctcacaccaaggagggcgttgatgcctacaacgaagtgatcgcccgggtgcgaatgtgggtgaacctgaacctgtggcagaagctgaagctaagcagagatgatgccaagcctctgctgagactgaagggattcccttcctttcctctggtcgagagacaggccaacgaagtggactggtgggacatggtgtgtaacgtgaagaagctgatcaacgagaaaaaggaggatggcaaggtgttttggcagaatctggctggctacaagagacaggaagccctgagaccatacctgagcagcgaggaagatcggaagaagggaaagaaattcgctcggtaccagctgggcgacctgctgctgcacctggaaaagaagcacggcgaggactggggaaaggtgtacgacgaggcctgggagcggattgacaagaaagtggaaggcctgagcaagcacatcaagctggaagaggaacggagaagcgaggacgcccagagcaaggccgccctgaccgactggctgcgggctaaggccagcttcgtgatcgagggcctgaaggaggccgacaaggacgagttctgcagatgcgagctgaagctgcagaagtggtacggggacctgcggggaaagcccttcgccatcgaagccgagaacagcatcctggacatcagcggcttcagcaagcagtacaactgtgccttcatctggcagaaggacggcgtgaagaagctgaacctgtacctgatcatcaactacttcaagggcggcaagctgcggttcaagaagatcaaacctgaagccttcgaagccaacagattctacaccgtgatcaacaaaaagagcggcgagatcgtgcccatggaggtgaacttcaacttcgacgaccccaacctgatcatcctgcctctggcctttggcaagagacagggcagagaattcatctggaacgacctgctgtccctggaaaccggcagcctgaagctggccaacggaagagtgatcgagaagacactgtacaacagaagaacccggcaggatgagcctgccctgttcgtggccctgaccttcgagcggcgggaggtcctggactcctccaatatcaaaccaatgaacctgatcggcgtggcaagaggcgaaaacatccccgccgtgatcgccctgaccgaccccgagggctgcccactgagccggtttaaggatagcctgggaaacccaacccacatcctgagaatcggcgagagctataaggagaagcagcggaccatccaggccaagaaggaggtggagcagcggagagccggcggctacagccggaagtacgccagcaaagccaagaatctggcagacgatatggtgagaaacaccgctagagatctgctgtactacgccgtgacccaggatgccatgctgatcttcgccaacctgagccggggcttcggccggcagggcaagcggaccttcatggccgagagacagtacacacggatggaggactggctgaccgccaagctggcctacgagggcctgagcaagacctacctgtccaagacactggcccagtacacctccaagacatgcagcaactgtgggtttaccatcaccagcgccgactacgacagggtgctggagaagctgaagaagacagcaacaggctggatgaccacaattaacggcaaggagctgaaggtggagggccagattacctactacaacagatacaagagacagaacgtagtcaaggacctgtccgtcgagctggatagactgagcgaagaatctgtgaacaacgacatctcctcctggacaaagggcagaagcggagaagctctgagcctcctgaagaaaagattctcccatagacccgtgcaggagaagttcgtgtgcctgaactgcggcttcgagacacacgcagccgagcaagccgccctgaacatcgccagatcctggctgttcctgcggagccaggagtacaagaaataccagacaaacaagacaaccggcaacaccgataagagagccttcgtcgagacctggcagtccttttaccggaagaagcttaaggaggtgtggaaacctgccgtgcggtctggcggatctggcggaggctccaccagccccaagaaaaagagaaaagtctaagctgccttctgcggggcttgccttctggccatgcccttcttctctcccttgcacctgtacctcttggtctttgaataaagcctgagtaggaaggctagcaaaaaaaaaaaaaaaaaaaaaaaaaaaaaaaaaaaaaaaaaaaaaaaaaaaaaaaaaaaaaaaaaaaaaaaaaaaaaaaa

SEQ ID NO: 13206 - RNA, 5785 nt, synthetic construct
  source 1..5785: mol_type = other RNA
aggaaataagagagaaaagaagagtaagaagaaatataagagccaccatggcccctaagaagaagcgtaaagtgagccggatggaacgcctcgtctacgaggtgcggcagaagtgcagaaacatcgaggacatctgcatctcctgcggatctctgaacgtgaccctggagcacccactgttcatcggcggcatgtgccagaactgtaaaaactgttttctggagtgtgcctatcaatacgacgatgacggctaccagagctactgcaccatctgttgcggcggaagagaggtgctgatgtgtggaaataacaactgctgccggtgcttctgcgtggaatgcgtggacctgctggtgggccccggcgccgcccaggccgctattaaggaagatccttggaactgctacatgtgcggccacaagggcacatacggcctgctgagacggagagaggactggcctagcagactgcagatgttcttcgccaataaccacgaccaggagttcgacccccctaaggtgtaccctcccgtccccgccgagaagagaaagcccatccgggtcctgagcctgttcgatggcatcgccaccggtctgctggtgctgaaggacctgggcatccaggtggataggtacattgcctccgaggtgtgcgaggactccatcaccgtgggaatggtgcgtcatcagggcaagatcatgtacgtgggcgacgtgcggagcgtgacacagaagcatatccaggagtggggccctttcgacctggtgatcggcggcagcccttgcaatgacctgagcatcgtgaacccagcccggaagggcctgtacgagggaaccggcagactgttcttcgagttttacagactgctgcacgacgcccggcctaaggaaggcgacgaccggcccttcttttggctgttcgagaatgtggtggccatgggagtcagcgacaagcgggatattagccggttcctggagagcaaccccgtgatgatcgatgccaaggaagtgagcgccgcccaccgggccagatacttctggggcaatctgcctggcatgaacagacccctggccagcaccgtgaacgacaagctggagctgcaggagtgcctggagcacggccggatcgccaagttcagcaaggtgagaaccatcaccacccgaagcaacagcatcaaacaaggcaaggaccagcactttcctgtgttcatgaacgagaaggaggacatcctgtggtgtaccgagatggagagagtgttcgggttcccagtccactacacagatgtcagcaacatgtctagactggccagacagagactgctgggaagaagctggtccgtccctgtgatcagacacctgttcgcccctctgaaggagtacttcgcctgcgtgagcagcggcaacagcaacgccaacagccggggccccagcttctctagcggcctggtgccactgtccctgagagggagccacatgggccccatggagatctacaaaaccgtgagcgcctggaagcggcagcctgtgcgcgtgctgagcctgtttcggaatatcgataaagtcctgaaaagcctgggattcctggagagcggctctggctccggcggtggcaccctgaagtacgtggaggatgtgacaaacgtggtcagacgggatgtggagaagtggggccccttcgatctggtgtacggcagcacccaacccctgggcagctcttgtgaccggtgccctggctggtacatgtttcagttccaccggatcctgcagtacgccctgccgagacaggagtcccagcggccattcttttggattttcatggacaacttgctgctgaccgaggatgaccaggaaactaccactcggttcctgcagaccgaagccgtgaccctgcaggacgtgagaggccgggactaccagaacgccatgcgggtgtggtccaacatccctggactgaaaagcaagcacgcacctctgacccctaaagaagaggagtacctgcaggcccaggtgcggagcagaagcaagctggacgcccctaaggtggatctgctggtgaagaattgcctcctgcccctgagagagtacttcaagtatttcagccagaatagtctgcccctgggaggcagcggcggcggcctgcagggcagcctgagcttcgaggacgtgaccgtgggcttcagccaggaggagtggcagaggctggaccccgcccagaggaccctgtacagggacgtgatgctggagaactacagccacctggtggccgtgggctgctgcgtgcccaagcccgacgtgatcttcaggctggagcagggccagcagccctggctggtggaggaggagagcctggaccagagctgccccgaggtgtgcagggtgggcggcccaagcagcggcgcccctcctcccagcggcggcagcccagccggctccccaacctctaccgaggagggcacctctgagtccgccacccccgagagcggccctggcacctccaccgagcccagcgagggcagcgcacccggcagccctgccggcagccccacctccacagaggagggaaccagcaccgagcccagcgaaggcagcgccccaggcaccagcaccgagcctagtgagcaggagattaaacggatcaacaagatcagaagaagacttgtgaaagacagcaacaccaagaaggccggcaagacaggccccatgaaaaccctgctggttagagtgatgacacccgatctgagagagcggctggaaaacctgagaaagaagcctgaaaatatcccccagcccatcagcaatacatctagagccaacctgaataagctgctgaccgattacaccgaaatgaagaaggcgatcctgcatgtgtactgggaagagttccagaaggaccctgtgggcctgatgagccgggtggcccagcctgccagcaagaagatcgatcagaacaagctgaaacctgagatggacgagaagggcaacctgaccaccgccggctttgcctgctctcagtgtggccagcccctgttcgtgtacaagctggagcaggtgtctgagaagggcaaggcttacaccaactacttcggacggtgcaatgtggccgagcacgaaaagctgatcctgctggcccagctgaagcccgagaaggatagcgacgaagccgtgacatatagcctgggaaagtttgggcagagggccctggatttctacagcattcatgtgaccaaggagtccacccaccccgtgaagcccctggcccagatcgccggaaacagatacgcctccggacctgtgggaaaggccctgagcgacgcatgtatgggcacaatcgcctccttcctgtctaagtaccaggacatcatcatcgaacaccagaaggtggtgaagggcaaccagaagagactggagagcctgcgggagctggccggcaaggaaaacctggaataccctagcgtgaccctgccacctcagcctcacaccaaggagggcgttgatgcctacaacgaagtgatcgcccgggtgcgaatgtgggtgaacctgaacctgtggcagaagctgaagctaagcagagatgatgccaagcctctgctgagactgaagggattcccttcctttcctctggtcgagagacaggccaacgaagtggactggtgggacatggtgtgtaacgtgaagaagctgatcaacgagaaaaaggaggatggcaaggtgttttggcagaatctggctggctacaagagacaggaagccctgagaccatacctgagcagcgaggaagatcggaagaagggaaagaaattcgctcggtaccagctgggcgacctgctgctgcacctggaaaagaagcacggcgaggactggggaaaggtgtacgacgaggcctgggagcggattgacaagaaagtggaaggcctgagcaagcacatcaagctggaagaggaacggagaagcgaggacgcccagagcaaggccgccctgaccgactggctgcgggctaaggccagcttcgtgatcgagggcctgaaggaggccgacaaggacgagttctgcagatgcgagctgaagctgcagaagtggtacggggacctgcggggaaagcccttcgccatcgaagccgagaacagcatcctggacatcagcggcttcagcaagcagtacaactgtgccttcatctggcagaaggacggcgtgaagaagctgaacctgtacctgatcatcaactacttcaagggcggcaagctgcggttcaagaagatcaaacctgaagccttcgaagccaacagattctacaccgtgatcaacaaaaagagcggcgagatcgtgcccatggaggtgaacttcaacttcgacgaccccaacctgatcatcctgcctctggcctttggcaagagacagggcagagaattcatctggaacgacctgctgtccctggaaaccggcagcctgaagctggccaacggaagagtgatcgagaagacactgtacaacagaagaacccggcaggatgagcctgccctgttcgtggccctgaccttcgagcggcgggaggtcctggactcctccaatatcaaaccaatgaacctgatcggcgtggcaagaggcgaaaacatccccgccgtgatcgccctgaccgaccccgagggctgcccactgagccggtttaaggatagcctgggaaacccaacccacatcctgagaatcggcgagagctataaggagaagcagcggaccatccaggccaagaaggaggtggagcagcggagagccggcggctacagccggaagtacgccagcaaagccaagaatctggcagacgatatggtgagaaacaccgctagagatctgctgtactacgccgtgacccaggatgccatgctgatcttcgccaacctgagccggggcttcggccggcagggcaagcggaccttcatggccgagagacagtacacacggatggaggactggctgaccgccaagctggcctacgagggcctgagcaagacctacctgtccaagacactggcccagtacacctccaagacatgcagcaactgtgggtttaccatcaccagcgccgactacgacagggtgctggagaagctgaagaagacagcaacaggctggatgaccacaattaacggcaaggagctgaaggtggagggccagattacctactacaacagatacaagagacagaacgtagtcaaggacctgtccgtcgagctggatagactgagcgaagaatctgtgaacaacgacatctcctcctggacaaagggcagaagcggagaagctctgagcctcctgaagaaaagattctcccatagacccgtgcaggagaagttcgtgtgcctgaactgcggcttcgagacacacgcagccgagcaagccgccctgaacatcgccagatcctggctgttcctgcggagccaggagtacaagaaataccagacaaacaagacaaccggcaacaccgataagagagccttcgtcgagacctggcagtccttttaccggaagaagcttaaggaggtgtggaaacctgccgtgcggtctggcggatctggcggaggctccaccagccccaagaaaaagagaaaagtctaagctgccttctgcggggcttgccttctggccatgcccttcttctctcccttgcacctgtacctcttggtctttgaataaagcctgagtaggaaggctagcaaaaaaaaaaaaaaaaaaaaaaaaaaaaaaaaaaaaaaaaaaaaaaaaaaaaaaaaaaaaaaaaaaaaaaaaaaaaaaaa

SEQ ID NO: 13207 - RNA, 5785 nt, synthetic construct
  source 1..5785: mol_type = other RNA
aggaaataagagagaaaagaagagtaagaagaaatataagagccaccatggcccctaagaagaagcgtaaagtgagccggatggaacgcctcgtctacgaggtgcggcagaagtgcagaaacatcgaggacatctgcatctcctgcggatctctgaacgtgaccctggagcacccactgttcatcggcggcatgtgccagaactgtaaaaactgttttctggagtgtgcctatcaatacgacgatgacggctaccagagctactgcaccatctgttgcggcggaagagaggtgctgatgtgtggaaataacaactgctgccggtgcttctgcgtggaatgcgtggacctgctggtgggccccggcgccgcccaggccgctattaaggaagatccttggaactgctacatgtgcggccacaagggcacatacggcctgctgagacggagagaggactggcctagcagactgcagatgttcttcgccaataaccacgaccaggagttcgacccccctaaggtgtaccctcccgtccccgccgagaagagaaagcccatccgggtcctgagcctgttcgatggcatcgccaccggtctgctggtgctgaaggacctgggcatccaggtggataggtacattgcctccgaggtgtgcgaggactccatcaccgtgggaatggtgcgtcatcagggcaagatcatgtacgtgggcgacgtgcggagcgtgacacagaagcatatccaggagtggggccctttcgacctggtgatcggcggcagcccttgcaatgacctgagcatcgtgaacccagcccggaagggcctgtacgagggaaccggcagactgttcttcgagttttacagactgctgcacgacgcccggcctaaggaaggcgacgaccggcccttcttttggctgttcgagaatgtggtggccatgggagtcagcgacaagcgggatattagccggttcctggagagcaaccccgtgatgatcgatgccaaggaagtgagcgccgcccaccgggccagatacttctggggcaatctgcctggcatgaacagacccctggccagcaccgtgaacgacaagctggagctgcaggagtgcctggagcacggccggatcgccaagttcagcaaggtgagaaccatcaccacccgaagcaacagcatcaaacaaggcaaggaccagcactttcctgtgttcatgaacgagaaggaggacatcctgtggtgtaccgagatggagagagtgttcgggttcccagtccactacacagatgtcagcaacatgtctagactggccagacagagactgctgggaagaagctggtccgtccctgtgatcagacacctgttcgcccctctgaaggagtacttcgcctgcgtgagcagcggcaacagcaacgccaacagccggggccccagcttctctagcggcctggtgccactgtccctgagagggagccacatgggccccatggagatctacaaaaccgtgagcgcctggaagcggcagcctgtgcgcgtgctgagcctgtttcggaatatcgataaagtcctgaaaagcctgggattcctggagagcggctctggctccggcggtggcaccctgaagtacgtggaggatgtgacaaacgtggtcagacgggatgtggagaagtggggccccttcgatctggtgtacggcagcacccaacccctgggcagctcttgtgaccggtgccctggctggtacatgtttcagttccaccggatcctgcagtacgccctgccgagacaggagtcccagcggccattcttttggattttcatggacaacttgctgctgaccgaggatgaccaggaaactaccactcggttcctgcagaccgaagccgtgaccctgcaggacgtgagaggccgggactaccagaacgccatgcgggtgtggtccaacatccctggactgaaaagcaagcacgcacctctgacccctaaagaagaggagtacctgcaggcccaggtgcggagcagaagcaagctggacgcccctaaggtggatctgctggtgaagaattgcctcctgcccctgagagagtacttcaagtatttcagccagaatagtctgcccctgggaggcagcggcggcggcatggacatggcccaggagcccgtgaccttcagggacgtggccatctacttcagcagggaggagtgggcctgcctggagcccagccagaggaccctgtacagggacgtgatgctggacaacttcagcagcgtggccgccctgggcttctgcagccccaggcccgacctggtgagcaggctggagcagtgggaggagccctgggtggaggacagggagaggcccgagctgcaggccgtgaggaggggcggcccaagcagcggcgcccctcctcccagcggcggcagcccagccggctccccaacctctaccgaggagggcacctctgagtccgccacccccgagagcggccctggcacctccaccgagcccagcgagggcagcgcacccggcagccctgccggcagccccacctccacagaggagggaaccagcaccgagcccagcgaaggcagcgccccaggcaccagcaccgagcctagtgagcaggagattaaacggatcaacaagatcagaagaagacttgtgaaagacagcaacaccaagaaggccggcaagacaggccccatgaaaaccctgctggttagagtgatgacacccgatctgagagagcggctggaaaacctgagaaagaagcctgaaaatatcccccagcccatcagcaatacatctagagccaacctgaataagctgctgaccgattacaccgaaatgaagaaggcgatcctgcatgtgtactgggaagagttccagaaggaccctgtgggcctgatgagccgggtggcccagcctgccagcaagaagatcgatcagaacaagctgaaacctgagatggacgagaagggcaacctgaccaccgccggctttgcctgctctcagtgtggccagcccctgttcgtgtacaagctggagcaggtgtctgagaagggcaaggcttacaccaactacttcggacggtgcaatgtggccgagcacgaaaagctgatcctgctggcccagctgaagcccgagaaggatagcgacgaagccgtgacatatagcctgggaaagtttgggcagagggccctggatttctacagcattcatgtgaccaaggagtccacccaccccgtgaagcccctggcccagatcgccggaaacagatacgcctccggacctgtgggaaaggccctgagcgacgcatgtatgggcacaatcgcctccttcctgtctaagtaccaggacatcatcatcgaacaccagaaggtggtgaagggcaaccagaagagactggagagcctgcgggagctggccggcaaggaaaacctggaataccctagcgtgaccctgccacctcagcctcacaccaaggagggcgttgatgcctacaacgaagtgatcgcccgggtgcgaatgtgggtgaacctgaacctgtggcagaagctgaagctaagcagagatgatgccaagcctctgctgagactgaagggattcccttcctttcctctggtcgagagacaggccaacgaagtggactggtgggacatggtgtgtaacgtgaagaagctgatcaacgagaaaaaggaggatggcaaggtgttttggcagaatctggctggctacaagagacaggaagccctgagaccatacctgagcagcgaggaagatcggaagaagggaaagaaattcgctcggtaccagctgggcgacctgctgctgcacctggaaaagaagcacggcgaggactggggaaaggtgtacgacgaggcctgggagcggattgacaagaaagtggaaggcctgagcaagcacatcaagctggaagaggaacggagaagcgaggacgcccagagcaaggccgccctgaccgactggctgcgggctaaggccagcttcgtgatcgagggcctgaaggaggccgacaaggacgagttctgcagatgcgagctgaagctgcagaagtggtacggggacctgcggggaaagcccttcgccatcgaagccgagaacagcatcctggacatcagcggcttcagcaagcagtacaactgtgccttcatctggcagaaggacggcgtgaagaagctgaacctgtacctgatcatcaactacttcaagggcggcaagctgcggttcaagaagatcaaacctgaagccttcgaagccaacagattctacaccgtgatcaacaaaaagagcggcgagatcgtgcccatggaggtgaacttcaacttcgacgaccccaacctgatcatcctgcctctggcctttggcaagagacagggcagagaattcatctggaacgacctgctgtccctggaaaccggcagcctgaagctggccaacggaagagtgatcgagaagacactgtacaacagaagaacccggcaggatgagcctgccctgttcgtggccctgaccttcgagcggcgggaggtcctggactcctccaatatcaaaccaatgaacctgatcggcgtggcaagaggcgaaaacatccccgccgtgatcgccctgaccgaccccgagggctgcccactgagccggtttaaggatagcctgggaaacccaacccacatcctgagaatcggcgagagctataaggagaagcagcggaccatccaggccaagaaggaggtggagcagcggagagccggcggctacagccggaagtacgccagcaaagccaagaatctggcagacgatatggtgagaaacaccgctagagatctgctgtactacgccgtgacccaggatgccatgctgatcttcgccaacctgagccggggcttcggccggcagggcaagcggaccttcatggccgagagacagtacacacggatggaggactggctgaccgccaagctggcctacgagggcctgagcaagacctacctgtccaagacactggcccagtacacctccaagacatgcagcaactgtgggtttaccatcaccagcgccgactacgacagggtgctggagaagctgaagaagacagcaacaggctggatgaccacaattaacggcaaggagctgaaggtggagggccagattacctactacaacagatacaagagacagaacgtagtcaaggacctgtccgtcgagctggatagactgagcgaagaatctgtgaacaacgacatctcctcctggacaaagggcagaagcggagaagctctgagcctcctgaagaaaagattctcccatagacccgtgcaggagaagttcgtgtgcctgaactgcggcttcgagacacacgcagccgagcaagccgccctgaacatcgccagatcctggctgttcctgcggagccaggagtacaagaaataccagacaaacaagacaaccggcaacaccgataagagagccttcgtcgagacctggcagtccttttaccggaagaagcttaaggaggtgtggaaacctgccgtgcggtctggcggatctggcggaggctccaccagccccaagaaaaagagaaaagtctaagctgccttctgcggggcttgccttctggccatgcccttcttctctcccttgcacctgtacctcttggtctttgaataaagcctgagtaggaaggctagcaaaaaaaaaaaaaaaaaaaaaaaaaaaaaaaaaaaaaaaaaaaaaaaaaaaaaaaaaaaaaaaaaaaaaaaaaaaaaaaa

SEQ ID NO: 13208 - RNA, 5785 nt, synthetic construct
  source 1..5785: mol_type = other RNA
aggaaataagagagaaaagaagagtaagaagaaatataagagccaccatggcccctaagaagaagcgtaaagtgagccggatggaacgcctcgtctacgaggtgcggcagaagtgcagaaacatcgaggacatctgcatctcctgcggatctctgaacgtgaccctggagcacccactgttcatcggcggcatgtgccagaactgtaaaaactgttttctggagtgtgcctatcaatacgacgatgacggctaccagagctactgcaccatctgttgcggcggaagagaggtgctgatgtgtggaaataacaactgctgccggtgcttctgcgtggaatgcgtggacctgctggtgggccccggcgccgcccaggccgctattaaggaagatccttggaactgctacatgtgcggccacaagggcacatacggcctgctgagacggagagaggactggcctagcagactgcagatgttcttcgccaataaccacgaccaggagttcgacccccctaaggtgtaccctcccgtccccgccgagaagagaaagcccatccgggtcctgagcctgttcgatggcatcgccaccggtctgctggtgctgaaggacctgggcatccaggtggataggtacattgcctccgaggtgtgcgaggactccatcaccgtgggaatggtgcgtcatcagggcaagatcatgtacgtgggcgacgtgcggagcgtgacacagaagcatatccaggagtggggccctttcgacctggtgatcggcggcagcccttgcaatgacctgagcatcgtgaacccagcccggaagggcctgtacgagggaaccggcagactgttcttcgagttttacagactgctgcacgacgcccggcctaaggaaggcgacgaccggcccttcttttggctgttcgagaatgtggtggccatgggagtcagcgacaagcgggatattagccggttcctggagagcaaccccgtgatgatcgatgccaaggaagtgagcgccgcccaccgggccagatacttctggggcaatctgcctggcatgaacagacccctggccagcaccgtgaacgacaagctggagctgcaggagtgcctggagcacggccggatcgccaagttcagcaaggtgagaaccatcaccacccgaagcaacagcatcaaacaaggcaaggaccagcactttcctgtgttcatgaacgagaaggaggacatcctgtggtgtaccgagatggagagagtgttcgggttcccagtccactacacagatgtcagcaacatgtctagactggccagacagagactgctgggaagaagctggtccgtccctgtgatcagacacctgttcgcccctctgaaggagtacttcgcctgcgtgagcagcggcaacagcaacgccaacagccggggccccagcttctctagcggcctggtgccactgtccctgagagggagccacatgggccccatggagatctacaaaaccgtgagcgcctggaagcggcagcctgtgcgcgtgctgagcctgtttcggaatatcgataaagtcctgaaaagcctgggattcctggagagcggctctggctccggcggtggcaccctgaagtacgtggaggatgtgacaaacgtggtcagacgggatgtggagaagtggggccccttcgatctggtgtacggcagcacccaacccctgggcagctcttgtgaccggtgccctggctggtacatgtttcagttccaccggatcctgcagtacgccctgccgagacaggagtcccagcggccattcttttggattttcatggacaacttgctgctgaccgaggatgaccaggaaactaccactcggttcctgcagaccgaagccgtgaccctgcaggacgtgagaggccgggactaccagaacgccatgcgggtgtggtccaacatccctggactgaaaagcaagcacgcacctctgacccctaaagaagaggagtacctgcaggcccaggtgcggagcagaagcaagctggacgcccctaaggtggatctgctggtgaagaattgcctcctgcccctgagagagtacttcaagtatttcagccagaatagtctgcccctgggaggcagcggcggcggcagccacggccccctgagcttcgaggacgtggccgtggccttcaccaaggaggagtggcagcagctggaccccgcccagaggaccctgtacagggacgtgatgctggagaacttcagccacctggtgagcctgggccaccccgtgagcaagcccgacgtgatcagcaagctggagcagggcgaggagccctggatcatcaagagggacatccccaactggatctaccccgagagggagaacaggggcggcccaagcagcggcgcccctcctcccagcggcggcagcccagccggctccccaacctctaccgaggagggcacctctgagtccgccacccccgagagcggccctggcacctccaccgagcccagcgagggcagcgcacccggcagccctgccggcagccccacctccacagaggagggaaccagcaccgagcccagcgaaggcagcgccccaggcaccagcaccgagcctagtgagcaggagattaaacggatcaacaagatcagaagaagacttgtgaaagacagcaacaccaagaaggccggcaagacaggccccatgaaaaccctgctggttagagtgatgacacccgatctgagagagcggctggaaaacctgagaaagaagcctgaaaatatcccccagcccatcagcaatacatctagagccaacctgaataagctgctgaccgattacaccgaaatgaagaaggcgatcctgcatgtgtactgggaagagttccagaaggaccctgtgggcctgatgagccgggtggcccagcctgccagcaagaagatcgatcagaacaagctgaaacctgagatggacgagaagggcaacctgaccaccgccggctttgcctgctctcagtgtggccagcccctgttcgtgtacaagctggagcaggtgtctgagaagggcaaggcttacaccaactacttcggacggtgcaatgtggccgagcacgaaaagctgatcctgctggcccagctgaagcccgagaaggatagcgacgaagccgtgacatatagcctgggaaagtttgggcagagggccctggatttctacagcattcatgtgaccaaggagtccacccaccccgtgaagcccctggcccagatcgccggaaacagatacgcctccggacctgtgggaaaggccctgagcgacgcatgtatgggcacaatcgcctccttcctgtctaagtaccaggacatcatcatcgaacaccagaaggtggtgaagggcaaccagaagagactggagagcctgcgggagctggccggcaaggaaaacctggaataccctagcgtgaccctgccacctcagcctcacaccaaggagggcgttgatgcctacaacgaagtgatcgcccgggtgcgaatgtgggtgaacctgaacctgtggcagaagctgaagctaagcagagatgatgccaagcctctgctgagactgaagggattcccttcctttcctctggtcgagagacaggccaacgaagtggactggtgggacatggtgtgtaacgtgaagaagctgatcaacgagaaaaaggaggatggcaaggtgttttggcagaatctggctggctacaagagacaggaagccctgagaccatacctgagcagcgaggaagatcggaagaagggaaagaaattcgctcggtaccagctgggcgacctgctgctgcacctggaaaagaagcacggcgaggactggggaaaggtgtacgacgaggcctgggagcggattgacaagaaagtggaaggcctgagcaagcacatcaagctggaagaggaacggagaagcgaggacgcccagagcaaggccgccctgaccgactggctgcgggctaaggccagcttcgtgatcgagggcctgaaggaggccgacaaggacgagttctgcagatgcgagctgaagctgcagaagtggtacggggacctgcggggaaagcccttcgccatcgaagccgagaacagcatcctggacatcagcggcttcagcaagcagtacaactgtgccttcatctggcagaaggacggcgtgaagaagctgaacctgtacctgatcatcaactacttcaagggcggcaagctgcggttcaagaagatcaaacctgaagccttcgaagccaacagattctacaccgtgatcaacaaaaagagcggcgagatcgtgcccatggaggtgaacttcaacttcgacgaccccaacctgatcatcctgcctctggcctttggcaagagacagggcagagaattcatctggaacgacctgctgtccctggaaaccggcagcctgaagctggccaacggaagagtgatcgagaagacactgtacaacagaagaacccggcaggatgagcctgccctgttcgtggccctgaccttcgagcggcgggaggtcctggactcctccaatatcaaaccaatgaacctgatcggcgtggcaagaggcgaaaacatccccgccgtgatcgccctgaccgaccccgagggctgcccactgagccggtttaaggatagcctgggaaacccaacccacatcctgagaatcggcgagagctataaggagaagcagcggaccatccaggccaagaaggaggtggagcagcggagagccggcggctacagccggaagtacgccagcaaagccaagaatctggcagacgatatggtgagaaacaccgctagagatctgctgtactacgccgtgacccaggatgccatgctgatcttcgccaacctgagccggggcttcggccggcagggcaagcggaccttcatggccgagagacagtacacacggatggaggactggctgaccgccaagctggcctacgagggcctgagcaagacctacctgtccaagacactggcccagtacacctccaagacatgcagcaactgtgggtttaccatcaccagcgccgactacgacagggtgctggagaagctgaagaagacagcaacaggctggatgaccacaattaacggcaaggagctgaaggtggagggccagattacctactacaacagatacaagagacagaacgtagtcaaggacctgtccgtcgagctggatagactgagcgaagaatctgtgaacaacgacatctcctcctggacaaagggcagaagcggagaagctctgagcctcctgaagaaaagattctcccatagacccgtgcaggagaagttcgtgtgcctgaactgcggcttcgagacacacgcagccgagcaagccgccctgaacatcgccagatcctggctgttcctgcggagccaggagtacaagaaataccagacaaacaagacaaccggcaacaccgataagagagccttcgtcgagacctggcagtccttttaccggaagaagcttaaggaggtgtggaaacctgccgtgcggtctggcggatctggcggaggctccaccagccccaagaaaaagagaaaagtctaagctgccttctgcggggcttgccttctggccatgcccttcttctctcccttgcacctgtacctcttggtctttgaataaagcctgagtaggaaggctagcaaaaaaaaaaaaaaaaaaaaaaaaaaaaaaaaaaaaaaaaaaaaaaaaaaaaaaaaaaaaaaaaaaaaaaaaaaaaaaaa

SEQ ID NO: 13209 - RNA, 5785 nt, synthetic construct
  source 1..5785: mol_type = other RNA
aggaaataagagagaaaagaagagtaagaagaaatataagagccaccatggcccctaagaagaagcgtaaagtgagccggatggaacgcctcgtctacgaggtgcggcagaagtgcagaaacatcgaggacatctgcatctcctgcggatctctgaacgtgaccctggagcacccactgttcatcggcggcatgtgccagaactgtaaaaactgttttctggagtgtgcctatcaatacgacgatgacggctaccagagctactgcaccatctgttgcggcggaagagaggtgctgatgtgtggaaataacaactgctgccggtgcttctgcgtggaatgcgtggacctgctggtgggccccggcgccgcccaggccgctattaaggaagatccttggaactgctacatgtgcggccacaagggcacatacggcctgctgagacggagagaggactggcctagcagactgcagatgttcttcgccaataaccacgaccaggagttcgacccccctaaggtgtaccctcccgtccccgccgagaagagaaagcccatccgggtcctgagcctgttcgatggcatcgccaccggtctgctggtgctgaaggacctgggcatccaggtggataggtacattgcctccgaggtgtgcgaggactccatcaccgtgggaatggtgcgtcatcagggcaagatcatgtacgtgggcgacgtgcggagcgtgacacagaagcatatccaggagtggggccctttcgacctggtgatcggcggcagcccttgcaatgacctgagcatcgtgaacccagcccggaagggcctgtacgagggaaccggcagactgttcttcgagttttacagactgctgcacgacgcccggcctaaggaaggcgacgaccggcccttcttttggctgttcgagaatgtggtggccatgggagtcagcgacaagcgggatattagccggttcctggagagcaaccccgtgatgatcgatgccaaggaagtgagcgccgcccaccgggccagatacttctggggcaatctgcctggcatgaacagacccctggccagcaccgtgaacgacaagctggagctgcaggagtgcctggagcacggccggatcgccaagttcagcaaggtgagaaccatcaccacccgaagcaacagcatcaaacaaggcaaggaccagcactttcctgtgttcatgaacgagaaggaggacatcctgtggtgtaccgagatggagagagtgttcgggttcccagtccactacacagatgtcagcaacatgtctagactggccagacagagactgctgggaagaagctggtccgtccctgtgatcagacacctgttcgcccctctgaaggagtacttcgcctgcgtgagcagcggcaacagcaacgccaacagccggggccccagcttctctagcggcctggtgccactgtccctgagagggagccacatgggccccatggagatctacaaaaccgtgagcgcctggaagcggcagcctgtgcgcgtgctgagcctgtttcggaatatcgataaagtcctgaaaagcctgggattcctggagagcggctctggctccggcggtggcaccctgaagtacgtggaggatgtgacaaacgtggtcagacgggatgtggagaagtggggccccttcgatctggtgtacggcagcacccaacccctgggcagctcttgtgaccggtgccctggctggtacatgtttcagttccaccggatcctgcagtacgccctgccgagacaggagtcccagcggccattcttttggattttcatggacaacttgctgctgaccgaggatgaccaggaaactaccactcggttcctgcagaccgaagccgtgaccctgcaggacgtgagaggccgggactaccagaacgccatgcgggtgtggtccaacatccctggactgaaaagcaagcacgcacctctgacccctaaagaagaggagtacctgcaggcccaggtgcggagcagaagcaagctggacgcccctaaggtggatctgctggtgaagaattgcctcctgcccctgagagagtacttcaagtatttcagccagaatagtctgcccctgggaggcagcggcggcggcgacctggtgacctacgacgacgtgcacgtgaacttcacccaggaggagtgggccctgctggaccccagccagaagaacctgtacaaggacgtgatgctggagacctacaggaacctgagcgccatcggctacatctgggaggtgcacaccagcgaggaccacttccagaccagcaggagccacggcaggcacgagaggagctgcaccgccgtgcagcccagcgagttcatccagtgcggcaagggcggcccaagcagcggcgcccctcctcccagcggcggcagcccagccggctccccaacctctaccgaggagggcacctctgagtccgccacccccgagagcggccctggcacctccaccgagcccagcgagggcagcgcacccggcagccctgccggcagccccacctccacagaggagggaaccagcaccgagcccagcgaaggcagcgccccaggcaccagcaccgagcctagtgagcaggagattaaacggatcaacaagatcagaagaagacttgtgaaagacagcaacaccaagaaggccggcaagacaggccccatgaaaaccctgctggttagagtgatgacacccgatctgagagagcggctggaaaacctgagaaagaagcctgaaaatatcccccagcccatcagcaatacatctagagccaacctgaataagctgctgaccgattacaccgaaatgaagaaggcgatcctgcatgtgtactgggaagagttccagaaggaccctgtgggcctgatgagccgggtggcccagcctgccagcaagaagatcgatcagaacaagctgaaacctgagatggacgagaagggcaacctgaccaccgccggctttgcctgctctcagtgtggccagcccctgttcgtgtacaagctggagcaggtgtctgagaagggcaaggcttacaccaactacttcggacggtgcaatgtggccgagcacgaaaagctgatcctgctggcccagctgaagcccgagaaggatagcgacgaagccgtgacatatagcctgggaaagtttgggcagagggccctggatttctacagcattcatgtgaccaaggagtccacccaccccgtgaagcccctggcccagatcgccggaaacagatacgcctccggacctgtgggaaaggccctgagcgacgcatgtatgggcacaatcgcctccttcctgtctaagtaccaggacatcatcatcgaacaccagaaggtggtgaagggcaaccagaagagactggagagcctgcgggagctggccggcaaggaaaacctggaataccctagcgtgaccctgccacctcagcctcacaccaaggagggcgttgatgcctacaacgaagtgatcgcccgggtgcgaatgtgggtgaacctgaacctgtggcagaagctgaagctaagcagagatgatgccaagcctctgctgagactgaagggattcccttcctttcctctggtcgagagacaggccaacgaagtggactggtgggacatggtgtgtaacgtgaagaagctgatcaacgagaaaaaggaggatggcaaggtgttttggcagaatctggctggctacaagagacaggaagccctgagaccatacctgagcagcgaggaagatcggaagaagggaaagaaattcgctcggtaccagctgggcgacctgctgctgcacctggaaaagaagcacggcgaggactggggaaaggtgtacgacgaggcctgggagcggattgacaagaaagtggaaggcctgagcaagcacatcaagctggaagaggaacggagaagcgaggacgcccagagcaaggccgccctgaccgactggctgcgggctaaggccagcttcgtgatcgagggcctgaaggaggccgacaaggacgagttctgcagatgcgagctgaagctgcagaagtggtacggggacctgcggggaaagcccttcgccatcgaagccgagaacagcatcctggacatcagcggcttcagcaagcagtacaactgtgccttcatctggcagaaggacggcgtgaagaagctgaacctgtacctgatcatcaactacttcaagggcggcaagctgcggttcaagaagatcaaacctgaagccttcgaagccaacagattctacaccgtgatcaacaaaaagagcggcgagatcgtgcccatggaggtgaacttcaacttcgacgaccccaacctgatcatcctgcctctggcctttggcaagagacagggcagagaattcatctggaacgacctgctgtccctggaaaccggcagcctgaagctggccaacggaagagtgatcgagaagacactgtacaacagaagaacccggcaggatgagcctgccctgttcgtggccctgaccttcgagcggcgggaggtcctggactcctccaatatcaaaccaatgaacctgatcggcgtggcaagaggcgaaaacatccccgccgtgatcgccctgaccgaccccgagggctgcccactgagccggtttaaggatagcctgggaaacccaacccacatcctgagaatcggcgagagctataaggagaagcagcggaccatccaggccaagaaggaggtggagcagcggagagccggcggctacagccggaagtacgccagcaaagccaagaatctggcagacgatatggtgagaaacaccgctagagatctgctgtactacgccgtgacccaggatgccatgctgatcttcgccaacctgagccggggcttcggccggcagggcaagcggaccttcatggccgagagacagtacacacggatggaggactggctgaccgccaagctggcctacgagggcctgagcaagacctacctgtccaagacactggcccagtacacctccaagacatgcagcaactgtgggtttaccatcaccagcgccgactacgacagggtgctggagaagctgaagaagacagcaacaggctggatgaccacaattaacggcaaggagctgaaggtggagggccagattacctactacaacagatacaagagacagaacgtagtcaaggacctgtccgtcgagctggatagactgagcgaagaatctgtgaacaacgacatctcctcctggacaaagggcagaagcggagaagctctgagcctcctgaagaaaagattctcccatagacccgtgcaggagaagttcgtgtgcctgaactgcggcttcgagacacacgcagccgagcaagccgccctgaacatcgccagatcctggctgttcctgcggagccaggagtacaagaaataccagacaaacaagacaaccggcaacaccgataagagagccttcgtcgagacctggcagtccttttaccggaagaagcttaaggaggtgtggaaacctgccgtgcggtctggcggatctggcggaggctccaccagccccaagaaaaagagaaaagtctaagctgccttctgcggggcttgccttctggccatgcccttcttctctcccttgcacctgtacctcttggtctttgaataaagcctgagtaggaaggctagcaaaaaaaaaaaaaaaaaaaaaaaaaaaaaaaaaaaaaaaaaaaaaaaaaaaaaaaaaaaaaaaaaaaaaaaaaaaaaaaa

SEQ ID NO: 13210 - RNA, 5785 nt, synthetic construct
  source 1..5785: mol_type = other RNA
aggaaataagagagaaaagaagagtaagaagaaatataagagccaccatggcccctaagaagaagcgtaaagtgagccggatggaacgcctcgtctacgaggtgcggcagaagtgcagaaacatcgaggacatctgcatctcctgcggatctctgaacgtgaccctggagcacccactgttcatcggcggcatgtgccagaactgtaaaaactgttttctggagtgtgcctatcaatacgacgatgacggctaccagagctactgcaccatctgttgcggcggaagagaggtgctgatgtgtggaaataacaactgctgccggtgcttctgcgtggaatgcgtggacctgctggtgggccccggcgccgcccaggccgctattaaggaagatccttggaactgctacatgtgcggccacaagggcacatacggcctgctgagacggagagaggactggcctagcagactgcagatgttcttcgccaataaccacgaccaggagttcgacccccctaaggtgtaccctcccgtccccgccgagaagagaaagcccatccgggtcctgagcctgttcgatggcatcgccaccggtctgctggtgctgaaggacctgggcatccaggtggataggtacattgcctccgaggtgtgcgaggactccatcaccgtgggaatggtgcgtcatcagggcaagatcatgtacgtgggcgacgtgcggagcgtgacacagaagcatatccaggagtggggccctttcgacctggtgatcggcggcagcccttgcaatgacctgagcatcgtgaacccagcccggaagggcctgtacgagggaaccggcagactgttcttcgagttttacagactgctgcacgacgcccggcctaaggaaggcgacgaccggcccttcttttggctgttcgagaatgtggtggccatgggagtcagcgacaagcgggatattagccggttcctggagagcaaccccgtgatgatcgatgccaaggaagtgagcgccgcccaccgggccagatacttctggggcaatctgcctggcatgaacagacccctggccagcaccgtgaacgacaagctggagctgcaggagtgcctggagcacggccggatcgccaagttcagcaaggtgagaaccatcaccacccgaagcaacagcatcaaacaaggcaaggaccagcactttcctgtgttcatgaacgagaaggaggacatcctgtggtgtaccgagatggagagagtgttcgggttcccagtccactacacagatgtcagcaacatgtctagactggccagacagagactgctgggaagaagctggtccgtccctgtgatcagacacctgttcgcccctctgaaggagtacttcgcctgcgtgagcagcggcaacagcaacgccaacagccggggccccagcttctctagcggcctggtgccactgtccctgagagggagccacatgggccccatggagatctacaaaaccgtgagcgcctggaagcggcagcctgtgcgcgtgctgagcctgtttcggaatatcgataaagtcctgaaaagcctgggattcctggagagcggctctggctccggcggtggcaccctgaagtacgtggaggatgtgacaaacgtggtcagacgggatgtggagaagtggggccccttcgatctggtgtacggcagcacccaacccctgggcagctcttgtgaccggtgccctggctggtacatgtttcagttccaccggatcctgcagtacgccctgccgagacaggagtcccagcggccattcttttggattttcatggacaacttgctgctgaccgaggatgaccaggaaactaccactcggttcctgcagaccgaagccgtgaccctgcaggacgtgagaggccgggactaccagaacgccatgcgggtgtggtccaacatccctggactgaaaagcaagcacgcacctctgacccctaaagaagaggagtacctgcaggcccaggtgcggagcagaagcaagctggacgcccctaaggtggatctgctggtgaagaattgcctcctgcccctgagagagtacttcaagtatttcagccagaatagtctgcccctgggaggcagcggcggcggcatgccccagggcagcgtgagcttcaaggacgtgaccgtggacttcacccaggaggagtggcagcagctggacagcgcccagaaggccctgtacagggacgtgatgctggagaactactgccacttcgtgagcgtgggcttccacatgaccaagcccgacatgatccacaagctggagcagggcaaggagctgtggaccaccggcaggatcttccccagcaggagctacctgggcgagagcgtgggcggcccaagcagcggcgcccctcctcccagcggcggcagcccagccggctccccaacctctaccgaggagggcacctctgagtccgccacccccgagagcggccctggcacctccaccgagcccagcgagggcagcgcacccggcagccctgccggcagccccacctccacagaggagggaaccagcaccgagcccagcgaaggcagcgccccaggcaccagcaccgagcctagtgagcaggagattaaacggatcaacaagatcagaagaagacttgtgaaagacagcaacaccaagaaggccggcaagacaggccccatgaaaaccctgctggttagagtgatgacacccgatctgagagagcggctggaaaacctgagaaagaagcctgaaaatatcccccagcccatcagcaatacatctagagccaacctgaataagctgctgaccgattacaccgaaatgaagaaggcgatcctgcatgtgtactgggaagagttccagaaggaccctgtgggcctgatgagccgggtggcccagcctgccagcaagaagatcgatcagaacaagctgaaacctgagatggacgagaagggcaacctgaccaccgccggctttgcctgctctcagtgtggccagcccctgttcgtgtacaagctggagcaggtgtctgagaagggcaaggcttacaccaactacttcggacggtgcaatgtggccgagcacgaaaagctgatcctgctggcccagctgaagcccgagaaggatagcgacgaagccgtgacatatagcctgggaaagtttgggcagagggccctggatttctacagcattcatgtgaccaaggagtccacccaccccgtgaagcccctggcccagatcgccggaaacagatacgcctccggacctgtgggaaaggccctgagcgacgcatgtatgggcacaatcgcctccttcctgtctaagtaccaggacatcatcatcgaacaccagaaggtggtgaagggcaaccagaagagactggagagcctgcgggagctggccggcaaggaaaacctggaataccctagcgtgaccctgccacctcagcctcacaccaaggagggcgttgatgcctacaacgaagtgatcgcccgggtgcgaatgtgggtgaacctgaacctgtggcagaagctgaagctaagcagagatgatgccaagcctctgctgagactgaagggattcccttcctttcctctggtcgagagacaggccaacgaagtggactggtgggacatggtgtgtaacgtgaagaagctgatcaacgagaaaaaggaggatggcaaggtgttttggcagaatctggctggctacaagagacaggaagccctgagaccatacctgagcagcgaggaagatcggaagaagggaaagaaattcgctcggtaccagctgggcgacctgctgctgcacctggaaaagaagcacggcgaggactggggaaaggtgtacgacgaggcctgggagcggattgacaagaaagtggaaggcctgagcaagcacatcaagctggaagaggaacggagaagcgaggacgcccagagcaaggccgccctgaccgactggctgcgggctaaggccagcttcgtgatcgagggcctgaaggaggccgacaaggacgagttctgcagatgcgagctgaagctgcagaagtggtacggggacctgcggggaaagcccttcgccatcgaagccgagaacagcatcctggacatcagcggcttcagcaagcagtacaactgtgccttcatctggcagaaggacggcgtgaagaagctgaacctgtacctgatcatcaactacttcaagggcggcaagctgcggttcaagaagatcaaacctgaagccttcgaagccaacagattctacaccgtgatcaacaaaaagagcggcgagatcgtgcccatggaggtgaacttcaacttcgacgaccccaacctgatcatcctgcctctggcctttggcaagagacagggcagagaattcatctggaacgacctgctgtccctggaaaccggcagcctgaagctggccaacggaagagtgatcgagaagacactgtacaacagaagaacccggcaggatgagcctgccctgttcgtggccctgaccttcgagcggcgggaggtcctggactcctccaatatcaaaccaatgaacctgatcggcgtggcaagaggcgaaaacatccccgccgtgatcgccctgaccgaccccgagggctgcccactgagccggtttaaggatagcctgggaaacccaacccacatcctgagaatcggcgagagctataaggagaagcagcggaccatccaggccaagaaggaggtggagcagcggagagccggcggctacagccggaagtacgccagcaaagccaagaatctggcagacgatatggtgagaaacaccgctagagatctgctgtactacgccgtgacccaggatgccatgctgatcttcgccaacctgagccggggcttcggccggcagggcaagcggaccttcatggccgagagacagtacacacggatggaggactggctgaccgccaagctggcctacgagggcctgagcaagacctacctgtccaagacactggcccagtacacctccaagacatgcagcaactgtgggtttaccatcaccagcgccgactacgacagggtgctggagaagctgaagaagacagcaacaggctggatgaccacaattaacggcaaggagctgaaggtggagggccagattacctactacaacagatacaagagacagaacgtagtcaaggacctgtccgtcgagctggatagactgagcgaagaatctgtgaacaacgacatctcctcctggacaaagggcagaagcggagaagctctgagcctcctgaagaaaagattctcccatagacccgtgcaggagaagttcgtgtgcctgaactgcggcttcgagacacacgcagccgagcaagccgccctgaacatcgccagatcctggctgttcctgcggagccaggagtacaagaaataccagacaaacaagacaaccggcaacaccgataagagagccttcgtcgagacctggcagtccttttaccggaagaagcttaaggaggtgtggaaacctgccgtgcggtctggcggatctggcggaggctccaccagccccaagaaaaagagaaaagtctaagctgccttctgcggggcttgccttctggccatgcccttcttctctcccttgcacctgtacctcttggtctttgaataaagcctgagtaggaaggctagcaaaaaaaaaaaaaaaaaaaaaaaaaaaaaaaaaaaaaaaaaaaaaaaaaaaaaaaaaaaaaaaaaaaaaaaaaaaaaaaa

SEQ ID NO: 13211 - RNA, 5785 nt, synthetic construct
  source 1..5785: mol_type = other RNA
aggaaataagagagaaaagaagagtaagaagaaatataagagccaccatggcccctaagaagaagcgtaaagtgagccggatggaacgcctcgtctacgaggtgcggcagaagtgcagaaacatcgaggacatctgcatctcctgcggatctctgaacgtgaccctggagcacccactgttcatcggcggcatgtgccagaactgtaaaaactgttttctggagtgtgcctatcaatacgacgatgacggctaccagagctactgcaccatctgttgcggcggaagagaggtgctgatgtgtggaaataacaactgctgccggtgcttctgcgtggaatgcgtggacctgctggtgggccccggcgccgcccaggccgctattaaggaagatccttggaactgctacatgtgcggccacaagggcacatacggcctgctgagacggagagaggactggcctagcagactgcagatgttcttcgccaataaccacgaccaggagttcgacccccctaaggtgtaccctcccgtccccgccgagaagagaaagcccatccgggtcctgagcctgttcgatggcatcgccaccggtctgctggtgctgaaggacctgggcatccaggtggataggtacattgcctccgaggtgtgcgaggactccatcaccgtgggaatggtgcgtcatcagggcaagatcatgtacgtgggcgacgtgcggagcgtgacacagaagcatatccaggagtggggccctttcgacctggtgatcggcggcagcccttgcaatgacctgagcatcgtgaacccagcccggaagggcctgtacgagggaaccggcagactgttcttcgagttttacagactgctgcacgacgcccggcctaaggaaggcgacgaccggcccttcttttggctgttcgagaatgtggtggccatgggagtcagcgacaagcgggatattagccggttcctggagagcaaccccgtgatgatcgatgccaaggaagtgagcgccgcccaccgggccagatacttctggggcaatctgcctggcatgaacagacccctggccagcaccgtgaacgacaagctggagctgcaggagtgcctggagcacggccggatcgccaagttcagcaaggtgagaaccatcaccacccgaagcaacagcatcaaacaaggcaaggaccagcactttcctgtgttcatgaacgagaaggaggacatcctgtggtgtaccgagatggagagagtgttcgggttcccagtccactacacagatgtcagcaacatgtctagactggccagacagagactgctgggaagaagctggtccgtccctgtgatcagacacctgttcgcccctctgaaggagtacttcgcctgcgtgagcagcggcaacagcaacgccaacagccggggccccagcttctctagcggcctggtgccactgtccctgagagggagccacatgggccccatggagatctacaaaaccgtgagcgcctggaagcggcagcctgtgcgcgtgctgagcctgtttcggaatatcgataaagtcctgaaaagcctgggattcctggagagcggctctggctccggcggtggcaccctgaagtacgtggaggatgtgacaaacgtggtcagacgggatgtggagaagtggggccccttcgatctggtgtacggcagcacccaacccctgggcagctcttgtgaccggtgccctggctggtacatgtttcagttccaccggatcctgcagtacgccctgccgagacaggagtcccagcggccattcttttggattttcatggacaacttgctgctgaccgaggatgaccaggaaactaccactcggttcctgcagaccgaagccgtgaccctgcaggacgtgagaggccgggactaccagaacgccatgcgggtgtggtccaacatccctggactgaaaagcaagcacgcacctctgacccctaaagaagaggagtacctgcaggcccaggtgcggagcagaagcaagctggacgcccctaaggtggatctgctggtgaagaattgcctcctgcccctgagagagtacttcaagtatttcagccagaatagtctgcccctgggaggcagcggcggcggcaaggagaagctggtgaccttcgaggacgtggccgtgtacttcacccaggccgagtgggacggcctgagccccgcccagaggaccctgtacagggacgtgatgctggagaactacggcaacgtggccagcctgggcttccccctgctgaagcccgccgtgatcagccagctggagggcggcggcgagctgggcggccccagccccctggccgccggcaccggcctgtggggcctgaggaccggcggcggcccaagcagcggcgcccctcctcccagcggcggcagcccagccggctccccaacctctaccgaggagggcacctctgagtccgccacccccgagagcggccctggcacctccaccgagcccagcgagggcagcgcacccggcagccctgccggcagccccacctccacagaggagggaaccagcaccgagcccagcgaaggcagcgccccaggcaccagcaccgagcctagtgagcaggagattaaacggatcaacaagatcagaagaagacttgtgaaagacagcaacaccaagaaggccggcaagacaggccccatgaaaaccctgctggttagagtgatgacacccgatctgagagagcggctggaaaacctgagaaagaagcctgaaaatatcccccagcccatcagcaatacatctagagccaacctgaataagctgctgaccgattacaccgaaatgaagaaggcgatcctgcatgtgtactgggaagagttccagaaggaccctgtgggcctgatgagccgggtggcccagcctgccagcaagaagatcgatcagaacaagctgaaacctgagatggacgagaagggcaacctgaccaccgccggctttgcctgctctcagtgtggccagcccctgttcgtgtacaagctggagcaggtgtctgagaagggcaaggcttacaccaactacttcggacggtgcaatgtggccgagcacgaaaagctgatcctgctggcccagctgaagcccgagaaggatagcgacgaagccgtgacatatagcctgggaaagtttgggcagagggccctggatttctacagcattcatgtgaccaaggagtccacccaccccgtgaagcccctggcccagatcgccggaaacagatacgcctccggacctgtgggaaaggccctgagcgacgcatgtatgggcacaatcgcctccttcctgtctaagtaccaggacatcatcatcgaacaccagaaggtggtgaagggcaaccagaagagactggagagcctgcgggagctggccggcaaggaaaacctggaataccctagcgtgaccctgccacctcagcctcacaccaaggagggcgttgatgcctacaacgaagtgatcgcccgggtgcgaatgtgggtgaacctgaacctgtggcagaagctgaagctaagcagagatgatgccaagcctctgctgagactgaagggattcccttcctttcctctggtcgagagacaggccaacgaagtggactggtgggacatggtgtgtaacgtgaagaagctgatcaacgagaaaaaggaggatggcaaggtgttttggcagaatctggctggctacaagagacaggaagccctgagaccatacctgagcagcgaggaagatcggaagaagggaaagaaattcgctcggtaccagctgggcgacctgctgctgcacctggaaaagaagcacggcgaggactggggaaaggtgtacgacgaggcctgggagcggattgacaagaaagtggaaggcctgagcaagcacatcaagctggaagaggaacggagaagcgaggacgcccagagcaaggccgccctgaccgactggctgcgggctaaggccagcttcgtgatcgagggcctgaaggaggccgacaaggacgagttctgcagatgcgagctgaagctgcagaagtggtacggggacctgcggggaaagcccttcgccatcgaagccgagaacagcatcctggacatcagcggcttcagcaagcagtacaactgtgccttcatctggcagaaggacggcgtgaagaagctgaacctgtacctgatcatcaactacttcaagggcggcaagctgcggttcaagaagatcaaacctgaagccttcgaagccaacagattctacaccgtgatcaacaaaaagagcggcgagatcgtgcccatggaggtgaacttcaacttcgacgaccccaacctgatcatcctgcctctggcctttggcaagagacagggcagagaattcatctggaacgacctgctgtccctggaaaccggcagcctgaagctggccaacggaagagtgatcgagaagacactgtacaacagaagaacccggcaggatgagcctgccctgttcgtggccctgaccttcgagcggcgggaggtcctggactcctccaatatcaaaccaatgaacctgatcggcgtggcaagaggcgaaaacatccccgccgtgatcgccctgaccgaccccgagggctgcccactgagccggtttaaggatagcctgggaaacccaacccacatcctgagaatcggcgagagctataaggagaagcagcggaccatccaggccaagaaggaggtggagcagcggagagccggcggctacagccggaagtacgccagcaaagccaagaatctggcagacgatatggtgagaaacaccgctagagatctgctgtactacgccgtgacccaggatgccatgctgatcttcgccaacctgagccggggcttcggccggcagggcaagcggaccttcatggccgagagacagtacacacggatggaggactggctgaccgccaagctggcctacgagggcctgagcaagacctacctgtccaagacactggcccagtacacctccaagacatgcagcaactgtgggtttaccatcaccagcgccgactacgacagggtgctggagaagctgaagaagacagcaacaggctggatgaccacaattaacggcaaggagctgaaggtggagggccagattacctactacaacagatacaagagacagaacgtagtcaaggacctgtccgtcgagctggatagactgagcgaagaatctgtgaacaacgacatctcctcctggacaaagggcagaagcggagaagctctgagcctcctgaagaaaagattctcccatagacccgtgcaggagaagttcgtgtgcctgaactgcggcttcgagacacacgcagccgagcaagccgccctgaacatcgccagatcctggctgttcctgcggagccaggagtacaagaaataccagacaaacaagacaaccggcaacaccgataagagagccttcgtcgagacctggcagtccttttaccggaagaagcttaaggaggtgtggaaacctgccgtgcggtctggcggatctggcggaggctccaccagccccaagaaaaagagaaaagtctaagctgccttctgcggggcttgccttctggccatgcccttcttctctcccttgcacctgtacctcttggtctttgaataaagcctgagtaggaaggctagcaaaaaaaaaaaaaaaaaaaaaaaaaaaaaaaaaaaaaaaaaaaaaaaaaaaaaaaaaaaaaaaaaaaaaaaaaaaaaaaa

SEQ ID NO: 13212 - RNA, 5785 nt, synthetic construct
  source 1..5785: mol_type = other RNA
aggaaataagagagaaaagaagagtaagaagaaatataagagccaccatggcccctaagaagaagcgtaaagtgagccggatggaacgcctcgtctacgaggtgcggcagaagtgcagaaacatcgaggacatctgcatctcctgcggatctctgaacgtgaccctggagcacccactgttcatcggcggcatgtgccagaactgtaaaaactgttttctggagtgtgcctatcaatacgacgatgacggctaccagagctactgcaccatctgttgcggcggaagagaggtgctgatgtgtggaaataacaactgctgccggtgcttctgcgtggaatgcgtggacctgctggtgggccccggcgccgcccaggccgctattaaggaagatccttggaactgctacatgtgcggccacaagggcacatacggcctgctgagacggagagaggactggcctagcagactgcagatgttcttcgccaataaccacgaccaggagttcgacccccctaaggtgtaccctcccgtccccgccgagaagagaaagcccatccgggtcctgagcctgttcgatggcatcgccaccggtctgctggtgctgaaggacctgggcatccaggtggataggtacattgcctccgaggtgtgcgaggactccatcaccgtgggaatggtgcgtcatcagggcaagatcatgtacgtgggcgacgtgcggagcgtgacacagaagcatatccaggagtggggccctttcgacctggtgatcggcggcagcccttgcaatgacctgagcatcgtgaacccagcccggaagggcctgtacgagggaaccggcagactgttcttcgagttttacagactgctgcacgacgcccggcctaaggaaggcgacgaccggcccttcttttggctgttcgagaatgtggtggccatgggagtcagcgacaagcgggatattagccggttcctggagagcaaccccgtgatgatcgatgccaaggaagtgagcgccgcccaccgggccagatacttctggggcaatctgcctggcatgaacagacccctggccagcaccgtgaacgacaagctggagctgcaggagtgcctggagcacggccggatcgccaagttcagcaaggtgagaaccatcaccacccgaagcaacagcatcaaacaaggcaaggaccagcactttcctgtgttcatgaacgagaaggaggacatcctgtggtgtaccgagatggagagagtgttcgggttcccagtccactacacagatgtcagcaacatgtctagactggccagacagagactgctgggaagaagctggtccgtccctgtgatcagacacctgttcgcccctctgaaggagtacttcgcctgcgtgagcagcggcaacagcaacgccaacagccggggccccagcttctctagcggcctggtgccactgtccctgagagggagccacatgggccccatggagatctacaaaaccgtgagcgcctggaagcggcagcctgtgcgcgtgctgagcctgtttcggaatatcgataaagtcctgaaaagcctgggattcctggagagcggctctggctccggcggtggcaccctgaagtacgtggaggatgtgacaaacgtggtcagacgggatgtggagaagtggggccccttcgatctggtgtacggcagcacccaacccctgggcagctcttgtgaccggtgccctggctggtacatgtttcagttccaccggatcctgcagtacgccctgccgagacaggagtcccagcggccattcttttggattttcatggacaacttgctgctgaccgaggatgaccaggaaactaccactcggttcctgcagaccgaagccgtgaccctgcaggacgtgagaggccgggactaccagaacgccatgcgggtgtggtccaacatccctggactgaaaagcaagcacgcacctctgacccctaaagaagaggagtacctgcaggcccaggtgcggagcagaagcaagctggacgcccctaaggtggatctgctggtgaagaattgcctcctgcccctgagagagtacttcaagtatttcagccagaatagtctgcccctgggaggcagcggcggcggcaagcccggcgccctgagcttcgccgacgtggccgtgtacttcagcagcgaggagtggggctgcctgaggcccgcccagagggccctgtacagggacgtgatgagggagacctacggccacctgggcgccctgggctgcgccggccccaagcccgccctgatcagctggctggagaggaacaccgacgactgggagcccgccgccctggacccccaggagtgccccaggggcgtggccgtgcagggcggcccaagcagcggcgcccctcctcccagcggcggcagcccagccggctccccaacctctaccgaggagggcacctctgagtccgccacccccgagagcggccctggcacctccaccgagcccagcgagggcagcgcacccggcagccctgccggcagccccacctccacagaggagggaaccagcaccgagcccagcgaaggcagcgccccaggcaccagcaccgagcctagtgagcaggagattaaacggatcaacaagatcagaagaagacttgtgaaagacagcaacaccaagaaggccggcaagacaggccccatgaaaaccctgctggttagagtgatgacacccgatctgagagagcggctggaaaacctgagaaagaagcctgaaaatatcccccagcccatcagcaatacatctagagccaacctgaataagctgctgaccgattacaccgaaatgaagaaggcgatcctgcatgtgtactgggaagagttccagaaggaccctgtgggcctgatgagccgggtggcccagcctgccagcaagaagatcgatcagaacaagctgaaacctgagatggacgagaagggcaacctgaccaccgccggctttgcctgctctcagtgtggccagcccctgttcgtgtacaagctggagcaggtgtctgagaagggcaaggcttacaccaactacttcggacggtgcaatgtggccgagcacgaaaagctgatcctgctggcccagctgaagcccgagaaggatagcgacgaagccgtgacatatagcctgggaaagtttgggcagagggccctggatttctacagcattcatgtgaccaaggagtccacccaccccgtgaagcccctggcccagatcgccggaaacagatacgcctccggacctgtgggaaaggccctgagcgacgcatgtatgggcacaatcgcctccttcctgtctaagtaccaggacatcatcatcgaacaccagaaggtggtgaagggcaaccagaagagactggagagcctgcgggagctggccggcaaggaaaacctggaataccctagcgtgaccctgccacctcagcctcacaccaaggagggcgttgatgcctacaacgaagtgatcgcccgggtgcgaatgtgggtgaacctgaacctgtggcagaagctgaagctaagcagagatgatgccaagcctctgctgagactgaagggattcccttcctttcctctggtcgagagacaggccaacgaagtggactggtgggacatggtgtgtaacgtgaagaagctgatcaacgagaaaaaggaggatggcaaggtgttttggcagaatctggctggctacaagagacaggaagccctgagaccatacctgagcagcgaggaagatcggaagaagggaaagaaattcgctcggtaccagctgggcgacctgctgctgcacctggaaaagaagcacggcgaggactggggaaaggtgtacgacgaggcctgggagcggattgacaagaaagtggaaggcctgagcaagcacatcaagctggaagaggaacggagaagcgaggacgcccagagcaaggccgccctgaccgactggctgcgggctaaggccagcttcgtgatcgagggcctgaaggaggccgacaaggacgagttctgcagatgcgagctgaagctgcagaagtggtacggggacctgcggggaaagcccttcgccatcgaagccgagaacagcatcctggacatcagcggcttcagcaagcagtacaactgtgccttcatctggcagaaggacggcgtgaagaagctgaacctgtacctgatcatcaactacttcaagggcggcaagctgcggttcaagaagatcaaacctgaagccttcgaagccaacagattctacaccgtgatcaacaaaaagagcggcgagatcgtgcccatggaggtgaacttcaacttcgacgaccccaacctgatcatcctgcctctggcctttggcaagagacagggcagagaattcatctggaacgacctgctgtccctggaaaccggcagcctgaagctggccaacggaagagtgatcgagaagacactgtacaacagaagaacccggcaggatgagcctgccctgttcgtggccctgaccttcgagcggcgggaggtcctggactcctccaatatcaaaccaatgaacctgatcggcgtggcaagaggcgaaaacatccccgccgtgatcgccctgaccgaccccgagggctgcccactgagccggtttaaggatagcctgggaaacccaacccacatcctgagaatcggcgagagctataaggagaagcagcggaccatccaggccaagaaggaggtggagcagcggagagccggcggctacagccggaagtacgccagcaaagccaagaatctggcagacgatatggtgagaaacaccgctagagatctgctgtactacgccgtgacccaggatgccatgctgatcttcgccaacctgagccggggcttcggccggcagggcaagcggaccttcatggccgagagacagtacacacggatggaggactggctgaccgccaagctggcctacgagggcctgagcaagacctacctgtccaagacactggcccagtacacctccaagacatgcagcaactgtgggtttaccatcaccagcgccgactacgacagggtgctggagaagctgaagaagacagcaacaggctggatgaccacaattaacggcaaggagctgaaggtggagggccagattacctactacaacagatacaagagacagaacgtagtcaaggacctgtccgtcgagctggatagactgagcgaagaatctgtgaacaacgacatctcctcctggacaaagggcagaagcggagaagctctgagcctcctgaagaaaagattctcccatagacccgtgcaggagaagttcgtgtgcctgaactgcggcttcgagacacacgcagccgagcaagccgccctgaacatcgccagatcctggctgttcctgcggagccaggagtacaagaaataccagacaaacaagacaaccggcaacaccgataagagagccttcgtcgagacctggcagtccttttaccggaagaagcttaaggaggtgtggaaacctgccgtgcggtctggcggatctggcggaggctccaccagccccaagaaaaagagaaaagtctaagctgccttctgcggggcttgccttctggccatgcccttcttctctcccttgcacctgtacctcttggtctttgaataaagcctgagtaggaaggctagcaaaaaaaaaaaaaaaaaaaaaaaaaaaaaaaaaaaaaaaaaaaaaaaaaaaaaaaaaaaaaaaaaaaaaaaaaaaaaaaa

SEQ ID NO: 13213 - RNA, 5785 nt, synthetic construct
  source 1..5785: mol_type = other RNA
aggaaataagagagaaaagaagagtaagaagaaatataagagccaccatggcccctaagaagaagcgtaaagtgagccggatggaacgcctcgtctacgaggtgcggcagaagtgcagaaacatcgaggacatctgcatctcctgcggatctctgaacgtgaccctggagcacccactgttcatcggcggcatgtgccagaactgtaaaaactgttttctggagtgtgcctatcaatacgacgatgacggctaccagagctactgcaccatctgttgcggcggaagagaggtgctgatgtgtggaaataacaactgctgccggtgcttctgcgtggaatgcgtggacctgctggtgggccccggcgccgcccaggccgctattaaggaagatccttggaactgctacatgtgcggccacaagggcacatacggcctgctgagacggagagaggactggcctagcagactgcagatgttcttcgccaataaccacgaccaggagttcgacccccctaaggtgtaccctcccgtccccgccgagaagagaaagcccatccgggtcctgagcctgttcgatggcatcgccaccggtctgctggtgctgaaggacctgggcatccaggtggataggtacattgcctccgaggtgtgcgaggactccatcaccgtgggaatggtgcgtcatcagggcaagatcatgtacgtgggcgacgtgcggagcgtgacacagaagcatatccaggagtggggccctttcgacctggtgatcggcggcagcccttgcaatgacctgagcatcgtgaacccagcccggaagggcctgtacgagggaaccggcagactgttcttcgagttttacagactgctgcacgacgcccggcctaaggaaggcgacgaccggcccttcttttggctgttcgagaatgtggtggccatgggagtcagcgacaagcgggatattagccggttcctggagagcaaccccgtgatgatcgatgccaaggaagtgagcgccgcccaccgggccagatacttctggggcaatctgcctggcatgaacagacccctggccagcaccgtgaacgacaagctggagctgcaggagtgcctggagcacggccggatcgccaagttcagcaaggtgagaaccatcaccacccgaagcaacagcatcaaacaaggcaaggaccagcactttcctgtgttcatgaacgagaaggaggacatcctgtggtgtaccgagatggagagagtgttcgggttcccagtccactacacagatgtcagcaacatgtctagactggccagacagagactgctgggaagaagctggtccgtccctgtgatcagacacctgttcgcccctctgaaggagtacttcgcctgcgtgagcagcggcaacagcaacgccaacagccggggccccagcttctctagcggcctggtgccactgtccctgagagggagccacatgggccccatggagatctacaaaaccgtgagcgcctggaagcggcagcctgtgcgcgtgctgagcctgtttcggaatatcgataaagtcctgaaaagcctgggattcctggagagcggctctggctccggcggtggcaccctgaagtacgtggaggatgtgacaaacgtggtcagacgggatgtggagaagtggggccccttcgatctggtgtacggcagcacccaacccctgggcagctcttgtgaccggtgccctggctggtacatgtttcagttccaccggatcctgcagtacgccctgccgagacaggagtcccagcggccattcttttggattttcatggacaacttgctgctgaccgaggatgaccaggaaactaccactcggttcctgcagaccgaagccgtgaccctgcaggacgtgagaggccgggactaccagaacgccatgcgggtgtggtccaacatccctggactgaaaagcaagcacgcacctctgacccctaaagaagaggagtacctgcaggcccaggtgcggagcagaagcaagctggacgcccctaaggtggatctgctggtgaagaattgcctcctgcccctgagagagtacttcaagtatttcagccagaatagtctgcccctgggaggcagcggcggcggcaagcccggcaccgtgagcttcgccgacgtggccgtgtacttcagccccgaggagtggaggtacctgaggcccgcccagagggccctgtacagggaggtgatgagggagacctacggcctgctgacctacctggacgtgggctgcgccaagcccgccctgatcagctgggtggaggaggagagcgaggtgtggggccccggcgcccaggaccccgaggtggccatgtgcaggaccgaggtgcacggcggcccaagcagcggcgcccctcctcccagcggcggcagcccagccggctccccaacctctaccgaggagggcacctctgagtccgccacccccgagagcggccctggcacctccaccgagcccagcgagggcagcgcacccggcagccctgccggcagccccacctccacagaggagggaaccagcaccgagcccagcgaaggcagcgccccaggcaccagcaccgagcctagtgagcaggagattaaacggatcaacaagatcagaagaagacttgtgaaagacagcaacaccaagaaggccggcaagacaggccccatgaaaaccctgctggttagagtgatgacacccgatctgagagagcggctggaaaacctgagaaagaagcctgaaaatatcccccagcccatcagcaatacatctagagccaacctgaataagctgctgaccgattacaccgaaatgaagaaggcgatcctgcatgtgtactgggaagagttccagaaggaccctgtgggcctgatgagccgggtggcccagcctgccagcaagaagatcgatcagaacaagctgaaacctgagatggacgagaagggcaacctgaccaccgccggctttgcctgctctcagtgtggccagcccctgttcgtgtacaagctggagcaggtgtctgagaagggcaaggcttacaccaactacttcggacggtgcaatgtggccgagcacgaaaagctgatcctgctggcccagctgaagcccgagaaggatagcgacgaagccgtgacatatagcctgggaaagtttgggcagagggccctggatttctacagcattcatgtgaccaaggagtccacccaccccgtgaagcccctggcccagatcgccggaaacagatacgcctccggacctgtgggaaaggccctgagcgacgcatgtatgggcacaatcgcctccttcctgtctaagtaccaggacatcatcatcgaacaccagaaggtggtgaagggcaaccagaagagactggagagcctgcgggagctggccggcaaggaaaacctggaataccctagcgtgaccctgccacctcagcctcacaccaaggagggcgttgatgcctacaacgaagtgatcgcccgggtgcgaatgtgggtgaacctgaacctgtggcagaagctgaagctaagcagagatgatgccaagcctctgctgagactgaagggattcccttcctttcctctggtcgagagacaggccaacgaagtggactggtgggacatggtgtgtaacgtgaagaagctgatcaacgagaaaaaggaggatggcaaggtgttttggcagaatctggctggctacaagagacaggaagccctgagaccatacctgagcagcgaggaagatcggaagaagggaaagaaattcgctcggtaccagctgggcgacctgctgctgcacctggaaaagaagcacggcgaggactggggaaaggtgtacgacgaggcctgggagcggattgacaagaaagtggaaggcctgagcaagcacatcaagctggaagaggaacggagaagcgaggacgcccagagcaaggccgccctgaccgactggctgcgggctaaggccagcttcgtgatcgagggcctgaaggaggccgacaaggacgagttctgcagatgcgagctgaagctgcagaagtggtacggggacctgcggggaaagcccttcgccatcgaagccgagaacagcatcctggacatcagcggcttcagcaagcagtacaactgtgccttcatctggcagaaggacggcgtgaagaagctgaacctgtacctgatcatcaactacttcaagggcggcaagctgcggttcaagaagatcaaacctgaagccttcgaagccaacagattctacaccgtgatcaacaaaaagagcggcgagatcgtgcccatggaggtgaacttcaacttcgacgaccccaacctgatcatcctgcctctggcctttggcaagagacagggcagagaattcatctggaacgacctgctgtccctggaaaccggcagcctgaagctggccaacggaagagtgatcgagaagacactgtacaacagaagaacccggcaggatgagcctgccctgttcgtggccctgaccttcgagcggcgggaggtcctggactcctccaatatcaaaccaatgaacctgatcggcgtggcaagaggcgaaaacatccccgccgtgatcgccctgaccgaccccgagggctgcccactgagccggtttaaggatagcctgggaaacccaacccacatcctgagaatcggcgagagctataaggagaagcagcggaccatccaggccaagaaggaggtggagcagcggagagccggcggctacagccggaagtacgccagcaaagccaagaatctggcagacgatatggtgagaaacaccgctagagatctgctgtactacgccgtgacccaggatgccatgctgatcttcgccaacctgagccggggcttcggccggcagggcaagcggaccttcatggccgagagacagtacacacggatggaggactggctgaccgccaagctggcctacgagggcctgagcaagacctacctgtccaagacactggcccagtacacctccaagacatgcagcaactgtgggtttaccatcaccagcgccgactacgacagggtgctggagaagctgaagaagacagcaacaggctggatgaccacaattaacggcaaggagctgaaggtggagggccagattacctactacaacagatacaagagacagaacgtagtcaaggacctgtccgtcgagctggatagactgagcgaagaatctgtgaacaacgacatctcctcctggacaaagggcagaagcggagaagctctgagcctcctgaagaaaagattctcccatagacccgtgcaggagaagttcgtgtgcctgaactgcggcttcgagacacacgcagccgagcaagccgccctgaacatcgccagatcctggctgttcctgcggagccaggagtacaagaaataccagacaaacaagacaaccggcaacaccgataagagagccttcgtcgagacctggcagtccttttaccggaagaagcttaaggaggtgtggaaacctgccgtgcggtctggcggatctggcggaggctccaccagccccaagaaaaagagaaaagtctaagctgccttctgcggggcttgccttctggccatgcccttcttctctcccttgcacctgtacctcttggtctttgaataaagcctgagtaggaaggctagcaaaaaaaaaaaaaaaaaaaaaaaaaaaaaaaaaaaaaaaaaaaaaaaaaaaaaaaaaaaaaaaaaaaaaaaaaaaaaaaa

SEQ ID NO: 13214 - RNA, 5785 nt, synthetic construct
  source 1..5785: mol_type = other RNA
aggaaataagagagaaaagaagagtaagaagaaatataagagccaccatggcccctaagaagaagcgtaaagtgagccggatggaacgcctcgtctacgaggtgcggcagaagtgcagaaacatcgaggacatctgcatctcctgcggatctctgaacgtgaccctggagcacccactgttcatcggcggcatgtgccagaactgtaaaaactgttttctggagtgtgcctatcaatacgacgatgacggctaccagagctactgcaccatctgttgcggcggaagagaggtgctgatgtgtggaaataacaactgctgccggtgcttctgcgtggaatgcgtggacctgctggtgggccccggcgccgcccaggccgctattaaggaagatccttggaactgctacatgtgcggccacaagggcacatacggcctgctgagacggagagaggactggcctagcagactgcagatgttcttcgccaataaccacgaccaggagttcgacccccctaaggtgtaccctcccgtccccgccgagaagagaaagcccatccgggtcctgagcctgttcgatggcatcgccaccggtctgctggtgctgaaggacctgggcatccaggtggataggtacattgcctccgaggtgtgcgaggactccatcaccgtgggaatggtgcgtcatcagggcaagatcatgtacgtgggcgacgtgcggagcgtgacacagaagcatatccaggagtggggccctttcgacctggtgatcggcggcagcccttgcaatgacctgagcatcgtgaacccagcccggaagggcctgtacgagggaaccggcagactgttcttcgagttttacagactgctgcacgacgcccggcctaaggaaggcgacgaccggcccttcttttggctgttcgagaatgtggtggccatgggagtcagcgacaagcgggatattagccggttcctggagagcaaccccgtgatgatcgatgccaaggaagtgagcgccgcccaccgggccagatacttctggggcaatctgcctggcatgaacagacccctggccagcaccgtgaacgacaagctggagctgcaggagtgcctggagcacggccggatcgccaagttcagcaaggtgagaaccatcaccacccgaagcaacagcatcaaacaaggcaaggaccagcactttcctgtgttcatgaacgagaaggaggacatcctgtggtgtaccgagatggagagagtgttcgggttcccagtccactacacagatgtcagcaacatgtctagactggccagacagagactgctgggaagaagctggtccgtccctgtgatcagacacctgttcgcccctctgaaggagtacttcgcctgcgtgagcagcggcaacagcaacgccaacagccggggccccagcttctctagcggcctggtgccactgtccctgagagggagccacatgggccccatggagatctacaaaaccgtgagcgcctggaagcggcagcctgtgcgcgtgctgagcctgtttcggaatatcgataaagtcctgaaaagcctgggattcctggagagcggctctggctccggcggtggcaccctgaagtacgtggaggatgtgacaaacgtggtcagacgggatgtggagaagtggggccccttcgatctggtgtacggcagcacccaacccctgggcagctcttgtgaccggtgccctggctggtacatgtttcagttccaccggatcctgcagtacgccctgccgagacaggagtcccagcggccattcttttggattttcatggacaacttgctgctgaccgaggatgaccaggaaactaccactcggttcctgcagaccgaagccgtgaccctgcaggacgtgagaggccgggactaccagaacgccatgcgggtgtggtccaacatccctggactgaaaagcaagcacgcacctctgacccctaaagaagaggagtacctgcaggcccaggtgcggagcagaagcaagctggacgcccctaaggtggatctgctggtgaagaattgcctcctgcccctgagagagtacttcaagtatttcagccagaatagtctgcccctgggaggcagcggcggcggcccccagaagctggtgaccttcgaggacgtggccgtgtacttcacccagaccgagtgggacggcctgagcaccgcccagagggccctgtacagggacgtgatgctggagaactacggcaacgtggccagcctgggcttccccctgctgaagcccgccgtgatcagccagctggagggcggcggcgagctggagggccccagcagcctggccagcggcgccggcaccggcccccagggcctgtggggcggcccaagcagcggcgcccctcctcccagcggcggcagcccagccggctccccaacctctaccgaggagggcacctctgagtccgccacccccgagagcggccctggcacctccaccgagcccagcgagggcagcgcacccggcagccctgccggcagccccacctccacagaggagggaaccagcaccgagcccagcgaaggcagcgccccaggcaccagcaccgagcctagtgagcaggagattaaacggatcaacaagatcagaagaagacttgtgaaagacagcaacaccaagaaggccggcaagacaggccccatgaaaaccctgctggttagagtgatgacacccgatctgagagagcggctggaaaacctgagaaagaagcctgaaaatatcccccagcccatcagcaatacatctagagccaacctgaataagctgctgaccgattacaccgaaatgaagaaggcgatcctgcatgtgtactgggaagagttccagaaggaccctgtgggcctgatgagccgggtggcccagcctgccagcaagaagatcgatcagaacaagctgaaacctgagatggacgagaagggcaacctgaccaccgccggctttgcctgctctcagtgtggccagcccctgttcgtgtacaagctggagcaggtgtctgagaagggcaaggcttacaccaactacttcggacggtgcaatgtggccgagcacgaaaagctgatcctgctggcccagctgaagcccgagaaggatagcgacgaagccgtgacatatagcctgggaaagtttgggcagagggccctggatttctacagcattcatgtgaccaaggagtccacccaccccgtgaagcccctggcccagatcgccggaaacagatacgcctccggacctgtgggaaaggccctgagcgacgcatgtatgggcacaatcgcctccttcctgtctaagtaccaggacatcatcatcgaacaccagaaggtggtgaagggcaaccagaagagactggagagcctgcgggagctggccggcaaggaaaacctggaataccctagcgtgaccctgccacctcagcctcacaccaaggagggcgttgatgcctacaacgaagtgatcgcccgggtgcgaatgtgggtgaacctgaacctgtggcagaagctgaagctaagcagagatgatgccaagcctctgctgagactgaagggattcccttcctttcctctggtcgagagacaggccaacgaagtggactggtgggacatggtgtgtaacgtgaagaagctgatcaacgagaaaaaggaggatggcaaggtgttttggcagaatctggctggctacaagagacaggaagccctgagaccatacctgagcagcgaggaagatcggaagaagggaaagaaattcgctcggtaccagctgggcgacctgctgctgcacctggaaaagaagcacggcgaggactggggaaaggtgtacgacgaggcctgggagcggattgacaagaaagtggaaggcctgagcaagcacatcaagctggaagaggaacggagaagcgaggacgcccagagcaaggccgccctgaccgactggctgcgggctaaggccagcttcgtgatcgagggcctgaaggaggccgacaaggacgagttctgcagatgcgagctgaagctgcagaagtggtacggggacctgcggggaaagcccttcgccatcgaagccgagaacagcatcctggacatcagcggcttcagcaagcagtacaactgtgccttcatctggcagaaggacggcgtgaagaagctgaacctgtacctgatcatcaactacttcaagggcggcaagctgcggttcaagaagatcaaacctgaagccttcgaagccaacagattctacaccgtgatcaacaaaaagagcggcgagatcgtgcccatggaggtgaacttcaacttcgacgaccccaacctgatcatcctgcctctggcctttggcaagagacagggcagagaattcatctggaacgacctgctgtccctggaaaccggcagcctgaagctggccaacggaagagtgatcgagaagacactgtacaacagaagaacccggcaggatgagcctgccctgttcgtggccctgaccttcgagcggcgggaggtcctggactcctccaatatcaaaccaatgaacctgatcggcgtggcaagaggcgaaaacatccccgccgtgatcgccctgaccgaccccgagggctgcccactgagccggtttaaggatagcctgggaaacccaacccacatcctgagaatcggcgagagctataaggagaagcagcggaccatccaggccaagaaggaggtggagcagcggagagccggcggctacagccggaagtacgccagcaaagccaagaatctggcagacgatatggtgagaaacaccgctagagatctgctgtactacgccgtgacccaggatgccatgctgatcttcgccaacctgagccggggcttcggccggcagggcaagcggaccttcatggccgagagacagtacacacggatggaggactggctgaccgccaagctggcctacgagggcctgagcaagacctacctgtccaagacactggcccagtacacctccaagacatgcagcaactgtgggtttaccatcaccagcgccgactacgacagggtgctggagaagctgaagaagacagcaacaggctggatgaccacaattaacggcaaggagctgaaggtggagggccagattacctactacaacagatacaagagacagaacgtagtcaaggacctgtccgtcgagctggatagactgagcgaagaatctgtgaacaacgacatctcctcctggacaaagggcagaagcggagaagctctgagcctcctgaagaaaagattctcccatagacccgtgcaggagaagttcgtgtgcctgaactgcggcttcgagacacacgcagccgagcaagccgccctgaacatcgccagatcctggctgttcctgcggagccaggagtacaagaaataccagacaaacaagacaaccggcaacaccgataagagagccttcgtcgagacctggcagtccttttaccggaagaagcttaaggaggtgtggaaacctgccgtgcggtctggcggatctggcggaggctccaccagccccaagaaaaagagaaaagtctaagctgccttctgcggggcttgccttctggccatgcccttcttctctcccttgcacctgtacctcttggtctttgaataaagcctgagtaggaaggctagcaaaaaaaaaaaaaaaaaaaaaaaaaaaaaaaaaaaaaaaaaaaaaaaaaaaaaaaaaaaaaaaaaaaaaaaaaaaaaaaa

SEQ ID NO: 13215 - RNA, 5785 nt, synthetic construct
  source 1..5785: mol_type = other RNA
aggaaataagagagaaaagaagagtaagaagaaatataagagccaccatggcccctaagaagaagcgtaaagtgagccggatggaacgcctcgtctacgaggtgcggcagaagtgcagaaacatcgaggacatctgcatctcctgcggatctctgaacgtgaccctggagcacccactgttcatcggcggcatgtgccagaactgtaaaaactgttttctggagtgtgcctatcaatacgacgatgacggctaccagagctactgcaccatctgttgcggcggaagagaggtgctgatgtgtggaaataacaactgctgccggtgcttctgcgtggaatgcgtggacctgctggtgggccccggcgccgcccaggccgctattaaggaagatccttggaactgctacatgtgcggccacaagggcacatacggcctgctgagacggagagaggactggcctagcagactgcagatgttcttcgccaataaccacgaccaggagttcgacccccctaaggtgtaccctcccgtccccgccgagaagagaaagcccatccgggtcctgagcctgttcgatggcatcgccaccggtctgctggtgctgaaggacctgggcatccaggtggataggtacattgcctccgaggtgtgcgaggactccatcaccgtgggaatggtgcgtcatcagggcaagatcatgtacgtgggcgacgtgcggagcgtgacacagaagcatatccaggagtggggccctttcgacctggtgatcggcggcagcccttgcaatgacctgagcatcgtgaacccagcccggaagggcctgtacgagggaaccggcagactgttcttcgagttttacagactgctgcacgacgcccggcctaaggaaggcgacgaccggcccttcttttggctgttcgagaatgtggtggccatgggagtcagcgacaagcgggatattagccggttcctggagagcaaccccgtgatgatcgatgccaaggaagtgagcgccgcccaccgggccagatacttctggggcaatctgcctggcatgaacagacccctggccagcaccgtgaacgacaagctggagctgcaggagtgcctggagcacggccggatcgccaagttcagcaaggtgagaaccatcaccacccgaagcaacagcatcaaacaaggcaaggaccagcactttcctgtgttcatgaacgagaaggaggacatcctgtggtgtaccgagatggagagagtgttcgggttcccagtccactacacagatgtcagcaacatgtctagactggccagacagagactgctgggaagaagctggtccgtccctgtgatcagacacctgttcgcccctctgaaggagtacttcgcctgcgtgagcagcggcaacagcaacgccaacagccggggccccagcttctctagcggcctggtgccactgtccctgagagggagccacatgggccccatggagatctacaaaaccgtgagcgcctggaagcggcagcctgtgcgcgtgctgagcctgtttcggaatatcgataaagtcctgaaaagcctgggattcctggagagcggctctggctccggcggtggcaccctgaagtacgtggaggatgtgacaaacgtggtcagacgggatgtggagaagtggggccccttcgatctggtgtacggcagcacccaacccctgggcagctcttgtgaccggtgccctggctggtacatgtttcagttccaccggatcctgcagtacgccctgccgagacaggagtcccagcggccattcttttggattttcatggacaacttgctgctgaccgaggatgaccaggaaactaccactcggttcctgcagaccgaagccgtgaccctgcaggacgtgagaggccgggactaccagaacgccatgcgggtgtggtccaacatccctggactgaaaagcaagcacgcacctctgacccctaaagaagaggagtacctgcaggcccaggtgcggagcagaagcaagctggacgcccctaaggtggatctgctggtgaagaattgcctcctgcccctgagagagtacttcaagtatttcagccagaatagtctgcccctgggaggcagcggcggcggcgcccaggagcccctgaccttccacgacgtggccgtggacttcacctgggaggagtggcagctgctggaccccgagcagaaggacctgtacagggacgtgatgctggagacctacagccacctggtgagcgtgggctacgaggccagcaagcccgacatcctgagcaagctggaccacggcgaggccccctggaccgtggccggcgagatccactgcggcacccacagcgagatctggaagaggggcggcccaagcagcggcgcccctcctcccagcggcggcagcccagccggctccccaacctctaccgaggagggcacctctgagtccgccacccccgagagcggccctggcacctccaccgagcccagcgagggcagcgcacccggcagccctgccggcagccccacctccacagaggagggaaccagcaccgagcccagcgaaggcagcgccccaggcaccagcaccgagcctagtgagcaggagattaaacggatcaacaagatcagaagaagacttgtgaaagacagcaacaccaagaaggccggcaagacaggccccatgaaaaccctgctggttagagtgatgacacccgatctgagagagcggctggaaaacctgagaaagaagcctgaaaatatcccccagcccatcagcaatacatctagagccaacctgaataagctgctgaccgattacaccgaaatgaagaaggcgatcctgcatgtgtactgggaagagttccagaaggaccctgtgggcctgatgagccgggtggcccagcctgccagcaagaagatcgatcagaacaagctgaaacctgagatggacgagaagggcaacctgaccaccgccggctttgcctgctctcagtgtggccagcccctgttcgtgtacaagctggagcaggtgtctgagaagggcaaggcttacaccaactacttcggacggtgcaatgtggccgagcacgaaaagctgatcctgctggcccagctgaagcccgagaaggatagcgacgaagccgtgacatatagcctgggaaagtttgggcagagggccctggatttctacagcattcatgtgaccaaggagtccacccaccccgtgaagcccctggcccagatcgccggaaacagatacgcctccggacctgtgggaaaggccctgagcgacgcatgtatgggcacaatcgcctccttcctgtctaagtaccaggacatcatcatcgaacaccagaaggtggtgaagggcaaccagaagagactggagagcctgcgggagctggccggcaaggaaaacctggaataccctagcgtgaccctgccacctcagcctcacaccaaggagggcgttgatgcctacaacgaagtgatcgcccgggtgcgaatgtgggtgaacctgaacctgtggcagaagctgaagctaagcagagatgatgccaagcctctgctgagactgaagggattcccttcctttcctctggtcgagagacaggccaacgaagtggactggtgggacatggtgtgtaacgtgaagaagctgatcaacgagaaaaaggaggatggcaaggtgttttggcagaatctggctggctacaagagacaggaagccctgagaccatacctgagcagcgaggaagatcggaagaagggaaagaaattcgctcggtaccagctgggcgacctgctgctgcacctggaaaagaagcacggcgaggactggggaaaggtgtacgacgaggcctgggagcggattgacaagaaagtggaaggcctgagcaagcacatcaagctggaagaggaacggagaagcgaggacgcccagagcaaggccgccctgaccgactggctgcgggctaaggccagcttcgtgatcgagggcctgaaggaggccgacaaggacgagttctgcagatgcgagctgaagctgcagaagtggtacggggacctgcggggaaagcccttcgccatcgaagccgagaacagcatcctggacatcagcggcttcagcaagcagtacaactgtgccttcatctggcagaaggacggcgtgaagaagctgaacctgtacctgatcatcaactacttcaagggcggcaagctgcggttcaagaagatcaaacctgaagccttcgaagccaacagattctacaccgtgatcaacaaaaagagcggcgagatcgtgcccatggaggtgaacttcaacttcgacgaccccaacctgatcatcctgcctctggcctttggcaagagacagggcagagaattcatctggaacgacctgctgtccctggaaaccggcagcctgaagctggccaacggaagagtgatcgagaagacactgtacaacagaagaacccggcaggatgagcctgccctgttcgtggccctgaccttcgagcggcgggaggtcctggactcctccaatatcaaaccaatgaacctgatcggcgtggcaagaggcgaaaacatccccgccgtgatcgccctgaccgaccccgagggctgcccactgagccggtttaaggatagcctgggaaacccaacccacatcctgagaatcggcgagagctataaggagaagcagcggaccatccaggccaagaaggaggtggagcagcggagagccggcggctacagccggaagtacgccagcaaagccaagaatctggcagacgatatggtgagaaacaccgctagagatctgctgtactacgccgtgacccaggatgccatgctgatcttcgccaacctgagccggggcttcggccggcagggcaagcggaccttcatggccgagagacagtacacacggatggaggactggctgaccgccaagctggcctacgagggcctgagcaagacctacctgtccaagacactggcccagtacacctccaagacatgcagcaactgtgggtttaccatcaccagcgccgactacgacagggtgctggagaagctgaagaagacagcaacaggctggatgaccacaattaacggcaaggagctgaaggtggagggccagattacctactacaacagatacaagagacagaacgtagtcaaggacctgtccgtcgagctggatagactgagcgaagaatctgtgaacaacgacatctcctcctggacaaagggcagaagcggagaagctctgagcctcctgaagaaaagattctcccatagacccgtgcaggagaagttcgtgtgcctgaactgcggcttcgagacacacgcagccgagcaagccgccctgaacatcgccagatcctggctgttcctgcggagccaggagtacaagaaataccagacaaacaagacaaccggcaacaccgataagagagccttcgtcgagacctggcagtccttttaccggaagaagcttaaggaggtgtggaaacctgccgtgcggtctggcggatctggcggaggctccaccagccccaagaaaaagagaaaagtctaagctgccttctgcggggcttgccttctggccatgcccttcttctctcccttgcacctgtacctcttggtctttgaataaagcctgagtaggaaggctagcaaaaaaaaaaaaaaaaaaaaaaaaaaaaaaaaaaaaaaaaaaaaaaaaaaaaaaaaaaaaaaaaaaaaaaaaaaaaaaaa

SEQ ID NO: 13216 - RNA, 5785 nt, synthetic construct
  source 1..5785: mol_type = other RNA
aggaaataagagagaaaagaagagtaagaagaaatataagagccaccatggcccctaagaagaagcgtaaagtgagccggatggaacgcctcgtctacgaggtgcggcagaagtgcagaaacatcgaggacatctgcatctcctgcggatctctgaacgtgaccctggagcacccactgttcatcggcggcatgtgccagaactgtaaaaactgttttctggagtgtgcctatcaatacgacgatgacggctaccagagctactgcaccatctgttgcggcggaagagaggtgctgatgtgtggaaataacaactgctgccggtgcttctgcgtggaatgcgtggacctgctggtgggccccggcgccgcccaggccgctattaaggaagatccttggaactgctacatgtgcggccacaagggcacatacggcctgctgagacggagagaggactggcctagcagactgcagatgttcttcgccaataaccacgaccaggagttcgacccccctaaggtgtaccctcccgtccccgccgagaagagaaagcccatccgggtcctgagcctgttcgatggcatcgccaccggtctgctggtgctgaaggacctgggcatccaggtggataggtacattgcctccgaggtgtgcgaggactccatcaccgtgggaatggtgcgtcatcagggcaagatcatgtacgtgggcgacgtgcggagcgtgacacagaagcatatccaggagtggggccctttcgacctggtgatcggcggcagcccttgcaatgacctgagcatcgtgaacccagcccggaagggcctgtacgagggaaccggcagactgttcttcgagttttacagactgctgcacgacgcccggcctaaggaaggcgacgaccggcccttcttttggctgttcgagaatgtggtggccatgggagtcagcgacaagcgggatattagccggttcctggagagcaaccccgtgatgatcgatgccaaggaagtgagcgccgcccaccgggccagatacttctggggcaatctgcctggcatgaacagacccctggccagcaccgtgaacgacaagctggagctgcaggagtgcctggagcacggccggatcgccaagttcagcaaggtgagaaccatcaccacccgaagcaacagcatcaaacaaggcaaggaccagcactttcctgtgttcatgaacgagaaggaggacatcctgtggtgtaccgagatggagagagtgttcgggttcccagtccactacacagatgtcagcaacatgtctagactggccagacagagactgctgggaagaagctggtccgtccctgtgatcagacacctgttcgcccctctgaaggagtacttcgcctgcgtgagcagcggcaacagcaacgccaacagccggggccccagcttctctagcggcctggtgccactgtccctgagagggagccacatgggccccatggagatctacaaaaccgtgagcgcctggaagcggcagcctgtgcgcgtgctgagcctgtttcggaatatcgataaagtcctgaaaagcctgggattcctggagagcggctctggctccggcggtggcaccctgaagtacgtggaggatgtgacaaacgtggtcagacgggatgtggagaagtggggccccttcgatctggtgtacggcagcacccaacccctgggcagctcttgtgaccggtgccctggctggtacatgtttcagttccaccggatcctgcagtacgccctgccgagacaggagtcccagcggccattcttttggattttcatggacaacttgctgctgaccgaggatgaccaggaaactaccactcggttcctgcagaccgaagccgtgaccctgcaggacgtgagaggccgggactaccagaacgccatgcgggtgtggtccaacatccctggactgaaaagcaagcacgcacctctgacccctaaagaagaggagtacctgcaggcccaggtgcggagcagaagcaagctggacgcccctaaggtggatctgctggtgaagaattgcctcctgcccctgagagagtacttcaagtatttcagccagaatagtctgcccctgggaggcagcggcggcggcgccaggggcaagagcaagagcaaggcccccatcaccttcggcgacctggccatctacttcagccaggaggagtgggagtggctgagccccatccagaaggacctgtacgaggacgtgatgctggagaactacaggaacctggtgagcctgggcctgagcttcaggaggcccaacgtgatcaccctgctggagaagggcaaggccccctggatggtggagcccgtgaggaggaggagggcccccggcggcccaagcagcggcgcccctcctcccagcggcggcagcccagccggctccccaacctctaccgaggagggcacctctgagtccgccacccccgagagcggccctggcacctccaccgagcccagcgagggcagcgcacccggcagccctgccggcagccccacctccacagaggagggaaccagcaccgagcccagcgaaggcagcgccccaggcaccagcaccgagcctagtgagcaggagattaaacggatcaacaagatcagaagaagacttgtgaaagacagcaacaccaagaaggccggcaagacaggccccatgaaaaccctgctggttagagtgatgacacccgatctgagagagcggctggaaaacctgagaaagaagcctgaaaatatcccccagcccatcagcaatacatctagagccaacctgaataagctgctgaccgattacaccgaaatgaagaaggcgatcctgcatgtgtactgggaagagttccagaaggaccctgtgggcctgatgagccgggtggcccagcctgccagcaagaagatcgatcagaacaagctgaaacctgagatggacgagaagggcaacctgaccaccgccggctttgcctgctctcagtgtggccagcccctgttcgtgtacaagctggagcaggtgtctgagaagggcaaggcttacaccaactacttcggacggtgcaatgtggccgagcacgaaaagctgatcctgctggcccagctgaagcccgagaaggatagcgacgaagccgtgacatatagcctgggaaagtttgggcagagggccctggatttctacagcattcatgtgaccaaggagtccacccaccccgtgaagcccctggcccagatcgccggaaacagatacgcctccggacctgtgggaaaggccctgagcgacgcatgtatgggcacaatcgcctccttcctgtctaagtaccaggacatcatcatcgaacaccagaaggtggtgaagggcaaccagaagagactggagagcctgcgggagctggccggcaaggaaaacctggaataccctagcgtgaccctgccacctcagcctcacaccaaggagggcgttgatgcctacaacgaagtgatcgcccgggtgcgaatgtgggtgaacctgaacctgtggcagaagctgaagctaagcagagatgatgccaagcctctgctgagactgaagggattcccttcctttcctctggtcgagagacaggccaacgaagtggactggtgggacatggtgtgtaacgtgaagaagctgatcaacgagaaaaaggaggatggcaaggtgttttggcagaatctggctggctacaagagacaggaagccctgagaccatacctgagcagcgaggaagatcggaagaagggaaagaaattcgctcggtaccagctgggcgacctgctgctgcacctggaaaagaagcacggcgaggactggggaaaggtgtacgacgaggcctgggagcggattgacaagaaagtggaaggcctgagcaagcacatcaagctggaagaggaacggagaagcgaggacgcccagagcaaggccgccctgaccgactggctgcgggctaaggccagcttcgtgatcgagggcctgaaggaggccgacaaggacgagttctgcagatgcgagctgaagctgcagaagtggtacggggacctgcggggaaagcccttcgccatcgaagccgagaacagcatcctggacatcagcggcttcagcaagcagtacaactgtgccttcatctggcagaaggacggcgtgaagaagctgaacctgtacctgatcatcaactacttcaagggcggcaagctgcggttcaagaagatcaaacctgaagccttcgaagccaacagattctacaccgtgatcaacaaaaagagcggcgagatcgtgcccatggaggtgaacttcaacttcgacgaccccaacctgatcatcctgcctctggcctttggcaagagacagggcagagaattcatctggaacgacctgctgtccctggaaaccggcagcctgaagctggccaacggaagagtgatcgagaagacactgtacaacagaagaacccggcaggatgagcctgccctgttcgtggccctgaccttcgagcggcgggaggtcctggactcctccaatatcaaaccaatgaacctgatcggcgtggcaagaggcgaaaacatccccgccgtgatcgccctgaccgaccccgagggctgcccactgagccggtttaaggatagcctgggaaacccaacccacatcctgagaatcggcgagagctataaggagaagcagcggaccatccaggccaagaaggaggtggagcagcggagagccggcggctacagccggaagtacgccagcaaagccaagaatctggcagacgatatggtgagaaacaccgctagagatctgctgtactacgccgtgacccaggatgccatgctgatcttcgccaacctgagccggggcttcggccggcagggcaagcggaccttcatggccgagagacagtacacacggatggaggactggctgaccgccaagctggcctacgagggcctgagcaagacctacctgtccaagacactggcccagtacacctccaagacatgcagcaactgtgggtttaccatcaccagcgccgactacgacagggtgctggagaagctgaagaagacagcaacaggctggatgaccacaattaacggcaaggagctgaaggtggagggccagattacctactacaacagatacaagagacagaacgtagtcaaggacctgtccgtcgagctggatagactgagcgaagaatctgtgaacaacgacatctcctcctggacaaagggcagaagcggagaagctctgagcctcctgaagaaaagattctcccatagacccgtgcaggagaagttcgtgtgcctgaactgcggcttcgagacacacgcagccgagcaagccgccctgaacatcgccagatcctggctgttcctgcggagccaggagtacaagaaataccagacaaacaagacaaccggcaacaccgataagagagccttcgtcgagacctggcagtccttttaccggaagaagcttaaggaggtgtggaaacctgccgtgcggtctggcggatctggcggaggctccaccagccccaagaaaaagagaaaagtctaagctgccttctgcggggcttgccttctggccatgcccttcttctctcccttgcacctgtacctcttggtctttgaataaagcctgagtaggaaggctagcaaaaaaaaaaaaaaaaaaaaaaaaaaaaaaaaaaaaaaaaaaaaaaaaaaaaaaaaaaaaaaaaaaaaaaaaaaaaaaaa

SEQ ID NO: 13217 - RNA, 5785 nt, synthetic construct
  source 1..5785: mol_type = other RNA
aggaaataagagagaaaagaagagtaagaagaaatataagagccaccatggcccctaagaagaagcgtaaagtgagccggatggaacgcctcgtctacgaggtgcggcagaagtgcagaaacatcgaggacatctgcatctcctgcggatctctgaacgtgaccctggagcacccactgttcatcggcggcatgtgccagaactgtaaaaactgttttctggagtgtgcctatcaatacgacgatgacggctaccagagctactgcaccatctgttgcggcggaagagaggtgctgatgtgtggaaataacaactgctgccggtgcttctgcgtggaatgcgtggacctgctggtgggccccggcgccgcccaggccgctattaaggaagatccttggaactgctacatgtgcggccacaagggcacatacggcctgctgagacggagagaggactggcctagcagactgcagatgttcttcgccaataaccacgaccaggagttcgacccccctaaggtgtaccctcccgtccccgccgagaagagaaagcccatccgggtcctgagcctgttcgatggcatcgccaccggtctgctggtgctgaaggacctgggcatccaggtggataggtacattgcctccgaggtgtgcgaggactccatcaccgtgggaatggtgcgtcatcagggcaagatcatgtacgtgggcgacgtgcggagcgtgacacagaagcatatccaggagtggggccctttcgacctggtgatcggcggcagcccttgcaatgacctgagcatcgtgaacccagcccggaagggcctgtacgagggaaccggcagactgttcttcgagttttacagactgctgcacgacgcccggcctaaggaaggcgacgaccggcccttcttttggctgttcgagaatgtggtggccatgggagtcagcgacaagcgggatattagccggttcctggagagcaaccccgtgatgatcgatgccaaggaagtgagcgccgcccaccgggccagatacttctggggcaatctgcctggcatgaacagacccctggccagcaccgtgaacgacaagctggagctgcaggagtgcctggagcacggccggatcgccaagttcagcaaggtgagaaccatcaccacccgaagcaacagcatcaaacaaggcaaggaccagcactttcctgtgttcatgaacgagaaggaggacatcctgtggtgtaccgagatggagagagtgttcgggttcccagtccactacacagatgtcagcaacatgtctagactggccagacagagactgctgggaagaagctggtccgtccctgtgatcagacacctgttcgcccctctgaaggagtacttcgcctgcgtgagcagcggcaacagcaacgccaacagccggggccccagcttctctagcggcctggtgccactgtccctgagagggagccacatgggccccatggagatctacaaaaccgtgagcgcctggaagcggcagcctgtgcgcgtgctgagcctgtttcggaatatcgataaagtcctgaaaagcctgggattcctggagagcggctctggctccggcggtggcaccctgaagtacgtggaggatgtgacaaacgtggtcagacgggatgtggagaagtggggccccttcgatctggtgtacggcagcacccaacccctgggcagctcttgtgaccggtgccctggctggtacatgtttcagttccaccggatcctgcagtacgccctgccgagacaggagtcccagcggccattcttttggattttcatggacaacttgctgctgaccgaggatgaccaggaaactaccactcggttcctgcagaccgaagccgtgaccctgcaggacgtgagaggccgggactaccagaacgccatgcgggtgtggtccaacatccctggactgaaaagcaagcacgcacctctgacccctaaagaagaggagtacctgcaggcccaggtgcggagcagaagcaagctggacgcccctaaggtggatctgctggtgaagaattgcctcctgcccctgagagagtacttcaagtatttcagccagaatagtctgcccctgggaggcagcggcggcggcggcctggtgagcttcgacgaggtgagcgtgcacttcaccaacgaggagtgggccctgctggaccccggccagagggccctgtacgaggaggtgatggaggagatcagggagatgatgaccagcgtgggcgacgtgagcgagttcctgaccgagggcgagcagagcgagcccagcagggagggcgccgaggagcagaaggagcagaggaagcagagggtgcaggtgggcacctacaggaaggagggcggcccaagcagcggcgcccctcctcccagcggcggcagcccagccggctccccaacctctaccgaggagggcacctctgagtccgccacccccgagagcggccctggcacctccaccgagcccagcgagggcagcgcacccggcagccctgccggcagccccacctccacagaggagggaaccagcaccgagcccagcgaaggcagcgccccaggcaccagcaccgagcctagtgagcaggagattaaacggatcaacaagatcagaagaagacttgtgaaagacagcaacaccaagaaggccggcaagacaggccccatgaaaaccctgctggttagagtgatgacacccgatctgagagagcggctggaaaacctgagaaagaagcctgaaaatatcccccagcccatcagcaatacatctagagccaacctgaataagctgctgaccgattacaccgaaatgaagaaggcgatcctgcatgtgtactgggaagagttccagaaggaccctgtgggcctgatgagccgggtggcccagcctgccagcaagaagatcgatcagaacaagctgaaacctgagatggacgagaagggcaacctgaccaccgccggctttgcctgctctcagtgtggccagcccctgttcgtgtacaagctggagcaggtgtctgagaagggcaaggcttacaccaactacttcggacggtgcaatgtggccgagcacgaaaagctgatcctgctggcccagctgaagcccgagaaggatagcgacgaagccgtgacatatagcctgggaaagtttgggcagagggccctggatttctacagcattcatgtgaccaaggagtccacccaccccgtgaagcccctggcccagatcgccggaaacagatacgcctccggacctgtgggaaaggccctgagcgacgcatgtatgggcacaatcgcctccttcctgtctaagtaccaggacatcatcatcgaacaccagaaggtggtgaagggcaaccagaagagactggagagcctgcgggagctggccggcaaggaaaacctggaataccctagcgtgaccctgccacctcagcctcacaccaaggagggcgttgatgcctacaacgaagtgatcgcccgggtgcgaatgtgggtgaacctgaacctgtggcagaagctgaagctaagcagagatgatgccaagcctctgctgagactgaagggattcccttcctttcctctggtcgagagacaggccaacgaagtggactggtgggacatggtgtgtaacgtgaagaagctgatcaacgagaaaaaggaggatggcaaggtgttttggcagaatctggctggctacaagagacaggaagccctgagaccatacctgagcagcgaggaagatcggaagaagggaaagaaattcgctcggtaccagctgggcgacctgctgctgcacctggaaaagaagcacggcgaggactggggaaaggtgtacgacgaggcctgggagcggattgacaagaaagtggaaggcctgagcaagcacatcaagctggaagaggaacggagaagcgaggacgcccagagcaaggccgccctgaccgactggctgcgggctaaggccagcttcgtgatcgagggcctgaaggaggccgacaaggacgagttctgcagatgcgagctgaagctgcagaagtggtacggggacctgcggggaaagcccttcgccatcgaagccgagaacagcatcctggacatcagcggcttcagcaagcagtacaactgtgccttcatctggcagaaggacggcgtgaagaagctgaacctgtacctgatcatcaactacttcaagggcggcaagctgcggttcaagaagatcaaacctgaagccttcgaagccaacagattctacaccgtgatcaacaaaaagagcggcgagatcgtgcccatggaggtgaacttcaacttcgacgaccccaacctgatcatcctgcctctggcctttggcaagagacagggcagagaattcatctggaacgacctgctgtccctggaaaccggcagcctgaagctggccaacggaagagtgatcgagaagacactgtacaacagaagaacccggcaggatgagcctgccctgttcgtggccctgaccttcgagcggcgggaggtcctggactcctccaatatcaaaccaatgaacctgatcggcgtggcaagaggcgaaaacatccccgccgtgatcgccctgaccgaccccgagggctgcccactgagccggtttaaggatagcctgggaaacccaacccacatcctgagaatcggcgagagctataaggagaagcagcggaccatccaggccaagaaggaggtggagcagcggagagccggcggctacagccggaagtacgccagcaaagccaagaatctggcagacgatatggtgagaaacaccgctagagatctgctgtactacgccgtgacccaggatgccatgctgatcttcgccaacctgagccggggcttcggccggcagggcaagcggaccttcatggccgagagacagtacacacggatggaggactggctgaccgccaagctggcctacgagggcctgagcaagacctacctgtccaagacactggcccagtacacctccaagacatgcagcaactgtgggtttaccatcaccagcgccgactacgacagggtgctggagaagctgaagaagacagcaacaggctggatgaccacaattaacggcaaggagctgaaggtggagggccagattacctactacaacagatacaagagacagaacgtagtcaaggacctgtccgtcgagctggatagactgagcgaagaatctgtgaacaacgacatctcctcctggacaaagggcagaagcggagaagctctgagcctcctgaagaaaagattctcccatagacccgtgcaggagaagttcgtgtgcctgaactgcggcttcgagacacacgcagccgagcaagccgccctgaacatcgccagatcctggctgttcctgcggagccaggagtacaagaaataccagacaaacaagacaaccggcaacaccgataagagagccttcgtcgagacctggcagtccttttaccggaagaagcttaaggaggtgtggaaacctgccgtgcggtctggcggatctggcggaggctccaccagccccaagaaaaagagaaaagtctaagctgccttctgcggggcttgccttctggccatgcccttcttctctcccttgcacctgtacctcttggtctttgaataaagcctgagtaggaaggctagcaaaaaaaaaaaaaaaaaaaaaaaaaaaaaaaaaaaaaaaaaaaaaaaaaaaaaaaaaaaaaaaaaaaaaaaaaaaaaaaa

SEQ ID NO: 13218 - RNA, 5785 nt, synthetic construct
  source 1..5785: mol_type = other RNA
aggaaataagagagaaaagaagagtaagaagaaatataagagccaccatggcccctaagaagaagcgtaaagtgagccggatggaacgcctcgtctacgaggtgcggcagaagtgcagaaacatcgaggacatctgcatctcctgcggatctctgaacgtgaccctggagcacccactgttcatcggcggcatgtgccagaactgtaaaaactgttttctggagtgtgcctatcaatacgacgatgacggctaccagagctactgcaccatctgttgcggcggaagagaggtgctgatgtgtggaaataacaactgctgccggtgcttctgcgtggaatgcgtggacctgctggtgggccccggcgccgcccaggccgctattaaggaagatccttggaactgctacatgtgcggccacaagggcacatacggcctgctgagacggagagaggactggcctagcagactgcagatgttcttcgccaataaccacgaccaggagttcgacccccctaaggtgtaccctcccgtccccgccgagaagagaaagcccatccgggtcctgagcctgttcgatggcatcgccaccggtctgctggtgctgaaggacctgggcatccaggtggataggtacattgcctccgaggtgtgcgaggactccatcaccgtgggaatggtgcgtcatcagggcaagatcatgtacgtgggcgacgtgcggagcgtgacacagaagcatatccaggagtggggccctttcgacctggtgatcggcggcagcccttgcaatgacctgagcatcgtgaacccagcccggaagggcctgtacgagggaaccggcagactgttcttcgagttttacagactgctgcacgacgcccggcctaaggaaggcgacgaccggcccttcttttggctgttcgagaatgtggtggccatgggagtcagcgacaagcgggatattagccggttcctggagagcaaccccgtgatgatcgatgccaaggaagtgagcgccgcccaccgggccagatacttctggggcaatctgcctggcatgaacagacccctggccagcaccgtgaacgacaagctggagctgcaggagtgcctggagcacggccggatcgccaagttcagcaaggtgagaaccatcaccacccgaagcaacagcatcaaacaaggcaaggaccagcactttcctgtgttcatgaacgagaaggaggacatcctgtggtgtaccgagatggagagagtgttcgggttcccagtccactacacagatgtcagcaacatgtctagactggccagacagagactgctgggaagaagctggtccgtccctgtgatcagacacctgttcgcccctctgaaggagtacttcgcctgcgtgagcagcggcaacagcaacgccaacagccggggccccagcttctctagcggcctggtgccactgtccctgagagggagccacatgggccccatggagatctacaaaaccgtgagcgcctggaagcggcagcctgtgcgcgtgctgagcctgtttcggaatatcgataaagtcctgaaaagcctgggattcctggagagcggctctggctccggcggtggcaccctgaagtacgtggaggatgtgacaaacgtggtcagacgggatgtggagaagtggggccccttcgatctggtgtacggcagcacccaacccctgggcagctcttgtgaccggtgccctggctggtacatgtttcagttccaccggatcctgcagtacgccctgccgagacaggagtcccagcggccattcttttggattttcatggacaacttgctgctgaccgaggatgaccaggaaactaccactcggttcctgcagaccgaagccgtgaccctgcaggacgtgagaggccgggactaccagaacgccatgcgggtgtggtccaacatccctggactgaaaagcaagcacgcacctctgacccctaaagaagaggagtacctgcaggcccaggtgcggagcagaagcaagctggacgcccctaaggtggatctgctggtgaagaattgcctcctgcccctgagagagtacttcaagtatttcagccagaatagtctgcccctgggaggcagcggcggcggcgacagcatgagggtgaccttcgaggaggtggccgtgtacttcacccccggccagggcgccctgctgggccccgcccagagggccctgtacagggacgtgatgcaggagaactacgaggccgtgaccagcctgggcttccccgtgcccaagcccgagctgatcgccaggctggagaggggcgaggagccctgggtgcccgacctgcaggccagggaggagagggagatccccaggggcacctgcggcggcccaagcagcggcgcccctcctcccagcggcggcagcccagccggctccccaacctctaccgaggagggcacctctgagtccgccacccccgagagcggccctggcacctccaccgagcccagcgagggcagcgcacccggcagccctgccggcagccccacctccacagaggagggaaccagcaccgagcccagcgaaggcagcgccccaggcaccagcaccgagcctagtgagcaggagattaaacggatcaacaagatcagaagaagacttgtgaaagacagcaacaccaagaaggccggcaagacaggccccatgaaaaccctgctggttagagtgatgacacccgatctgagagagcggctggaaaacctgagaaagaagcctgaaaatatcccccagcccatcagcaatacatctagagccaacctgaataagctgctgaccgattacaccgaaatgaagaaggcgatcctgcatgtgtactgggaagagttccagaaggaccctgtgggcctgatgagccgggtggcccagcctgccagcaagaagatcgatcagaacaagctgaaacctgagatggacgagaagggcaacctgaccaccgccggctttgcctgctctcagtgtggccagcccctgttcgtgtacaagctggagcaggtgtctgagaagggcaaggcttacaccaactacttcggacggtgcaatgtggccgagcacgaaaagctgatcctgctggcccagctgaagcccgagaaggatagcgacgaagccgtgacatatagcctgggaaagtttgggcagagggccctggatttctacagcattcatgtgaccaaggagtccacccaccccgtgaagcccctggcccagatcgccggaaacagatacgcctccggacctgtgggaaaggccctgagcgacgcatgtatgggcacaatcgcctccttcctgtctaagtaccaggacatcatcatcgaacaccagaaggtggtgaagggcaaccagaagagactggagagcctgcgggagctggccggcaaggaaaacctggaataccctagcgtgaccctgccacctcagcctcacaccaaggagggcgttgatgcctacaacgaagtgatcgcccgggtgcgaatgtgggtgaacctgaacctgtggcagaagctgaagctaagcagagatgatgccaagcctctgctgagactgaagggattcccttcctttcctctggtcgagagacaggccaacgaagtggactggtgggacatggtgtgtaacgtgaagaagctgatcaacgagaaaaaggaggatggcaaggtgttttggcagaatctggctggctacaagagacaggaagccctgagaccatacctgagcagcgaggaagatcggaagaagggaaagaaattcgctcggtaccagctgggcgacctgctgctgcacctggaaaagaagcacggcgaggactggggaaaggtgtacgacgaggcctgggagcggattgacaagaaagtggaaggcctgagcaagcacatcaagctggaagaggaacggagaagcgaggacgcccagagcaaggccgccctgaccgactggctgcgggctaaggccagcttcgtgatcgagggcctgaaggaggccgacaaggacgagttctgcagatgcgagctgaagctgcagaagtggtacggggacctgcggggaaagcccttcgccatcgaagccgagaacagcatcctggacatcagcggcttcagcaagcagtacaactgtgccttcatctggcagaaggacggcgtgaagaagctgaacctgtacctgatcatcaactacttcaagggcggcaagctgcggttcaagaagatcaaacctgaagccttcgaagccaacagattctacaccgtgatcaacaaaaagagcggcgagatcgtgcccatggaggtgaacttcaacttcgacgaccccaacctgatcatcctgcctctggcctttggcaagagacagggcagagaattcatctggaacgacctgctgtccctggaaaccggcagcctgaagctggccaacggaagagtgatcgagaagacactgtacaacagaagaacccggcaggatgagcctgccctgttcgtggccctgaccttcgagcggcgggaggtcctggactcctccaatatcaaaccaatgaacctgatcggcgtggcaagaggcgaaaacatccccgccgtgatcgccctgaccgaccccgagggctgcccactgagccggtttaaggatagcctgggaaacccaacccacatcctgagaatcggcgagagctataaggagaagcagcggaccatccaggccaagaaggaggtggagcagcggagagccggcggctacagccggaagtacgccagcaaagccaagaatctggcagacgatatggtgagaaacaccgctagagatctgctgtactacgccgtgacccaggatgccatgctgatcttcgccaacctgagccggggcttcggccggcagggcaagcggaccttcatggccgagagacagtacacacggatggaggactggctgaccgccaagctggcctacgagggcctgagcaagacctacctgtccaagacactggcccagtacacctccaagacatgcagcaactgtgggtttaccatcaccagcgccgactacgacagggtgctggagaagctgaagaagacagcaacaggctggatgaccacaattaacggcaaggagctgaaggtggagggccagattacctactacaacagatacaagagacagaacgtagtcaaggacctgtccgtcgagctggatagactgagcgaagaatctgtgaacaacgacatctcctcctggacaaagggcagaagcggagaagctctgagcctcctgaagaaaagattctcccatagacccgtgcaggagaagttcgtgtgcctgaactgcggcttcgagacacacgcagccgagcaagccgccctgaacatcgccagatcctggctgttcctgcggagccaggagtacaagaaataccagacaaacaagacaaccggcaacaccgataagagagccttcgtcgagacctggcagtccttttaccggaagaagcttaaggaggtgtggaaacctgccgtgcggtctggcggatctggcggaggctccaccagccccaagaaaaagagaaaagtctaagctgccttctgcggggcttgccttctggccatgcccttcttctctcccttgcacctgtacctcttggtctttgaataaagcctgagtaggaaggctagcaaaaaaaaaaaaaaaaaaaaaaaaaaaaaaaaaaaaaaaaaaaaaaaaaaaaaaaaaaaaaaaaaaaaaaaaaaaaaaaa

SEQ ID NO: 13219 - RNA, 5785 nt, synthetic construct
  source 1..5785: mol_type = other RNA
aggaaataagagagaaaagaagagtaagaagaaatataagagccaccatggcccctaagaagaagcgtaaagtgagccggatggaacgcctcgtctacgaggtgcggcagaagtgcagaaacatcgaggacatctgcatctcctgcggatctctgaacgtgaccctggagcacccactgttcatcggcggcatgtgccagaactgtaaaaactgttttctggagtgtgcctatcaatacgacgatgacggctaccagagctactgcaccatctgttgcggcggaagagaggtgctgatgtgtggaaataacaactgctgccggtgcttctgcgtggaatgcgtggacctgctggtgggccccggcgccgcccaggccgctattaaggaagatccttggaactgctacatgtgcggccacaagggcacatacggcctgctgagacggagagaggactggcctagcagactgcagatgttcttcgccaataaccacgaccaggagttcgacccccctaaggtgtaccctcccgtccccgccgagaagagaaagcccatccgggtcctgagcctgttcgatggcatcgccaccggtctgctggtgctgaaggacctgggcatccaggtggataggtacattgcctccgaggtgtgcgaggactccatcaccgtgggaatggtgcgtcatcagggcaagatcatgtacgtgggcgacgtgcggagcgtgacacagaagcatatccaggagtggggccctttcgacctggtgatcggcggcagcccttgcaatgacctgagcatcgtgaacccagcccggaagggcctgtacgagggaaccggcagactgttcttcgagttttacagactgctgcacgacgcccggcctaaggaaggcgacgaccggcccttcttttggctgttcgagaatgtggtggccatgggagtcagcgacaagcgggatattagccggttcctggagagcaaccccgtgatgatcgatgccaaggaagtgagcgccgcccaccgggccagatacttctggggcaatctgcctggcatgaacagacccctggccagcaccgtgaacgacaagctggagctgcaggagtgcctggagcacggccggatcgccaagttcagcaaggtgagaaccatcaccacccgaagcaacagcatcaaacaaggcaaggaccagcactttcctgtgttcatgaacgagaaggaggacatcctgtggtgtaccgagatggagagagtgttcgggttcccagtccactacacagatgtcagcaacatgtctagactggccagacagagactgctgggaagaagctggtccgtccctgtgatcagacacctgttcgcccctctgaaggagtacttcgcctgcgtgagcagcggcaacagcaacgccaacagccggggccccagcttctctagcggcctggtgccactgtccctgagagggagccacatgggccccatggagatctacaaaaccgtgagcgcctggaagcggcagcctgtgcgcgtgctgagcctgtttcggaatatcgataaagtcctgaaaagcctgggattcctggagagcggctctggctccggcggtggcaccctgaagtacgtggaggatgtgacaaacgtggtcagacgggatgtggagaagtggggccccttcgatctggtgtacggcagcacccaacccctgggcagctcttgtgaccggtgccctggctggtacatgtttcagttccaccggatcctgcagtacgccctgccgagacaggagtcccagcggccattcttttggattttcatggacaacttgctgctgaccgaggatgaccaggaaactaccactcggttcctgcagaccgaagccgtgaccctgcaggacgtgagaggccgggactaccagaacgccatgcgggtgtggtccaacatccctggactgaaaagcaagcacgcacctctgacccctaaagaagaggagtacctgcaggcccaggtgcggagcagaagcaagctggacgcccctaaggtggatctgctggtgaagaattgcctcctgcccctgagagagtacttcaagtatttcagccagaatagtctgcccctgggaggcagcggcggcggctgcttcagcggcgaggagaggatggccgccggccacccccccaggtggccccaggagctggtgaccttcgaggacgtgagcgtggacttcagccaggaggagtgggagctgctggaccccgcccagaaggagctgtacagggaggtgaccctggagaactacaggaacctggtgagcctggaggccctgaagaacccctgcgccgacgccggcatggaggagggccccttcagcaccgcccacggcggcccaagcagcggcgcccctcctcccagcggcggcagcccagccggctccccaacctctaccgaggagggcacctctgagtccgccacccccgagagcggccctggcacctccaccgagcccagcgagggcagcgcacccggcagccctgccggcagccccacctccacagaggagggaaccagcaccgagcccagcgaaggcagcgccccaggcaccagcaccgagcctagtgagcaggagattaaacggatcaacaagatcagaagaagacttgtgaaagacagcaacaccaagaaggccggcaagacaggccccatgaaaaccctgctggttagagtgatgacacccgatctgagagagcggctggaaaacctgagaaagaagcctgaaaatatcccccagcccatcagcaatacatctagagccaacctgaataagctgctgaccgattacaccgaaatgaagaaggcgatcctgcatgtgtactgggaagagttccagaaggaccctgtgggcctgatgagccgggtggcccagcctgccagcaagaagatcgatcagaacaagctgaaacctgagatggacgagaagggcaacctgaccaccgccggctttgcctgctctcagtgtggccagcccctgttcgtgtacaagctggagcaggtgtctgagaagggcaaggcttacaccaactacttcggacggtgcaatgtggccgagcacgaaaagctgatcctgctggcccagctgaagcccgagaaggatagcgacgaagccgtgacatatagcctgggaaagtttgggcagagggccctggatttctacagcattcatgtgaccaaggagtccacccaccccgtgaagcccctggcccagatcgccggaaacagatacgcctccggacctgtgggaaaggccctgagcgacgcatgtatgggcacaatcgcctccttcctgtctaagtaccaggacatcatcatcgaacaccagaaggtggtgaagggcaaccagaagagactggagagcctgcgggagctggccggcaaggaaaacctggaataccctagcgtgaccctgccacctcagcctcacaccaaggagggcgttgatgcctacaacgaagtgatcgcccgggtgcgaatgtgggtgaacctgaacctgtggcagaagctgaagctaagcagagatgatgccaagcctctgctgagactgaagggattcccttcctttcctctggtcgagagacaggccaacgaagtggactggtgggacatggtgtgtaacgtgaagaagctgatcaacgagaaaaaggaggatggcaaggtgttttggcagaatctggctggctacaagagacaggaagccctgagaccatacctgagcagcgaggaagatcggaagaagggaaagaaattcgctcggtaccagctgggcgacctgctgctgcacctggaaaagaagcacggcgaggactggggaaaggtgtacgacgaggcctgggagcggattgacaagaaagtggaaggcctgagcaagcacatcaagctggaagaggaacggagaagcgaggacgcccagagcaaggccgccctgaccgactggctgcgggctaaggccagcttcgtgatcgagggcctgaaggaggccgacaaggacgagttctgcagatgcgagctgaagctgcagaagtggtacggggacctgcggggaaagcccttcgccatcgaagccgagaacagcatcctggacatcagcggcttcagcaagcagtacaactgtgccttcatctggcagaaggacggcgtgaagaagctgaacctgtacctgatcatcaactacttcaagggcggcaagctgcggttcaagaagatcaaacctgaagccttcgaagccaacagattctacaccgtgatcaacaaaaagagcggcgagatcgtgcccatggaggtgaacttcaacttcgacgaccccaacctgatcatcctgcctctggcctttggcaagagacagggcagagaattcatctggaacgacctgctgtccctggaaaccggcagcctgaagctggccaacggaagagtgatcgagaagacactgtacaacagaagaacccggcaggatgagcctgccctgttcgtggccctgaccttcgagcggcgggaggtcctggactcctccaatatcaaaccaatgaacctgatcggcgtggcaagaggcgaaaacatccccgccgtgatcgccctgaccgaccccgagggctgcccactgagccggtttaaggatagcctgggaaacccaacccacatcctgagaatcggcgagagctataaggagaagcagcggaccatccaggccaagaaggaggtggagcagcggagagccggcggctacagccggaagtacgccagcaaagccaagaatctggcagacgatatggtgagaaacaccgctagagatctgctgtactacgccgtgacccaggatgccatgctgatcttcgccaacctgagccggggcttcggccggcagggcaagcggaccttcatggccgagagacagtacacacggatggaggactggctgaccgccaagctggcctacgagggcctgagcaagacctacctgtccaagacactggcccagtacacctccaagacatgcagcaactgtgggtttaccatcaccagcgccgactacgacagggtgctggagaagctgaagaagacagcaacaggctggatgaccacaattaacggcaaggagctgaaggtggagggccagattacctactacaacagatacaagagacagaacgtagtcaaggacctgtccgtcgagctggatagactgagcgaagaatctgtgaacaacgacatctcctcctggacaaagggcagaagcggagaagctctgagcctcctgaagaaaagattctcccatagacccgtgcaggagaagttcgtgtgcctgaactgcggcttcgagacacacgcagccgagcaagccgccctgaacatcgccagatcctggctgttcctgcggagccaggagtacaagaaataccagacaaacaagacaaccggcaacaccgataagagagccttcgtcgagacctggcagtccttttaccggaagaagcttaaggaggtgtggaaacctgccgtgcggtctggcggatctggcggaggctccaccagccccaagaaaaagagaaaagtctaagctgccttctgcggggcttgccttctggccatgcccttcttctctcccttgcacctgtacctcttggtctttgaataaagcctgagtaggaaggctagcaaaaaaaaaaaaaaaaaaaaaaaaaaaaaaaaaaaaaaaaaaaaaaaaaaaaaaaaaaaaaaaaaaaaaaaaaaaaaaaa

SEQ ID NO: 13220 - RNA, 5785 nt, synthetic construct
  source 1..5785: mol_type = other RNA
aggaaataagagagaaaagaagagtaagaagaaatataagagccaccatggcccctaagaagaagcgtaaagtgagccggatggaacgcctcgtctacgaggtgcggcagaagtgcagaaacatcgaggacatctgcatctcctgcggatctctgaacgtgaccctggagcacccactgttcatcggcggcatgtgccagaactgtaaaaactgttttctggagtgtgcctatcaatacgacgatgacggctaccagagctactgcaccatctgttgcggcggaagagaggtgctgatgtgtggaaataacaactgctgccggtgcttctgcgtggaatgcgtggacctgctggtgggccccggcgccgcccaggccgctattaaggaagatccttggaactgctacatgtgcggccacaagggcacatacggcctgctgagacggagagaggactggcctagcagactgcagatgttcttcgccaataaccacgaccaggagttcgacccccctaaggtgtaccctcccgtccccgccgagaagagaaagcccatccgggtcctgagcctgttcgatggcatcgccaccggtctgctggtgctgaaggacctgggcatccaggtggataggtacattgcctccgaggtgtgcgaggactccatcaccgtgggaatggtgcgtcatcagggcaagatcatgtacgtgggcgacgtgcggagcgtgacacagaagcatatccaggagtggggccctttcgacctggtgatcggcggcagcccttgcaatgacctgagcatcgtgaacccagcccggaagggcctgtacgagggaaccggcagactgttcttcgagttttacagactgctgcacgacgcccggcctaaggaaggcgacgaccggcccttcttttggctgttcgagaatgtggtggccatgggagtcagcgacaagcgggatattagccggttcctggagagcaaccccgtgatgatcgatgccaaggaagtgagcgccgcccaccgggccagatacttctggggcaatctgcctggcatgaacagacccctggccagcaccgtgaacgacaagctggagctgcaggagtgcctggagcacggccggatcgccaagttcagcaaggtgagaaccatcaccacccgaagcaacagcatcaaacaaggcaaggaccagcactttcctgtgttcatgaacgagaaggaggacatcctgtggtgtaccgagatggagagagtgttcgggttcccagtccactacacagatgtcagcaacatgtctagactggccagacagagactgctgggaagaagctggtccgtccctgtgatcagacacctgttcgcccctctgaaggagtacttcgcctgcgtgagcagcggcaacagcaacgccaacagccggggccccagcttctctagcggcctggtgccactgtccctgagagggagccacatgggccccatggagatctacaaaaccgtgagcgcctggaagcggcagcctgtgcgcgtgctgagcctgtttcggaatatcgataaagtcctgaaaagcctgggattcctggagagcggctctggctccggcggtggcaccctgaagtacgtggaggatgtgacaaacgtggtcagacgggatgtggagaagtggggccccttcgatctggtgtacggcagcacccaacccctgggcagctcttgtgaccggtgccctggctggtacatgtttcagttccaccggatcctgcagtacgccctgccgagacaggagtcccagcggccattcttttggattttcatggacaacttgctgctgaccgaggatgaccaggaaactaccactcggttcctgcagaccgaagccgtgaccctgcaggacgtgagaggccgggactaccagaacgccatgcgggtgtggtccaacatccctggactgaaaagcaagcacgcacctctgacccctaaagaagaggagtacctgcaggcccaggtgcggagcagaagcaagctggacgcccctaaggtggatctgctggtgaagaattgcctcctgcccctgagagagtacttcaagtatttcagccagaatagtctgcccctgggaggcagcggcggcggcgagctggtgatgttcagggacgtggccatcgacgtgagccaggaggagtgggagtgcctgaaccccgcccagaggaacctgtacaaggaggtgatgctggagaactacagcaacctggtgagcctgggcctgagcgtgagcaagcccgccgtgatcagcagcctggagcagggcaaggagccctggatgttcgtgagggaggagaccggcaggtggtgcagcgacctggccagcagggacgagggcggcccaagcagcggcgcccctcctcccagcggcggcagcccagccggctccccaacctctaccgaggagggcacctctgagtccgccacccccgagagcggccctggcacctccaccgagcccagcgagggcagcgcacccggcagccctgccggcagccccacctccacagaggagggaaccagcaccgagcccagcgaaggcagcgccccaggcaccagcaccgagcctagtgagcaggagattaaacggatcaacaagatcagaagaagacttgtgaaagacagcaacaccaagaaggccggcaagacaggccccatgaaaaccctgctggttagagtgatgacacccgatctgagagagcggctggaaaacctgagaaagaagcctgaaaatatcccccagcccatcagcaatacatctagagccaacctgaataagctgctgaccgattacaccgaaatgaagaaggcgatcctgcatgtgtactgggaagagttccagaaggaccctgtgggcctgatgagccgggtggcccagcctgccagcaagaagatcgatcagaacaagctgaaacctgagatggacgagaagggcaacctgaccaccgccggctttgcctgctctcagtgtggccagcccctgttcgtgtacaagctggagcaggtgtctgagaagggcaaggcttacaccaactacttcggacggtgcaatgtggccgagcacgaaaagctgatcctgctggcccagctgaagcccgagaaggatagcgacgaagccgtgacatatagcctgggaaagtttgggcagagggccctggatttctacagcattcatgtgaccaaggagtccacccaccccgtgaagcccctggcccagatcgccggaaacagatacgcctccggacctgtgggaaaggccctgagcgacgcatgtatgggcacaatcgcctccttcctgtctaagtaccaggacatcatcatcgaacaccagaaggtggtgaagggcaaccagaagagactggagagcctgcgggagctggccggcaaggaaaacctggaataccctagcgtgaccctgccacctcagcctcacaccaaggagggcgttgatgcctacaacgaagtgatcgcccgggtgcgaatgtgggtgaacctgaacctgtggcagaagctgaagctaagcagagatgatgccaagcctctgctgagactgaagggattcccttcctttcctctggtcgagagacaggccaacgaagtggactggtgggacatggtgtgtaacgtgaagaagctgatcaacgagaaaaaggaggatggcaaggtgttttggcagaatctggctggctacaagagacaggaagccctgagaccatacctgagcagcgaggaagatcggaagaagggaaagaaattcgctcggtaccagctgggcgacctgctgctgcacctggaaaagaagcacggcgaggactggggaaaggtgtacgacgaggcctgggagcggattgacaagaaagtggaaggcctgagcaagcacatcaagctggaagaggaacggagaagcgaggacgcccagagcaaggccgccctgaccgactggctgcgggctaaggccagcttcgtgatcgagggcctgaaggaggccgacaaggacgagttctgcagatgcgagctgaagctgcagaagtggtacggggacctgcggggaaagcccttcgccatcgaagccgagaacagcatcctggacatcagcggcttcagcaagcagtacaactgtgccttcatctggcagaaggacggcgtgaagaagctgaacctgtacctgatcatcaactacttcaagggcggcaagctgcggttcaagaagatcaaacctgaagccttcgaagccaacagattctacaccgtgatcaacaaaaagagcggcgagatcgtgcccatggaggtgaacttcaacttcgacgaccccaacctgatcatcctgcctctggcctttggcaagagacagggcagagaattcatctggaacgacctgctgtccctggaaaccggcagcctgaagctggccaacggaagagtgatcgagaagacactgtacaacagaagaacccggcaggatgagcctgccctgttcgtggccctgaccttcgagcggcgggaggtcctggactcctccaatatcaaaccaatgaacctgatcggcgtggcaagaggcgaaaacatccccgccgtgatcgccctgaccgaccccgagggctgcccactgagccggtttaaggatagcctgggaaacccaacccacatcctgagaatcggcgagagctataaggagaagcagcggaccatccaggccaagaaggaggtggagcagcggagagccggcggctacagccggaagtacgccagcaaagccaagaatctggcagacgatatggtgagaaacaccgctagagatctgctgtactacgccgtgacccaggatgccatgctgatcttcgccaacctgagccggggcttcggccggcagggcaagcggaccttcatggccgagagacagtacacacggatggaggactggctgaccgccaagctggcctacgagggcctgagcaagacctacctgtccaagacactggcccagtacacctccaagacatgcagcaactgtgggtttaccatcaccagcgccgactacgacagggtgctggagaagctgaagaagacagcaacaggctggatgaccacaattaacggcaaggagctgaaggtggagggccagattacctactacaacagatacaagagacagaacgtagtcaaggacctgtccgtcgagctggatagactgagcgaagaatctgtgaacaacgacatctcctcctggacaaagggcagaagcggagaagctctgagcctcctgaagaaaagattctcccatagacccgtgcaggagaagttcgtgtgcctgaactgcggcttcgagacacacgcagccgagcaagccgccctgaacatcgccagatcctggctgttcctgcggagccaggagtacaagaaataccagacaaacaagacaaccggcaacaccgataagagagccttcgtcgagacctggcagtccttttaccggaagaagcttaaggaggtgtggaaacctgccgtgcggtctggcggatctggcggaggctccaccagccccaagaaaaagagaaaagtctaagctgccttctgcggggcttgccttctggccatgcccttcttctctcccttgcacctgtacctcttggtctttgaataaagcctgagtaggaaggctagcaaaaaaaaaaaaaaaaaaaaaaaaaaaaaaaaaaaaaaaaaaaaaaaaaaaaaaaaaaaaaaaaaaaaaaaaaaaaaaaa

SEQ ID NO: 13221 - RNA, 5785 nt, synthetic construct
  source 1..5785: mol_type = other RNA
aggaaataagagagaaaagaagagtaagaagaaatataagagccaccatggcccctaagaagaagcgtaaagtgagccggatggaacgcctcgtctacgaggtgcggcagaagtgcagaaacatcgaggacatctgcatctcctgcggatctctgaacgtgaccctggagcacccactgttcatcggcggcatgtgccagaactgtaaaaactgttttctggagtgtgcctatcaatacgacgatgacggctaccagagctactgcaccatctgttgcggcggaagagaggtgctgatgtgtggaaataacaactgctgccggtgcttctgcgtggaatgcgtggacctgctggtgggccccggcgccgcccaggccgctattaaggaagatccttggaactgctacatgtgcggccacaagggcacatacggcctgctgagacggagagaggactggcctagcagactgcagatgttcttcgccaataaccacgaccaggagttcgacccccctaaggtgtaccctcccgtccccgccgagaagagaaagcccatccgggtcctgagcctgttcgatggcatcgccaccggtctgctggtgctgaaggacctgggcatccaggtggataggtacattgcctccgaggtgtgcgaggactccatcaccgtgggaatggtgcgtcatcagggcaagatcatgtacgtgggcgacgtgcggagcgtgacacagaagcatatccaggagtggggccctttcgacctggtgatcggcggcagcccttgcaatgacctgagcatcgtgaacccagcccggaagggcctgtacgagggaaccggcagactgttcttcgagttttacagactgctgcacgacgcccggcctaaggaaggcgacgaccggcccttcttttggctgttcgagaatgtggtggccatgggagtcagcgacaagcgggatattagccggttcctggagagcaaccccgtgatgatcgatgccaaggaagtgagcgccgcccaccgggccagatacttctggggcaatctgcctggcatgaacagacccctggccagcaccgtgaacgacaagctggagctgcaggagtgcctggagcacggccggatcgccaagttcagcaaggtgagaaccatcaccacccgaagcaacagcatcaaacaaggcaaggaccagcactttcctgtgttcatgaacgagaaggaggacatcctgtggtgtaccgagatggagagagtgttcgggttcccagtccactacacagatgtcagcaacatgtctagactggccagacagagactgctgggaagaagctggtccgtccctgtgatcagacacctgttcgcccctctgaaggagtacttcgcctgcgtgagcagcggcaacagcaacgccaacagccggggccccagcttctctagcggcctggtgccactgtccctgagagggagccacatgggccccatggagatctacaaaaccgtgagcgcctggaagcggcagcctgtgcgcgtgctgagcctgtttcggaatatcgataaagtcctgaaaagcctgggattcctggagagcggctctggctccggcggtggcaccctgaagtacgtggaggatgtgacaaacgtggtcagacgggatgtggagaagtggggccccttcgatctggtgtacggcagcacccaacccctgggcagctcttgtgaccggtgccctggctggtacatgtttcagttccaccggatcctgcagtacgccctgccgagacaggagtcccagcggccattcttttggattttcatggacaacttgctgctgaccgaggatgaccaggaaactaccactcggttcctgcagaccgaagccgtgaccctgcaggacgtgagaggccgggactaccagaacgccatgcgggtgtggtccaacatccctggactgaaaagcaagcacgcacctctgacccctaaagaagaggagtacctgcaggcccaggtgcggagcagaagcaagctggacgcccctaaggtggatctgctggtgaagaattgcctcctgcccctgagagagtacttcaagtatttcagccagaatagtctgcccctgggaggcagcggcggcggcaccagccagagccccctgaccttcggcgacgtggccgtggagttcagcggcgaggagtgggcctggctggacagcgcccagaggagcctgcacaggagcgtgatgctggagaactacaggaacctggccagcctgggcaaggtgagcaagcccgagatgatcagcagcctggagcagaggaaggagccctgggccgtgaccaggaagaccaccggcggcgagtgcgccgacagccagaccctgggcggcccaagcagcggcgcccctcctcccagcggcggcagcccagccggctccccaacctctaccgaggagggcacctctgagtccgccacccccgagagcggccctggcacctccaccgagcccagcgagggcagcgcacccggcagccctgccggcagccccacctccacagaggagggaaccagcaccgagcccagcgaaggcagcgccccaggcaccagcaccgagcctagtgagcaggagattaaacggatcaacaagatcagaagaagacttgtgaaagacagcaacaccaagaaggccggcaagacaggccccatgaaaaccctgctggttagagtgatgacacccgatctgagagagcggctggaaaacctgagaaagaagcctgaaaatatcccccagcccatcagcaatacatctagagccaacctgaataagctgctgaccgattacaccgaaatgaagaaggcgatcctgcatgtgtactgggaagagttccagaaggaccctgtgggcctgatgagccgggtggcccagcctgccagcaagaagatcgatcagaacaagctgaaacctgagatggacgagaagggcaacctgaccaccgccggctttgcctgctctcagtgtggccagcccctgttcgtgtacaagctggagcaggtgtctgagaagggcaaggcttacaccaactacttcggacggtgcaatgtggccgagcacgaaaagctgatcctgctggcccagctgaagcccgagaaggatagcgacgaagccgtgacatatagcctgggaaagtttgggcagagggccctggatttctacagcattcatgtgaccaaggagtccacccaccccgtgaagcccctggcccagatcgccggaaacagatacgcctccggacctgtgggaaaggccctgagcgacgcatgtatgggcacaatcgcctccttcctgtctaagtaccaggacatcatcatcgaacaccagaaggtggtgaagggcaaccagaagagactggagagcctgcgggagctggccggcaaggaaaacctggaataccctagcgtgaccctgccacctcagcctcacaccaaggagggcgttgatgcctacaacgaagtgatcgcccgggtgcgaatgtgggtgaacctgaacctgtggcagaagctgaagctaagcagagatgatgccaagcctctgctgagactgaagggattcccttcctttcctctggtcgagagacaggccaacgaagtggactggtgggacatggtgtgtaacgtgaagaagctgatcaacgagaaaaaggaggatggcaaggtgttttggcagaatctggctggctacaagagacaggaagccctgagaccatacctgagcagcgaggaagatcggaagaagggaaagaaattcgctcggtaccagctgggcgacctgctgctgcacctggaaaagaagcacggcgaggactggggaaaggtgtacgacgaggcctgggagcggattgacaagaaagtggaaggcctgagcaagcacatcaagctggaagaggaacggagaagcgaggacgcccagagcaaggccgccctgaccgactggctgcgggctaaggccagcttcgtgatcgagggcctgaaggaggccgacaaggacgagttctgcagatgcgagctgaagctgcagaagtggtacggggacctgcggggaaagcccttcgccatcgaagccgagaacagcatcctggacatcagcggcttcagcaagcagtacaactgtgccttcatctggcagaaggacggcgtgaagaagctgaacctgtacctgatcatcaactacttcaagggcggcaagctgcggttcaagaagatcaaacctgaagccttcgaagccaacagattctacaccgtgatcaacaaaaagagcggcgagatcgtgcccatggaggtgaacttcaacttcgacgaccccaacctgatcatcctgcctctggcctttggcaagagacagggcagagaattcatctggaacgacctgctgtccctggaaaccggcagcctgaagctggccaacggaagagtgatcgagaagacactgtacaacagaagaacccggcaggatgagcctgccctgttcgtggccctgaccttcgagcggcgggaggtcctggactcctccaatatcaaaccaatgaacctgatcggcgtggcaagaggcgaaaacatccccgccgtgatcgccctgaccgaccccgagggctgcccactgagccggtttaaggatagcctgggaaacccaacccacatcctgagaatcggcgagagctataaggagaagcagcggaccatccaggccaagaaggaggtggagcagcggagagccggcggctacagccggaagtacgccagcaaagccaagaatctggcagacgatatggtgagaaacaccgctagagatctgctgtactacgccgtgacccaggatgccatgctgatcttcgccaacctgagccggggcttcggccggcagggcaagcggaccttcatggccgagagacagtacacacggatggaggactggctgaccgccaagctggcctacgagggcctgagcaagacctacctgtccaagacactggcccagtacacctccaagacatgcagcaactgtgggtttaccatcaccagcgccgactacgacagggtgctggagaagctgaagaagacagcaacaggctggatgaccacaattaacggcaaggagctgaaggtggagggccagattacctactacaacagatacaagagacagaacgtagtcaaggacctgtccgtcgagctggatagactgagcgaagaatctgtgaacaacgacatctcctcctggacaaagggcagaagcggagaagctctgagcctcctgaagaaaagattctcccatagacccgtgcaggagaagttcgtgtgcctgaactgcggcttcgagacacacgcagccgagcaagccgccctgaacatcgccagatcctggctgttcctgcggagccaggagtacaagaaataccagacaaacaagacaaccggcaacaccgataagagagccttcgtcgagacctggcagtccttttaccggaagaagcttaaggaggtgtggaaacctgccgtgcggtctggcggatctggcggaggctccaccagccccaagaaaaagagaaaagtctaagctgccttctgcggggcttgccttctggccatgcccttcttctctcccttgcacctgtacctcttggtctttgaataaagcctgagtaggaaggctagcaaaaaaaaaaaaaaaaaaaaaaaaaaaaaaaaaaaaaaaaaaaaaaaaaaaaaaaaaaaaaaaaaaaaaaaaaaaaaaaa

SEQ ID NO: 13222 - RNA, 5785 nt, synthetic construct
  source 1..5785: mol_type = other RNA
aggaaataagagagaaaagaagagtaagaagaaatataagagccaccatggcccctaagaagaagcgtaaagtgagccggatggaacgcctcgtctacgaggtgcggcagaagtgcagaaacatcgaggacatctgcatctcctgcggatctctgaacgtgaccctggagcacccactgttcatcggcggcatgtgccagaactgtaaaaactgttttctggagtgtgcctatcaatacgacgatgacggctaccagagctactgcaccatctgttgcggcggaagagaggtgctgatgtgtggaaataacaactgctgccggtgcttctgcgtggaatgcgtggacctgctggtgggccccggcgccgcccaggccgctattaaggaagatccttggaactgctacatgtgcggccacaagggcacatacggcctgctgagacggagagaggactggcctagcagactgcagatgttcttcgccaataaccacgaccaggagttcgacccccctaaggtgtaccctcccgtccccgccgagaagagaaagcccatccgggtcctgagcctgttcgatggcatcgccaccggtctgctggtgctgaaggacctgggcatccaggtggataggtacattgcctccgaggtgtgcgaggactccatcaccgtgggaatggtgcgtcatcagggcaagatcatgtacgtgggcgacgtgcggagcgtgacacagaagcatatccaggagtggggccctttcgacctggtgatcggcggcagcccttgcaatgacctgagcatcgtgaacccagcccggaagggcctgtacgagggaaccggcagactgttcttcgagttttacagactgctgcacgacgcccggcctaaggaaggcgacgaccggcccttcttttggctgttcgagaatgtggtggccatgggagtcagcgacaagcgggatattagccggttcctggagagcaaccccgtgatgatcgatgccaaggaagtgagcgccgcccaccgggccagatacttctggggcaatctgcctggcatgaacagacccctggccagcaccgtgaacgacaagctggagctgcaggagtgcctggagcacggccggatcgccaagttcagcaaggtgagaaccatcaccacccgaagcaacagcatcaaacaaggcaaggaccagcactttcctgtgttcatgaacgagaaggaggacatcctgtggtgtaccgagatggagagagtgttcgggttcccagtccactacacagatgtcagcaacatgtctagactggccagacagagactgctgggaagaagctggtccgtccctgtgatcagacacctgttcgcccctctgaaggagtacttcgcctgcgtgagcagcggcaacagcaacgccaacagccggggccccagcttctctagcggcctggtgccactgtccctgagagggagccacatgggccccatggagatctacaaaaccgtgagcgcctggaagcggcagcctgtgcgcgtgctgagcctgtttcggaatatcgataaagtcctgaaaagcctgggattcctggagagcggctctggctccggcggtggcaccctgaagtacgtggaggatgtgacaaacgtggtcagacgggatgtggagaagtggggccccttcgatctggtgtacggcagcacccaacccctgggcagctcttgtgaccggtgccctggctggtacatgtttcagttccaccggatcctgcagtacgccctgccgagacaggagtcccagcggccattcttttggattttcatggacaacttgctgctgaccgaggatgaccaggaaactaccactcggttcctgcagaccgaagccgtgaccctgcaggacgtgagaggccgggactaccagaacgccatgcgggtgtggtccaacatccctggactgaaaagcaagcacgcacctctgacccctaaagaagaggagtacctgcaggcccaggtgcggagcagaagcaagctggacgcccctaaggtggatctgctggtgaagaattgcctcctgcccctgagagagtacttcaagtatttcagccagaatagtctgcccctgggaggcagcggcggcggccaggagcccgtgaccttcgccgacgtggccgtgctgttcacccccgaggagtggatgttcctggacagcgcccagaggagcctgtacagggacgtgatgctggagaactacaggaacctggccagcgtgggcgccggcgaccagctgggcaagcccagcatgctgagcctgagcgagcccggcgaggagctgtgggcccccgagaggaggaccttccccggcaccaggcccgagccccagcacggcggcccaagcagcggcgcccctcctcccagcggcggcagcccagccggctccccaacctctaccgaggagggcacctctgagtccgccacccccgagagcggccctggcacctccaccgagcccagcgagggcagcgcacccggcagccctgccggcagccccacctccacagaggagggaaccagcaccgagcccagcgaaggcagcgccccaggcaccagcaccgagcctagtgagcaggagattaaacggatcaacaagatcagaagaagacttgtgaaagacagcaacaccaagaaggccggcaagacaggccccatgaaaaccctgctggttagagtgatgacacccgatctgagagagcggctggaaaacctgagaaagaagcctgaaaatatcccccagcccatcagcaatacatctagagccaacctgaataagctgctgaccgattacaccgaaatgaagaaggcgatcctgcatgtgtactgggaagagttccagaaggaccctgtgggcctgatgagccgggtggcccagcctgccagcaagaagatcgatcagaacaagctgaaacctgagatggacgagaagggcaacctgaccaccgccggctttgcctgctctcagtgtggccagcccctgttcgtgtacaagctggagcaggtgtctgagaagggcaaggcttacaccaactacttcggacggtgcaatgtggccgagcacgaaaagctgatcctgctggcccagctgaagcccgagaaggatagcgacgaagccgtgacatatagcctgggaaagtttgggcagagggccctggatttctacagcattcatgtgaccaaggagtccacccaccccgtgaagcccctggcccagatcgccggaaacagatacgcctccggacctgtgggaaaggccctgagcgacgcatgtatgggcacaatcgcctccttcctgtctaagtaccaggacatcatcatcgaacaccagaaggtggtgaagggcaaccagaagagactggagagcctgcgggagctggccggcaaggaaaacctggaataccctagcgtgaccctgccacctcagcctcacaccaaggagggcgttgatgcctacaacgaagtgatcgcccgggtgcgaatgtgggtgaacctgaacctgtggcagaagctgaagctaagcagagatgatgccaagcctctgctgagactgaagggattcccttcctttcctctggtcgagagacaggccaacgaagtggactggtgggacatggtgtgtaacgtgaagaagctgatcaacgagaaaaaggaggatggcaaggtgttttggcagaatctggctggctacaagagacaggaagccctgagaccatacctgagcagcgaggaagatcggaagaagggaaagaaattcgctcggtaccagctgggcgacctgctgctgcacctggaaaagaagcacggcgaggactggggaaaggtgtacgacgaggcctgggagcggattgacaagaaagtggaaggcctgagcaagcacatcaagctggaagaggaacggagaagcgaggacgcccagagcaaggccgccctgaccgactggctgcgggctaaggccagcttcgtgatcgagggcctgaaggaggccgacaaggacgagttctgcagatgcgagctgaagctgcagaagtggtacggggacctgcggggaaagcccttcgccatcgaagccgagaacagcatcctggacatcagcggcttcagcaagcagtacaactgtgccttcatctggcagaaggacggcgtgaagaagctgaacctgtacctgatcatcaactacttcaagggcggcaagctgcggttcaagaagatcaaacctgaagccttcgaagccaacagattctacaccgtgatcaacaaaaagagcggcgagatcgtgcccatggaggtgaacttcaacttcgacgaccccaacctgatcatcctgcctctggcctttggcaagagacagggcagagaattcatctggaacgacctgctgtccctggaaaccggcagcctgaagctggccaacggaagagtgatcgagaagacactgtacaacagaagaacccggcaggatgagcctgccctgttcgtggccctgaccttcgagcggcgggaggtcctggactcctccaatatcaaaccaatgaacctgatcggcgtggcaagaggcgaaaacatccccgccgtgatcgccctgaccgaccccgagggctgcccactgagccggtttaaggatagcctgggaaacccaacccacatcctgagaatcggcgagagctataaggagaagcagcggaccatccaggccaagaaggaggtggagcagcggagagccggcggctacagccggaagtacgccagcaaagccaagaatctggcagacgatatggtgagaaacaccgctagagatctgctgtactacgccgtgacccaggatgccatgctgatcttcgccaacctgagccggggcttcggccggcagggcaagcggaccttcatggccgagagacagtacacacggatggaggactggctgaccgccaagctggcctacgagggcctgagcaagacctacctgtccaagacactggcccagtacacctccaagacatgcagcaactgtgggtttaccatcaccagcgccgactacgacagggtgctggagaagctgaagaagacagcaacaggctggatgaccacaattaacggcaaggagctgaaggtggagggccagattacctactacaacagatacaagagacagaacgtagtcaaggacctgtccgtcgagctggatagactgagcgaagaatctgtgaacaacgacatctcctcctggacaaagggcagaagcggagaagctctgagcctcctgaagaaaagattctcccatagacccgtgcaggagaagttcgtgtgcctgaactgcggcttcgagacacacgcagccgagcaagccgccctgaacatcgccagatcctggctgttcctgcggagccaggagtacaagaaataccagacaaacaagacaaccggcaacaccgataagagagccttcgtcgagacctggcagtccttttaccggaagaagcttaaggaggtgtggaaacctgccgtgcggtctggcggatctggcggaggctccaccagccccaagaaaaagagaaaagtctaagctgccttctgcggggcttgccttctggccatgcccttcttctctcccttgcacctgtacctcttggtctttgaataaagcctgagtaggaaggctagcaaaaaaaaaaaaaaaaaaaaaaaaaaaaaaaaaaaaaaaaaaaaaaaaaaaaaaaaaaaaaaaaaaaaaaaaaaaaaaaa

SEQ ID NO: 13223 - RNA, 5785 nt, synthetic construct
  source 1..5785: mol_type = other RNA
aggaaataagagagaaaagaagagtaagaagaaatataagagccaccatggcccctaagaagaagcgtaaagtgagccggatggaacgcctcgtctacgaggtgcggcagaagtgcagaaacatcgaggacatctgcatctcctgcggatctctgaacgtgaccctggagcacccactgttcatcggcggcatgtgccagaactgtaaaaactgttttctggagtgtgcctatcaatacgacgatgacggctaccagagctactgcaccatctgttgcggcggaagagaggtgctgatgtgtggaaataacaactgctgccggtgcttctgcgtggaatgcgtggacctgctggtgggccccggcgccgcccaggccgctattaaggaagatccttggaactgctacatgtgcggccacaagggcacatacggcctgctgagacggagagaggactggcctagcagactgcagatgttcttcgccaataaccacgaccaggagttcgacccccctaaggtgtaccctcccgtccccgccgagaagagaaagcccatccgggtcctgagcctgttcgatggcatcgccaccggtctgctggtgctgaaggacctgggcatccaggtggataggtacattgcctccgaggtgtgcgaggactccatcaccgtgggaatggtgcgtcatcagggcaagatcatgtacgtgggcgacgtgcggagcgtgacacagaagcatatccaggagtggggccctttcgacctggtgatcggcggcagcccttgcaatgacctgagcatcgtgaacccagcccggaagggcctgtacgagggaaccggcagactgttcttcgagttttacagactgctgcacgacgcccggcctaaggaaggcgacgaccggcccttcttttggctgttcgagaatgtggtggccatgggagtcagcgacaagcgggatattagccggttcctggagagcaaccccgtgatgatcgatgccaaggaagtgagcgccgcccaccgggccagatacttctggggcaatctgcctggcatgaacagacccctggccagcaccgtgaacgacaagctggagctgcaggagtgcctggagcacggccggatcgccaagttcagcaaggtgagaaccatcaccacccgaagcaacagcatcaaacaaggcaaggaccagcactttcctgtgttcatgaacgagaaggaggacatcctgtggtgtaccgagatggagagagtgttcgggttcccagtccactacacagatgtcagcaacatgtctagactggccagacagagactgctgggaagaagctggtccgtccctgtgatcagacacctgttcgcccctctgaaggagtacttcgcctgcgtgagcagcggcaacagcaacgccaacagccggggccccagcttctctagcggcctggtgccactgtccctgagagggagccacatgggccccatggagatctacaaaaccgtgagcgcctggaagcggcagcctgtgcgcgtgctgagcctgtttcggaatatcgataaagtcctgaaaagcctgggattcctggagagcggctctggctccggcggtggcaccctgaagtacgtggaggatgtgacaaacgtggtcagacgggatgtggagaagtggggccccttcgatctggtgtacggcagcacccaacccctgggcagctcttgtgaccggtgccctggctggtacatgtttcagttccaccggatcctgcagtacgccctgccgagacaggagtcccagcggccattcttttggattttcatggacaacttgctgctgaccgaggatgaccaggaaactaccactcggttcctgcagaccgaagccgtgaccctgcaggacgtgagaggccgggactaccagaacgccatgcgggtgtggtccaacatccctggactgaaaagcaagcacgcacctctgacccctaaagaagaggagtacctgcaggcccaggtgcggagcagaagcaagctggacgcccctaaggtggatctgctggtgaagaattgcctcctgcccctgagagagtacttcaagtatttcagccagaatagtctgcccctgggaggcagcggcggcggcatggcccagtgcctggtgaccttcgccgacgtggccatcgacttcagccaggaggagtgggcctgcctgaacagcgcccagagggacctgtactgggacgtgatgctggagaactacagcaacctggtgagcctggacctggagagcgcctacgagaacaagagcctgcccaccgagaagaacatccacgagatcagggccagcaagaggaacagcgacaggaggagcaagagcctgggcaggggcggcccaagcagcggcgcccctcctcccagcggcggcagcccagccggctccccaacctctaccgaggagggcacctctgagtccgccacccccgagagcggccctggcacctccaccgagcccagcgagggcagcgcacccggcagccctgccggcagccccacctccacagaggagggaaccagcaccgagcccagcgaaggcagcgccccaggcaccagcaccgagcctagtgagcaggagattaaacggatcaacaagatcagaagaagacttgtgaaagacagcaacaccaagaaggccggcaagacaggccccatgaaaaccctgctggttagagtgatgacacccgatctgagagagcggctggaaaacctgagaaagaagcctgaaaatatcccccagcccatcagcaatacatctagagccaacctgaataagctgctgaccgattacaccgaaatgaagaaggcgatcctgcatgtgtactgggaagagttccagaaggaccctgtgggcctgatgagccgggtggcccagcctgccagcaagaagatcgatcagaacaagctgaaacctgagatggacgagaagggcaacctgaccaccgccggctttgcctgctctcagtgtggccagcccctgttcgtgtacaagctggagcaggtgtctgagaagggcaaggcttacaccaactacttcggacggtgcaatgtggccgagcacgaaaagctgatcctgctggcccagctgaagcccgagaaggatagcgacgaagccgtgacatatagcctgggaaagtttgggcagagggccctggatttctacagcattcatgtgaccaaggagtccacccaccccgtgaagcccctggcccagatcgccggaaacagatacgcctccggacctgtgggaaaggccctgagcgacgcatgtatgggcacaatcgcctccttcctgtctaagtaccaggacatcatcatcgaacaccagaaggtggtgaagggcaaccagaagagactggagagcctgcgggagctggccggcaaggaaaacctggaataccctagcgtgaccctgccacctcagcctcacaccaaggagggcgttgatgcctacaacgaagtgatcgcccgggtgcgaatgtgggtgaacctgaacctgtggcagaagctgaagctaagcagagatgatgccaagcctctgctgagactgaagggattcccttcctttcctctggtcgagagacaggccaacgaagtggactggtgggacatggtgtgtaacgtgaagaagctgatcaacgagaaaaaggaggatggcaaggtgttttggcagaatctggctggctacaagagacaggaagccctgagaccatacctgagcagcgaggaagatcggaagaagggaaagaaattcgctcggtaccagctgggcgacctgctgctgcacctggaaaagaagcacggcgaggactggggaaaggtgtacgacgaggcctgggagcggattgacaagaaagtggaaggcctgagcaagcacatcaagctggaagaggaacggagaagcgaggacgcccagagcaaggccgccctgaccgactggctgcgggctaaggccagcttcgtgatcgagggcctgaaggaggccgacaaggacgagttctgcagatgcgagctgaagctgcagaagtggtacggggacctgcggggaaagcccttcgccatcgaagccgagaacagcatcctggacatcagcggcttcagcaagcagtacaactgtgccttcatctggcagaaggacggcgtgaagaagctgaacctgtacctgatcatcaactacttcaagggcggcaagctgcggttcaagaagatcaaacctgaagccttcgaagccaacagattctacaccgtgatcaacaaaaagagcggcgagatcgtgcccatggaggtgaacttcaacttcgacgaccccaacctgatcatcctgcctctggcctttggcaagagacagggcagagaattcatctggaacgacctgctgtccctggaaaccggcagcctgaagctggccaacggaagagtgatcgagaagacactgtacaacagaagaacccggcaggatgagcctgccctgttcgtggccctgaccttcgagcggcgggaggtcctggactcctccaatatcaaaccaatgaacctgatcggcgtggcaagaggcgaaaacatccccgccgtgatcgccctgaccgaccccgagggctgcccactgagccggtttaaggatagcctgggaaacccaacccacatcctgagaatcggcgagagctataaggagaagcagcggaccatccaggccaagaaggaggtggagcagcggagagccggcggctacagccggaagtacgccagcaaagccaagaatctggcagacgatatggtgagaaacaccgctagagatctgctgtactacgccgtgacccaggatgccatgctgatcttcgccaacctgagccggggcttcggccggcagggcaagcggaccttcatggccgagagacagtacacacggatggaggactggctgaccgccaagctggcctacgagggcctgagcaagacctacctgtccaagacactggcccagtacacctccaagacatgcagcaactgtgggtttaccatcaccagcgccgactacgacagggtgctggagaagctgaagaagacagcaacaggctggatgaccacaattaacggcaaggagctgaaggtggagggccagattacctactacaacagatacaagagacagaacgtagtcaaggacctgtccgtcgagctggatagactgagcgaagaatctgtgaacaacgacatctcctcctggacaaagggcagaagcggagaagctctgagcctcctgaagaaaagattctcccatagacccgtgcaggagaagttcgtgtgcctgaactgcggcttcgagacacacgcagccgagcaagccgccctgaacatcgccagatcctggctgttcctgcggagccaggagtacaagaaataccagacaaacaagacaaccggcaacaccgataagagagccttcgtcgagacctggcagtccttttaccggaagaagcttaaggaggtgtggaaacctgccgtgcggtctggcggatctggcggaggctccaccagccccaagaaaaagagaaaagtctaagctgccttctgcggggcttgccttctggccatgcccttcttctctcccttgcacctgtacctcttggtctttgaataaagcctgagtaggaaggctagcaaaaaaaaaaaaaaaaaaaaaaaaaaaaaaaaaaaaaaaaaaaaaaaaaaaaaaaaaaaaaaaaaaaaaaaaaaaaaaaa

SEQ ID NO: 13224 - RNA, 5785 nt, synthetic construct
  source 1..5785: mol_type = other RNA
aggaaataagagagaaaagaagagtaagaagaaatataagagccaccatggcccctaagaagaagcgtaaagtgagccggatggaacgcctcgtctacgaggtgcggcagaagtgcagaaacatcgaggacatctgcatctcctgcggatctctgaacgtgaccctggagcacccactgttcatcggcggcatgtgccagaactgtaaaaactgttttctggagtgtgcctatcaatacgacgatgacggctaccagagctactgcaccatctgttgcggcggaagagaggtgctgatgtgtggaaataacaactgctgccggtgcttctgcgtggaatgcgtggacctgctggtgggccccggcgccgcccaggccgctattaaggaagatccttggaactgctacatgtgcggccacaagggcacatacggcctgctgagacggagagaggactggcctagcagactgcagatgttcttcgccaataaccacgaccaggagttcgacccccctaaggtgtaccctcccgtccccgccgagaagagaaagcccatccgggtcctgagcctgttcgatggcatcgccaccggtctgctggtgctgaaggacctgggcatccaggtggataggtacattgcctccgaggtgtgcgaggactccatcaccgtgggaatggtgcgtcatcagggcaagatcatgtacgtgggcgacgtgcggagcgtgacacagaagcatatccaggagtggggccctttcgacctggtgatcggcggcagcccttgcaatgacctgagcatcgtgaacccagcccggaagggcctgtacgagggaaccggcagactgttcttcgagttttacagactgctgcacgacgcccggcctaaggaaggcgacgaccggcccttcttttggctgttcgagaatgtggtggccatgggagtcagcgacaagcgggatattagccggttcctggagagcaaccccgtgatgatcgatgccaaggaagtgagcgccgcccaccgggccagatacttctggggcaatctgcctggcatgaacagacccctggccagcaccgtgaacgacaagctggagctgcaggagtgcctggagcacggccggatcgccaagttcagcaaggtgagaaccatcaccacccgaagcaacagcatcaaacaaggcaaggaccagcactttcctgtgttcatgaacgagaaggaggacatcctgtggtgtaccgagatggagagagtgttcgggttcccagtccactacacagatgtcagcaacatgtctagactggccagacagagactgctgggaagaagctggtccgtccctgtgatcagacacctgttcgcccctctgaaggagtacttcgcctgcgtgagcagcggcaacagcaacgccaacagccggggccccagcttctctagcggcctggtgccactgtccctgagagggagccacatgggccccatggagatctacaaaaccgtgagcgcctggaagcggcagcctgtgcgcgtgctgagcctgtttcggaatatcgataaagtcctgaaaagcctgggattcctggagagcggctctggctccggcggtggcaccctgaagtacgtggaggatgtgacaaacgtggtcagacgggatgtggagaagtggggccccttcgatctggtgtacggcagcacccaacccctgggcagctcttgtgaccggtgccctggctggtacatgtttcagttccaccggatcctgcagtacgccctgccgagacaggagtcccagcggccattcttttggattttcatggacaacttgctgctgaccgaggatgaccaggaaactaccactcggttcctgcagaccgaagccgtgaccctgcaggacgtgagaggccgggactaccagaacgccatgcgggtgtggtccaacatccctggactgaaaagcaagcacgcacctctgacccctaaagaagaggagtacctgcaggcccaggtgcggagcagaagcaagctggacgcccctaaggtggatctgctggtgaagaattgcctcctgcccctgagagagtacttcaagtatttcagccagaatagtctgcccctgggaggcagcggcggcggcgcccaggtgctggtgaccttcaaggacgtggccgtgaccttcaccagggaggagtggggccagctggacctggaccagaaggccctgtaccaggaggtgatgctggagacctacggcctgctggtgagcctgggccaccccgtgcccaagcccgagctgacccacctgctggagtgcggccaggagctgtggaagggcaagaggggcctgagccacagcacctgcagcggcgacgacaccaagggcggcccaagcagcggcgcccctcctcccagcggcggcagcccagccggctccccaacctctaccgaggagggcacctctgagtccgccacccccgagagcggccctggcacctccaccgagcccagcgagggcagcgcacccggcagccctgccggcagccccacctccacagaggagggaaccagcaccgagcccagcgaaggcagcgccccaggcaccagcaccgagcctagtgagcaggagattaaacggatcaacaagatcagaagaagacttgtgaaagacagcaacaccaagaaggccggcaagacaggccccatgaaaaccctgctggttagagtgatgacacccgatctgagagagcggctggaaaacctgagaaagaagcctgaaaatatcccccagcccatcagcaatacatctagagccaacctgaataagctgctgaccgattacaccgaaatgaagaaggcgatcctgcatgtgtactgggaagagttccagaaggaccctgtgggcctgatgagccgggtggcccagcctgccagcaagaagatcgatcagaacaagctgaaacctgagatggacgagaagggcaacctgaccaccgccggctttgcctgctctcagtgtggccagcccctgttcgtgtacaagctggagcaggtgtctgagaagggcaaggcttacaccaactacttcggacggtgcaatgtggccgagcacgaaaagctgatcctgctggcccagctgaagcccgagaaggatagcgacgaagccgtgacatatagcctgggaaagtttgggcagagggccctggatttctacagcattcatgtgaccaaggagtccacccaccccgtgaagcccctggcccagatcgccggaaacagatacgcctccggacctgtgggaaaggccctgagcgacgcatgtatgggcacaatcgcctccttcctgtctaagtaccaggacatcatcatcgaacaccagaaggtggtgaagggcaaccagaagagactggagagcctgcgggagctggccggcaaggaaaacctggaataccctagcgtgaccctgccacctcagcctcacaccaaggagggcgttgatgcctacaacgaagtgatcgcccgggtgcgaatgtgggtgaacctgaacctgtggcagaagctgaagctaagcagagatgatgccaagcctctgctgagactgaagggattcccttcctttcctctggtcgagagacaggccaacgaagtggactggtgggacatggtgtgtaacgtgaagaagctgatcaacgagaaaaaggaggatggcaaggtgttttggcagaatctggctggctacaagagacaggaagccctgagaccatacctgagcagcgaggaagatcggaagaagggaaagaaattcgctcggtaccagctgggcgacctgctgctgcacctggaaaagaagcacggcgaggactggggaaaggtgtacgacgaggcctgggagcggattgacaagaaagtggaaggcctgagcaagcacatcaagctggaagaggaacggagaagcgaggacgcccagagcaaggccgccctgaccgactggctgcgggctaaggccagcttcgtgatcgagggcctgaaggaggccgacaaggacgagttctgcagatgcgagctgaagctgcagaagtggtacggggacctgcggggaaagcccttcgccatcgaagccgagaacagcatcctggacatcagcggcttcagcaagcagtacaactgtgccttcatctggcagaaggacggcgtgaagaagctgaacctgtacctgatcatcaactacttcaagggcggcaagctgcggttcaagaagatcaaacctgaagccttcgaagccaacagattctacaccgtgatcaacaaaaagagcggcgagatcgtgcccatggaggtgaacttcaacttcgacgaccccaacctgatcatcctgcctctggcctttggcaagagacagggcagagaattcatctggaacgacctgctgtccctggaaaccggcagcctgaagctggccaacggaagagtgatcgagaagacactgtacaacagaagaacccggcaggatgagcctgccctgttcgtggccctgaccttcgagcggcgggaggtcctggactcctccaatatcaaaccaatgaacctgatcggcgtggcaagaggcgaaaacatccccgccgtgatcgccctgaccgaccccgagggctgcccactgagccggtttaaggatagcctgggaaacccaacccacatcctgagaatcggcgagagctataaggagaagcagcggaccatccaggccaagaaggaggtggagcagcggagagccggcggctacagccggaagtacgccagcaaagccaagaatctggcagacgatatggtgagaaacaccgctagagatctgctgtactacgccgtgacccaggatgccatgctgatcttcgccaacctgagccggggcttcggccggcagggcaagcggaccttcatggccgagagacagtacacacggatggaggactggctgaccgccaagctggcctacgagggcctgagcaagacctacctgtccaagacactggcccagtacacctccaagacatgcagcaactgtgggtttaccatcaccagcgccgactacgacagggtgctggagaagctgaagaagacagcaacaggctggatgaccacaattaacggcaaggagctgaaggtggagggccagattacctactacaacagatacaagagacagaacgtagtcaaggacctgtccgtcgagctggatagactgagcgaagaatctgtgaacaacgacatctcctcctggacaaagggcagaagcggagaagctctgagcctcctgaagaaaagattctcccatagacccgtgcaggagaagttcgtgtgcctgaactgcggcttcgagacacacgcagccgagcaagccgccctgaacatcgccagatcctggctgttcctgcggagccaggagtacaagaaataccagacaaacaagacaaccggcaacaccgataagagagccttcgtcgagacctggcagtccttttaccggaagaagcttaaggaggtgtggaaacctgccgtgcggtctggcggatctggcggaggctccaccagccccaagaaaaagagaaaagtctaagctgccttctgcggggcttgccttctggccatgcccttcttctctcccttgcacctgtacctcttggtctttgaataaagcctgagtaggaaggctagcaaaaaaaaaaaaaaaaaaaaaaaaaaaaaaaaaaaaaaaaaaaaaaaaaaaaaaaaaaaaaaaaaaaaaaaaaaaaaaaa

SEQ ID NO: 13225 - RNA, 5785 nt, synthetic construct
  source 1..5785: mol_type = other RNA
aggaaataagagagaaaagaagagtaagaagaaatataagagccaccatggcccctaagaagaagcgtaaagtgagccggatggaacgcctcgtctacgaggtgcggcagaagtgcagaaacatcgaggacatctgcatctcctgcggatctctgaacgtgaccctggagcacccactgttcatcggcggcatgtgccagaactgtaaaaactgttttctggagtgtgcctatcaatacgacgatgacggctaccagagctactgcaccatctgttgcggcggaagagaggtgctgatgtgtggaaataacaactgctgccggtgcttctgcgtggaatgcgtggacctgctggtgggccccggcgccgcccaggccgctattaaggaagatccttggaactgctacatgtgcggccacaagggcacatacggcctgctgagacggagagaggactggcctagcagactgcagatgttcttcgccaataaccacgaccaggagttcgacccccctaaggtgtaccctcccgtccccgccgagaagagaaagcccatccgggtcctgagcctgttcgatggcatcgccaccggtctgctggtgctgaaggacctgggcatccaggtggataggtacattgcctccgaggtgtgcgaggactccatcaccgtgggaatggtgcgtcatcagggcaagatcatgtacgtgggcgacgtgcggagcgtgacacagaagcatatccaggagtggggccctttcgacctggtgatcggcggcagcccttgcaatgacctgagcatcgtgaacccagcccggaagggcctgtacgagggaaccggcagactgttcttcgagttttacagactgctgcacgacgcccggcctaaggaaggcgacgaccggcccttcttttggctgttcgagaatgtggtggccatgggagtcagcgacaagcgggatattagccggttcctggagagcaaccccgtgatgatcgatgccaaggaagtgagcgccgcccaccgggccagatacttctggggcaatctgcctggcatgaacagacccctggccagcaccgtgaacgacaagctggagctgcaggagtgcctggagcacggccggatcgccaagttcagcaaggtgagaaccatcaccacccgaagcaacagcatcaaacaaggcaaggaccagcactttcctgtgttcatgaacgagaaggaggacatcctgtggtgtaccgagatggagagagtgttcgggttcccagtccactacacagatgtcagcaacatgtctagactggccagacagagactgctgggaagaagctggtccgtccctgtgatcagacacctgttcgcccctctgaaggagtacttcgcctgcgtgagcagcggcaacagcaacgccaacagccggggccccagcttctctagcggcctggtgccactgtccctgagagggagccacatgggccccatggagatctacaaaaccgtgagcgcctggaagcggcagcctgtgcgcgtgctgagcctgtttcggaatatcgataaagtcctgaaaagcctgggattcctggagagcggctctggctccggcggtggcaccctgaagtacgtggaggatgtgacaaacgtggtcagacgggatgtggagaagtggggccccttcgatctggtgtacggcagcacccaacccctgggcagctcttgtgaccggtgccctggctggtacatgtttcagttccaccggatcctgcagtacgccctgccgagacaggagtcccagcggccattcttttggattttcatggacaacttgctgctgaccgaggatgaccaggaaactaccactcggttcctgcagaccgaagccgtgaccctgcaggacgtgagaggccgggactaccagaacgccatgcgggtgtggtccaacatccctggactgaaaagcaagcacgcacctctgacccctaaagaagaggagtacctgcaggcccaggtgcggagcagaagcaagctggacgcccctaaggtggatctgctggtgaagaattgcctcctgcccctgagagagtacttcaagtatttcagccagaatagtctgcccctgggaggcagcggcggcggcagcctgggccccgtgagcttcaaggacgtggccgtgggcttcacccaggaggagtggaggcagctggagcccgcccagaggaggacctacagggaggtgatgctggagaactacagccacctggtggccgtgggctgccacttcatcaagcccgacgtgatcaccaagctggagaggggcgaggagccctggatcgagggcggcttcctgccccagggctgcgccggcgacgaggtgtggcagggcggcccaagcagcggcgcccctcctcccagcggcggcagcccagccggctccccaacctctaccgaggagggcacctctgagtccgccacccccgagagcggccctggcacctccaccgagcccagcgagggcagcgcacccggcagccctgccggcagccccacctccacagaggagggaaccagcaccgagcccagcgaaggcagcgccccaggcaccagcaccgagcctagtgagcaggagattaaacggatcaacaagatcagaagaagacttgtgaaagacagcaacaccaagaaggccggcaagacaggccccatgaaaaccctgctggttagagtgatgacacccgatctgagagagcggctggaaaacctgagaaagaagcctgaaaatatcccccagcccatcagcaatacatctagagccaacctgaataagctgctgaccgattacaccgaaatgaagaaggcgatcctgcatgtgtactgggaagagttccagaaggaccctgtgggcctgatgagccgggtggcccagcctgccagcaagaagatcgatcagaacaagctgaaacctgagatggacgagaagggcaacctgaccaccgccggctttgcctgctctcagtgtggccagcccctgttcgtgtacaagctggagcaggtgtctgagaagggcaaggcttacaccaactacttcggacggtgcaatgtggccgagcacgaaaagctgatcctgctggcccagctgaagcccgagaaggatagcgacgaagccgtgacatatagcctgggaaagtttgggcagagggccctggatttctacagcattcatgtgaccaaggagtccacccaccccgtgaagcccctggcccagatcgccggaaacagatacgcctccggacctgtgggaaaggccctgagcgacgcatgtatgggcacaatcgcctccttcctgtctaagtaccaggacatcatcatcgaacaccagaaggtggtgaagggcaaccagaagagactggagagcctgcgggagctggccggcaaggaaaacctggaataccctagcgtgaccctgccacctcagcctcacaccaaggagggcgttgatgcctacaacgaagtgatcgcccgggtgcgaatgtgggtgaacctgaacctgtggcagaagctgaagctaagcagagatgatgccaagcctctgctgagactgaagggattcccttcctttcctctggtcgagagacaggccaacgaagtggactggtgggacatggtgtgtaacgtgaagaagctgatcaacgagaaaaaggaggatggcaaggtgttttggcagaatctggctggctacaagagacaggaagccctgagaccatacctgagcagcgaggaagatcggaagaagggaaagaaattcgctcggtaccagctgggcgacctgctgctgcacctggaaaagaagcacggcgaggactggggaaaggtgtacgacgaggcctgggagcggattgacaagaaagtggaaggcctgagcaagcacatcaagctggaagaggaacggagaagcgaggacgcccagagcaaggccgccctgaccgactggctgcgggctaaggccagcttcgtgatcgagggcctgaaggaggccgacaaggacgagttctgcagatgcgagctgaagctgcagaagtggtacggggacctgcggggaaagcccttcgccatcgaagccgagaacagcatcctggacatcagcggcttcagcaagcagtacaactgtgccttcatctggcagaaggacggcgtgaagaagctgaacctgtacctgatcatcaactacttcaagggcggcaagctgcggttcaagaagatcaaacctgaagccttcgaagccaacagattctacaccgtgatcaacaaaaagagcggcgagatcgtgcccatggaggtgaacttcaacttcgacgaccccaacctgatcatcctgcctctggcctttggcaagagacagggcagagaattcatctggaacgacctgctgtccctggaaaccggcagcctgaagctggccaacggaagagtgatcgagaagacactgtacaacagaagaacccggcaggatgagcctgccctgttcgtggccctgaccttcgagcggcgggaggtcctggactcctccaatatcaaaccaatgaacctgatcggcgtggcaagaggcgaaaacatccccgccgtgatcgccctgaccgaccccgagggctgcccactgagccggtttaaggatagcctgggaaacccaacccacatcctgagaatcggcgagagctataaggagaagcagcggaccatccaggccaagaaggaggtggagcagcggagagccggcggctacagccggaagtacgccagcaaagccaagaatctggcagacgatatggtgagaaacaccgctagagatctgctgtactacgccgtgacccaggatgccatgctgatcttcgccaacctgagccggggcttcggccggcagggcaagcggaccttcatggccgagagacagtacacacggatggaggactggctgaccgccaagctggcctacgagggcctgagcaagacctacctgtccaagacactggcccagtacacctccaagacatgcagcaactgtgggtttaccatcaccagcgccgactacgacagggtgctggagaagctgaagaagacagcaacaggctggatgaccacaattaacggcaaggagctgaaggtggagggccagattacctactacaacagatacaagagacagaacgtagtcaaggacctgtccgtcgagctggatagactgagcgaagaatctgtgaacaacgacatctcctcctggacaaagggcagaagcggagaagctctgagcctcctgaagaaaagattctcccatagacccgtgcaggagaagttcgtgtgcctgaactgcggcttcgagacacacgcagccgagcaagccgccctgaacatcgccagatcctggctgttcctgcggagccaggagtacaagaaataccagacaaacaagacaaccggcaacaccgataagagagccttcgtcgagacctggcagtccttttaccggaagaagcttaaggaggtgtggaaacctgccgtgcggtctggcggatctggcggaggctccaccagccccaagaaaaagagaaaagtctaagctgccttctgcggggcttgccttctggccatgcccttcttctctcccttgcacctgtacctcttggtctttgaataaagcctgagtaggaaggctagcaaaaaaaaaaaaaaaaaaaaaaaaaaaaaaaaaaaaaaaaaaaaaaaaaaaaaaaaaaaaaaaaaaaaaaaaaaaaaaaa

SEQ ID NO: 13226 - RNA, 5785 nt, synthetic construct
  source 1..5785: mol_type = other RNA
aggaaataagagagaaaagaagagtaagaagaaatataagagccaccatggcccctaagaagaagcgtaaagtgagccggatggaacgcctcgtctacgaggtgcggcagaagtgcagaaacatcgaggacatctgcatctcctgcggatctctgaacgtgaccctggagcacccactgttcatcggcggcatgtgccagaactgtaaaaactgttttctggagtgtgcctatcaatacgacgatgacggctaccagagctactgcaccatctgttgcggcggaagagaggtgctgatgtgtggaaataacaactgctgccggtgcttctgcgtggaatgcgtggacctgctggtgggccccggcgccgcccaggccgctattaaggaagatccttggaactgctacatgtgcggccacaagggcacatacggcctgctgagacggagagaggactggcctagcagactgcagatgttcttcgccaataaccacgaccaggagttcgacccccctaaggtgtaccctcccgtccccgccgagaagagaaagcccatccgggtcctgagcctgttcgatggcatcgccaccggtctgctggtgctgaaggacctgggcatccaggtggataggtacattgcctccgaggtgtgcgaggactccatcaccgtgggaatggtgcgtcatcagggcaagatcatgtacgtgggcgacgtgcggagcgtgacacagaagcatatccaggagtggggccctttcgacctggtgatcggcggcagcccttgcaatgacctgagcatcgtgaacccagcccggaagggcctgtacgagggaaccggcagactgttcttcgagttttacagactgctgcacgacgcccggcctaaggaaggcgacgaccggcccttcttttggctgttcgagaatgtggtggccatgggagtcagcgacaagcgggatattagccggttcctggagagcaaccccgtgatgatcgatgccaaggaagtgagcgccgcccaccgggccagatacttctggggcaatctgcctggcatgaacagacccctggccagcaccgtgaacgacaagctggagctgcaggagtgcctggagcacggccggatcgccaagttcagcaaggtgagaaccatcaccacccgaagcaacagcatcaaacaaggcaaggaccagcactttcctgtgttcatgaacgagaaggaggacatcctgtggtgtaccgagatggagagagtgttcgggttcccagtccactacacagatgtcagcaacatgtctagactggccagacagagactgctgggaagaagctggtccgtccctgtgatcagacacctgttcgcccctctgaaggagtacttcgcctgcgtgagcagcggcaacagcaacgccaacagccggggccccagcttctctagcggcctggtgccactgtccctgagagggagccacatgggccccatggagatctacaaaaccgtgagcgcctggaagcggcagcctgtgcgcgtgctgagcctgtttcggaatatcgataaagtcctgaaaagcctgggattcctggagagcggctctggctccggcggtggcaccctgaagtacgtggaggatgtgacaaacgtggtcagacgggatgtggagaagtggggccccttcgatctggtgtacggcagcacccaacccctgggcagctcttgtgaccggtgccctggctggtacatgtttcagttccaccggatcctgcagtacgccctgccgagacaggagtcccagcggccattcttttggattttcatggacaacttgctgctgaccgaggatgaccaggaaactaccactcggttcctgcagaccgaagccgtgaccctgcaggacgtgagaggccgggactaccagaacgccatgcgggtgtggtccaacatccctggactgaaaagcaagcacgcacctctgacccctaaagaagaggagtacctgcaggcccaggtgcggagcagaagcaagctggacgcccctaaggtggatctgctggtgaagaattgcctcctgcccctgagagagtacttcaagtatttcagccagaatagtctgcccctgggaggcagcggcggcggcgagcagggcctggtgagcttcgaggacgtggccgtggacttcacctggcaggagtggcaggagctggacgccgcccagaggaccctgtacagggacgtgatgctggagaactacagcagcctggtgagcctgggccactgcgtgaccaagcccgagctgatcttcaggctggagcacggcttcggcccctggagcatcggcgagaccagcctgtggaacctgcccggcgtgctggaggtgcccggcggcccaagcagcggcgcccctcctcccagcggcggcagcccagccggctccccaacctctaccgaggagggcacctctgagtccgccacccccgagagcggccctggcacctccaccgagcccagcgagggcagcgcacccggcagccctgccggcagccccacctccacagaggagggaaccagcaccgagcccagcgaaggcagcgccccaggcaccagcaccgagcctagtgagcaggagattaaacggatcaacaagatcagaagaagacttgtgaaagacagcaacaccaagaaggccggcaagacaggccccatgaaaaccctgctggttagagtgatgacacccgatctgagagagcggctggaaaacctgagaaagaagcctgaaaatatcccccagcccatcagcaatacatctagagccaacctgaataagctgctgaccgattacaccgaaatgaagaaggcgatcctgcatgtgtactgggaagagttccagaaggaccctgtgggcctgatgagccgggtggcccagcctgccagcaagaagatcgatcagaacaagctgaaacctgagatggacgagaagggcaacctgaccaccgccggctttgcctgctctcagtgtggccagcccctgttcgtgtacaagctggagcaggtgtctgagaagggcaaggcttacaccaactacttcggacggtgcaatgtggccgagcacgaaaagctgatcctgctggcccagctgaagcccgagaaggatagcgacgaagccgtgacatatagcctgggaaagtttgggcagagggccctggatttctacagcattcatgtgaccaaggagtccacccaccccgtgaagcccctggcccagatcgccggaaacagatacgcctccggacctgtgggaaaggccctgagcgacgcatgtatgggcacaatcgcctccttcctgtctaagtaccaggacatcatcatcgaacaccagaaggtggtgaagggcaaccagaagagactggagagcctgcgggagctggccggcaaggaaaacctggaataccctagcgtgaccctgccacctcagcctcacaccaaggagggcgttgatgcctacaacgaagtgatcgcccgggtgcgaatgtgggtgaacctgaacctgtggcagaagctgaagctaagcagagatgatgccaagcctctgctgagactgaagggattcccttcctttcctctggtcgagagacaggccaacgaagtggactggtgggacatggtgtgtaacgtgaagaagctgatcaacgagaaaaaggaggatggcaaggtgttttggcagaatctggctggctacaagagacaggaagccctgagaccatacctgagcagcgaggaagatcggaagaagggaaagaaattcgctcggtaccagctgggcgacctgctgctgcacctggaaaagaagcacggcgaggactggggaaaggtgtacgacgaggcctgggagcggattgacaagaaagtggaaggcctgagcaagcacatcaagctggaagaggaacggagaagcgaggacgcccagagcaaggccgccctgaccgactggctgcgggctaaggccagcttcgtgatcgagggcctgaaggaggccgacaaggacgagttctgcagatgcgagctgaagctgcagaagtggtacggggacctgcggggaaagcccttcgccatcgaagccgagaacagcatcctggacatcagcggcttcagcaagcagtacaactgtgccttcatctggcagaaggacggcgtgaagaagctgaacctgtacctgatcatcaactacttcaagggcggcaagctgcggttcaagaagatcaaacctgaagccttcgaagccaacagattctacaccgtgatcaacaaaaagagcggcgagatcgtgcccatggaggtgaacttcaacttcgacgaccccaacctgatcatcctgcctctggcctttggcaagagacagggcagagaattcatctggaacgacctgctgtccctggaaaccggcagcctgaagctggccaacggaagagtgatcgagaagacactgtacaacagaagaacccggcaggatgagcctgccctgttcgtggccctgaccttcgagcggcgggaggtcctggactcctccaatatcaaaccaatgaacctgatcggcgtggcaagaggcgaaaacatccccgccgtgatcgccctgaccgaccccgagggctgcccactgagccggtttaaggatagcctgggaaacccaacccacatcctgagaatcggcgagagctataaggagaagcagcggaccatccaggccaagaaggaggtggagcagcggagagccggcggctacagccggaagtacgccagcaaagccaagaatctggcagacgatatggtgagaaacaccgctagagatctgctgtactacgccgtgacccaggatgccatgctgatcttcgccaacctgagccggggcttcggccggcagggcaagcggaccttcatggccgagagacagtacacacggatggaggactggctgaccgccaagctggcctacgagggcctgagcaagacctacctgtccaagacactggcccagtacacctccaagacatgcagcaactgtgggtttaccatcaccagcgccgactacgacagggtgctggagaagctgaagaagacagcaacaggctggatgaccacaattaacggcaaggagctgaaggtggagggccagattacctactacaacagatacaagagacagaacgtagtcaaggacctgtccgtcgagctggatagactgagcgaagaatctgtgaacaacgacatctcctcctggacaaagggcagaagcggagaagctctgagcctcctgaagaaaagattctcccatagacccgtgcaggagaagttcgtgtgcctgaactgcggcttcgagacacacgcagccgagcaagccgccctgaacatcgccagatcctggctgttcctgcggagccaggagtacaagaaataccagacaaacaagacaaccggcaacaccgataagagagccttcgtcgagacctggcagtccttttaccggaagaagcttaaggaggtgtggaaacctgccgtgcggtctggcggatctggcggaggctccaccagccccaagaaaaagagaaaagtctaagctgccttctgcggggcttgccttctggccatgcccttcttctctcccttgcacctgtacctcttggtctttgaataaagcctgagtaggaaggctagcaaaaaaaaaaaaaaaaaaaaaaaaaaaaaaaaaaaaaaaaaaaaaaaaaaaaaaaaaaaaaaaaaaaaaaaaaaaaaaaa

SEQ ID NO: 13227 - RNA, 5785 nt, synthetic construct
  source 1..5785: mol_type = other RNA
aggaaataagagagaaaagaagagtaagaagaaatataagagccaccatggcccctaagaagaagcgtaaagtgagccggatggaacgcctcgtctacgaggtgcggcagaagtgcagaaacatcgaggacatctgcatctcctgcggatctctgaacgtgaccctggagcacccactgttcatcggcggcatgtgccagaactgtaaaaactgttttctggagtgtgcctatcaatacgacgatgacggctaccagagctactgcaccatctgttgcggcggaagagaggtgctgatgtgtggaaataacaactgctgccggtgcttctgcgtggaatgcgtggacctgctggtgggccccggcgccgcccaggccgctattaaggaagatccttggaactgctacatgtgcggccacaagggcacatacggcctgctgagacggagagaggactggcctagcagactgcagatgttcttcgccaataaccacgaccaggagttcgacccccctaaggtgtaccctcccgtccccgccgagaagagaaagcccatccgggtcctgagcctgttcgatggcatcgccaccggtctgctggtgctgaaggacctgggcatccaggtggataggtacattgcctccgaggtgtgcgaggactccatcaccgtgggaatggtgcgtcatcagggcaagatcatgtacgtgggcgacgtgcggagcgtgacacagaagcatatccaggagtggggccctttcgacctggtgatcggcggcagcccttgcaatgacctgagcatcgtgaacccagcccggaagggcctgtacgagggaaccggcagactgttcttcgagttttacagactgctgcacgacgcccggcctaaggaaggcgacgaccggcccttcttttggctgttcgagaatgtggtggccatgggagtcagcgacaagcgggatattagccggttcctggagagcaaccccgtgatgatcgatgccaaggaagtgagcgccgcccaccgggccagatacttctggggcaatctgcctggcatgaacagacccctggccagcaccgtgaacgacaagctggagctgcaggagtgcctggagcacggccggatcgccaagttcagcaaggtgagaaccatcaccacccgaagcaacagcatcaaacaaggcaaggaccagcactttcctgtgttcatgaacgagaaggaggacatcctgtggtgtaccgagatggagagagtgttcgggttcccagtccactacacagatgtcagcaacatgtctagactggccagacagagactgctgggaagaagctggtccgtccctgtgatcagacacctgttcgcccctctgaaggagtacttcgcctgcgtgagcagcggcaacagcaacgccaacagccggggccccagcttctctagcggcctggtgccactgtccctgagagggagccacatgggccccatggagatctacaaaaccgtgagcgcctggaagcggcagcctgtgcgcgtgctgagcctgtttcggaatatcgataaagtcctgaaaagcctgggattcctggagagcggctctggctccggcggtggcaccctgaagtacgtggaggatgtgacaaacgtggtcagacgggatgtggagaagtggggccccttcgatctggtgtacggcagcacccaacccctgggcagctcttgtgaccggtgccctggctggtacatgtttcagttccaccggatcctgcagtacgccctgccgagacaggagtcccagcggccattcttttggattttcatggacaacttgctgctgaccgaggatgaccaggaaactaccactcggttcctgcagaccgaagccgtgaccctgcaggacgtgagaggccgggactaccagaacgccatgcgggtgtggtccaacatccctggactgaaaagcaagcacgcacctctgacccctaaagaagaggagtacctgcaggcccaggtgcggagcagaagcaagctggacgcccctaaggtggatctgctggtgaagaattgcctcctgcccctgagagagtacttcaagtatttcagccagaatagtctgcccctgggaggcagcggcggcggcgcccacggcagcgtgatgttcagcgacgtgagcatcgtgttcagccaggaggagtgggagtacctggacctgaagcagagggacctgtacagggacgtgatgctggagaactacagcaacctggtgagcctgggctgcttcatcagcaagcccgacgtgatcagcctgctggagcagggcaaggagccctggaaggtgatgaggaagggcaggggcaggtaccccgacctggagaccaggtacggcggcccaagcagcggcgcccctcctcccagcggcggcagcccagccggctccccaacctctaccgaggagggcacctctgagtccgccacccccgagagcggccctggcacctccaccgagcccagcgagggcagcgcacccggcagccctgccggcagccccacctccacagaggagggaaccagcaccgagcccagcgaaggcagcgccccaggcaccagcaccgagcctagtgagcaggagattaaacggatcaacaagatcagaagaagacttgtgaaagacagcaacaccaagaaggccggcaagacaggccccatgaaaaccctgctggttagagtgatgacacccgatctgagagagcggctggaaaacctgagaaagaagcctgaaaatatcccccagcccatcagcaatacatctagagccaacctgaataagctgctgaccgattacaccgaaatgaagaaggcgatcctgcatgtgtactgggaagagttccagaaggaccctgtgggcctgatgagccgggtggcccagcctgccagcaagaagatcgatcagaacaagctgaaacctgagatggacgagaagggcaacctgaccaccgccggctttgcctgctctcagtgtggccagcccctgttcgtgtacaagctggagcaggtgtctgagaagggcaaggcttacaccaactacttcggacggtgcaatgtggccgagcacgaaaagctgatcctgctggcccagctgaagcccgagaaggatagcgacgaagccgtgacatatagcctgggaaagtttgggcagagggccctggatttctacagcattcatgtgaccaaggagtccacccaccccgtgaagcccctggcccagatcgccggaaacagatacgcctccggacctgtgggaaaggccctgagcgacgcatgtatgggcacaatcgcctccttcctgtctaagtaccaggacatcatcatcgaacaccagaaggtggtgaagggcaaccagaagagactggagagcctgcgggagctggccggcaaggaaaacctggaataccctagcgtgaccctgccacctcagcctcacaccaaggagggcgttgatgcctacaacgaagtgatcgcccgggtgcgaatgtgggtgaacctgaacctgtggcagaagctgaagctaagcagagatgatgccaagcctctgctgagactgaagggattcccttcctttcctctggtcgagagacaggccaacgaagtggactggtgggacatggtgtgtaacgtgaagaagctgatcaacgagaaaaaggaggatggcaaggtgttttggcagaatctggctggctacaagagacaggaagccctgagaccatacctgagcagcgaggaagatcggaagaagggaaagaaattcgctcggtaccagctgggcgacctgctgctgcacctggaaaagaagcacggcgaggactggggaaaggtgtacgacgaggcctgggagcggattgacaagaaagtggaaggcctgagcaagcacatcaagctggaagaggaacggagaagcgaggacgcccagagcaaggccgccctgaccgactggctgcgggctaaggccagcttcgtgatcgagggcctgaaggaggccgacaaggacgagttctgcagatgcgagctgaagctgcagaagtggtacggggacctgcggggaaagcccttcgccatcgaagccgagaacagcatcctggacatcagcggcttcagcaagcagtacaactgtgccttcatctggcagaaggacggcgtgaagaagctgaacctgtacctgatcatcaactacttcaagggcggcaagctgcggttcaagaagatcaaacctgaagccttcgaagccaacagattctacaccgtgatcaacaaaaagagcggcgagatcgtgcccatggaggtgaacttcaacttcgacgaccccaacctgatcatcctgcctctggcctttggcaagagacagggcagagaattcatctggaacgacctgctgtccctggaaaccggcagcctgaagctggccaacggaagagtgatcgagaagacactgtacaacagaagaacccggcaggatgagcctgccctgttcgtggccctgaccttcgagcggcgggaggtcctggactcctccaatatcaaaccaatgaacctgatcggcgtggcaagaggcgaaaacatccccgccgtgatcgccctgaccgaccccgagggctgcccactgagccggtttaaggatagcctgggaaacccaacccacatcctgagaatcggcgagagctataaggagaagcagcggaccatccaggccaagaaggaggtggagcagcggagagccggcggctacagccggaagtacgccagcaaagccaagaatctggcagacgatatggtgagaaacaccgctagagatctgctgtactacgccgtgacccaggatgccatgctgatcttcgccaacctgagccggggcttcggccggcagggcaagcggaccttcatggccgagagacagtacacacggatggaggactggctgaccgccaagctggcctacgagggcctgagcaagacctacctgtccaagacactggcccagtacacctccaagacatgcagcaactgtgggtttaccatcaccagcgccgactacgacagggtgctggagaagctgaagaagacagcaacaggctggatgaccacaattaacggcaaggagctgaaggtggagggccagattacctactacaacagatacaagagacagaacgtagtcaaggacctgtccgtcgagctggatagactgagcgaagaatctgtgaacaacgacatctcctcctggacaaagggcagaagcggagaagctctgagcctcctgaagaaaagattctcccatagacccgtgcaggagaagttcgtgtgcctgaactgcggcttcgagacacacgcagccgagcaagccgccctgaacatcgccagatcctggctgttcctgcggagccaggagtacaagaaataccagacaaacaagacaaccggcaacaccgataagagagccttcgtcgagacctggcagtccttttaccggaagaagcttaaggaggtgtggaaacctgccgtgcggtctggcggatctggcggaggctccaccagccccaagaaaaagagaaaagtctaagctgccttctgcggggcttgccttctggccatgcccttcttctctcccttgcacctgtacctcttggtctttgaataaagcctgagtaggaaggctagcaaaaaaaaaaaaaaaaaaaaaaaaaaaaaaaaaaaaaaaaaaaaaaaaaaaaaaaaaaaaaaaaaaaaaaaaaaaaaaaa

SEQ ID NO: 13228 - RNA, 5785 nt, synthetic construct
  source 1..5785: mol_type = other RNA
aggaaataagagagaaaagaagagtaagaagaaatataagagccaccatggcccctaagaagaagcgtaaagtgagccggatggaacgcctcgtctacgaggtgcggcagaagtgcagaaacatcgaggacatctgcatctcctgcggatctctgaacgtgaccctggagcacccactgttcatcggcggcatgtgccagaactgtaaaaactgttttctggagtgtgcctatcaatacgacgatgacggctaccagagctactgcaccatctgttgcggcggaagagaggtgctgatgtgtggaaataacaactgctgccggtgcttctgcgtggaatgcgtggacctgctggtgggccccggcgccgcccaggccgctattaaggaagatccttggaactgctacatgtgcggccacaagggcacatacggcctgctgagacggagagaggactggcctagcagactgcagatgttcttcgccaataaccacgaccaggagttcgacccccctaaggtgtaccctcccgtccccgccgagaagagaaagcccatccgggtcctgagcctgttcgatggcatcgccaccggtctgctggtgctgaaggacctgggcatccaggtggataggtacattgcctccgaggtgtgcgaggactccatcaccgtgggaatggtgcgtcatcagggcaagatcatgtacgtgggcgacgtgcggagcgtgacacagaagcatatccaggagtggggccctttcgacctggtgatcggcggcagcccttgcaatgacctgagcatcgtgaacccagcccggaagggcctgtacgagggaaccggcagactgttcttcgagttttacagactgctgcacgacgcccggcctaaggaaggcgacgaccggcccttcttttggctgttcgagaatgtggtggccatgggagtcagcgacaagcgggatattagccggttcctggagagcaaccccgtgatgatcgatgccaaggaagtgagcgccgcccaccgggccagatacttctggggcaatctgcctggcatgaacagacccctggccagcaccgtgaacgacaagctggagctgcaggagtgcctggagcacggccggatcgccaagttcagcaaggtgagaaccatcaccacccgaagcaacagcatcaaacaaggcaaggaccagcactttcctgtgttcatgaacgagaaggaggacatcctgtggtgtaccgagatggagagagtgttcgggttcccagtccactacacagatgtcagcaacatgtctagactggccagacagagactgctgggaagaagctggtccgtccctgtgatcagacacctgttcgcccctctgaaggagtacttcgcctgcgtgagcagcggcaacagcaacgccaacagccggggccccagcttctctagcggcctggtgccactgtccctgagagggagccacatgggccccatggagatctacaaaaccgtgagcgcctggaagcggcagcctgtgcgcgtgctgagcctgtttcggaatatcgataaagtcctgaaaagcctgggattcctggagagcggctctggctccggcggtggcaccctgaagtacgtggaggatgtgacaaacgtggtcagacgggatgtggagaagtggggccccttcgatctggtgtacggcagcacccaacccctgggcagctcttgtgaccggtgccctggctggtacatgtttcagttccaccggatcctgcagtacgccctgccgagacaggagtcccagcggccattcttttggattttcatggacaacttgctgctgaccgaggatgaccaggaaactaccactcggttcctgcagaccgaagccgtgaccctgcaggacgtgagaggccgggactaccagaacgccatgcgggtgtggtccaacatccctggactgaaaagcaagcacgcacctctgacccctaaagaagaggagtacctgcaggcccaggtgcggagcagaagcaagctggacgcccctaaggtggatctgctggtgaagaattgcctcctgcccctgagagagtacttcaagtatttcagccagaatagtctgcccctgggaggcagcggcggcggcccccaggagagcgtggccttcgaggacgtggccgtgtacttcaccaccaaggagtgggccatcatgatgcccgccgagagggccctgtacagggacgtgatgctggagaactacgaggccgtggccttcgtggtgccccccaccagcaagcccgccctggtgagccacctggagcagggcaaggagagctgcttcatccagccccagggcgtgctgagcaggagcgactggagggccggcctgggcggcccaagcagcggcgcccctcctcccagcggcggcagcccagccggctccccaacctctaccgaggagggcacctctgagtccgccacccccgagagcggccctggcacctccaccgagcccagcgagggcagcgcacccggcagccctgccggcagccccacctccacagaggagggaaccagcaccgagcccagcgaaggcagcgccccaggcaccagcaccgagcctagtgagcaggagattaaacggatcaacaagatcagaagaagacttgtgaaagacagcaacaccaagaaggccggcaagacaggccccatgaaaaccctgctggttagagtgatgacacccgatctgagagagcggctggaaaacctgagaaagaagcctgaaaatatcccccagcccatcagcaatacatctagagccaacctgaataagctgctgaccgattacaccgaaatgaagaaggcgatcctgcatgtgtactgggaagagttccagaaggaccctgtgggcctgatgagccgggtggcccagcctgccagcaagaagatcgatcagaacaagctgaaacctgagatggacgagaagggcaacctgaccaccgccggctttgcctgctctcagtgtggccagcccctgttcgtgtacaagctggagcaggtgtctgagaagggcaaggcttacaccaactacttcggacggtgcaatgtggccgagcacgaaaagctgatcctgctggcccagctgaagcccgagaaggatagcgacgaagccgtgacatatagcctgggaaagtttgggcagagggccctggatttctacagcattcatgtgaccaaggagtccacccaccccgtgaagcccctggcccagatcgccggaaacagatacgcctccggacctgtgggaaaggccctgagcgacgcatgtatgggcacaatcgcctccttcctgtctaagtaccaggacatcatcatcgaacaccagaaggtggtgaagggcaaccagaagagactggagagcctgcgggagctggccggcaaggaaaacctggaataccctagcgtgaccctgccacctcagcctcacaccaaggagggcgttgatgcctacaacgaagtgatcgcccgggtgcgaatgtgggtgaacctgaacctgtggcagaagctgaagctaagcagagatgatgccaagcctctgctgagactgaagggattcccttcctttcctctggtcgagagacaggccaacgaagtggactggtgggacatggtgtgtaacgtgaagaagctgatcaacgagaaaaaggaggatggcaaggtgttttggcagaatctggctggctacaagagacaggaagccctgagaccatacctgagcagcgaggaagatcggaagaagggaaagaaattcgctcggtaccagctgggcgacctgctgctgcacctggaaaagaagcacggcgaggactggggaaaggtgtacgacgaggcctgggagcggattgacaagaaagtggaaggcctgagcaagcacatcaagctggaagaggaacggagaagcgaggacgcccagagcaaggccgccctgaccgactggctgcgggctaaggccagcttcgtgatcgagggcctgaaggaggccgacaaggacgagttctgcagatgcgagctgaagctgcagaagtggtacggggacctgcggggaaagcccttcgccatcgaagccgagaacagcatcctggacatcagcggcttcagcaagcagtacaactgtgccttcatctggcagaaggacggcgtgaagaagctgaacctgtacctgatcatcaactacttcaagggcggcaagctgcggttcaagaagatcaaacctgaagccttcgaagccaacagattctacaccgtgatcaacaaaaagagcggcgagatcgtgcccatggaggtgaacttcaacttcgacgaccccaacctgatcatcctgcctctggcctttggcaagagacagggcagagaattcatctggaacgacctgctgtccctggaaaccggcagcctgaagctggccaacggaagagtgatcgagaagacactgtacaacagaagaacccggcaggatgagcctgccctgttcgtggccctgaccttcgagcggcgggaggtcctggactcctccaatatcaaaccaatgaacctgatcggcgtggcaagaggcgaaaacatccccgccgtgatcgccctgaccgaccccgagggctgcccactgagccggtttaaggatagcctgggaaacccaacccacatcctgagaatcggcgagagctataaggagaagcagcggaccatccaggccaagaaggaggtggagcagcggagagccggcggctacagccggaagtacgccagcaaagccaagaatctggcagacgatatggtgagaaacaccgctagagatctgctgtactacgccgtgacccaggatgccatgctgatcttcgccaacctgagccggggcttcggccggcagggcaagcggaccttcatggccgagagacagtacacacggatggaggactggctgaccgccaagctggcctacgagggcctgagcaagacctacctgtccaagacactggcccagtacacctccaagacatgcagcaactgtgggtttaccatcaccagcgccgactacgacagggtgctggagaagctgaagaagacagcaacaggctggatgaccacaattaacggcaaggagctgaaggtggagggccagattacctactacaacagatacaagagacagaacgtagtcaaggacctgtccgtcgagctggatagactgagcgaagaatctgtgaacaacgacatctcctcctggacaaagggcagaagcggagaagctctgagcctcctgaagaaaagattctcccatagacccgtgcaggagaagttcgtgtgcctgaactgcggcttcgagacacacgcagccgagcaagccgccctgaacatcgccagatcctggctgttcctgcggagccaggagtacaagaaataccagacaaacaagacaaccggcaacaccgataagagagccttcgtcgagacctggcagtccttttaccggaagaagcttaaggaggtgtggaaacctgccgtgcggtctggcggatctggcggaggctccaccagccccaagaaaaagagaaaagtctaagctgccttctgcggggcttgccttctggccatgcccttcttctctcccttgcacctgtacctcttggtctttgaataaagcctgagtaggaaggctagcaaaaaaaaaaaaaaaaaaaaaaaaaaaaaaaaaaaaaaaaaaaaaaaaaaaaaaaaaaaaaaaaaaaaaaaaaaaaaaaa

SEQ ID NO: 13229 - RNA, 5785 nt, synthetic construct
  source 1..5785: mol_type = other RNA
aggaaataagagagaaaagaagagtaagaagaaatataagagccaccatggcccctaagaagaagcgtaaagtgagccggatggaacgcctcgtctacgaggtgcggcagaagtgcagaaacatcgaggacatctgcatctcctgcggatctctgaacgtgaccctggagcacccactgttcatcggcggcatgtgccagaactgtaaaaactgttttctggagtgtgcctatcaatacgacgatgacggctaccagagctactgcaccatctgttgcggcggaagagaggtgctgatgtgtggaaataacaactgctgccggtgcttctgcgtggaatgcgtggacctgctggtgggccccggcgccgcccaggccgctattaaggaagatccttggaactgctacatgtgcggccacaagggcacatacggcctgctgagacggagagaggactggcctagcagactgcagatgttcttcgccaataaccacgaccaggagttcgacccccctaaggtgtaccctcccgtccccgccgagaagagaaagcccatccgggtcctgagcctgttcgatggcatcgccaccggtctgctggtgctgaaggacctgggcatccaggtggataggtacattgcctccgaggtgtgcgaggactccatcaccgtgggaatggtgcgtcatcagggcaagatcatgtacgtgggcgacgtgcggagcgtgacacagaagcatatccaggagtggggccctttcgacctggtgatcggcggcagcccttgcaatgacctgagcatcgtgaacccagcccggaagggcctgtacgagggaaccggcagactgttcttcgagttttacagactgctgcacgacgcccggcctaaggaaggcgacgaccggcccttcttttggctgttcgagaatgtggtggccatgggagtcagcgacaagcgggatattagccggttcctggagagcaaccccgtgatgatcgatgccaaggaagtgagcgccgcccaccgggccagatacttctggggcaatctgcctggcatgaacagacccctggccagcaccgtgaacgacaagctggagctgcaggagtgcctggagcacggccggatcgccaagttcagcaaggtgagaaccatcaccacccgaagcaacagcatcaaacaaggcaaggaccagcactttcctgtgttcatgaacgagaaggaggacatcctgtggtgtaccgagatggagagagtgttcgggttcccagtccactacacagatgtcagcaacatgtctagactggccagacagagactgctgggaagaagctggtccgtccctgtgatcagacacctgttcgcccctctgaaggagtacttcgcctgcgtgagcagcggcaacagcaacgccaacagccggggccccagcttctctagcggcctggtgccactgtccctgagagggagccacatgggccccatggagatctacaaaaccgtgagcgcctggaagcggcagcctgtgcgcgtgctgagcctgtttcggaatatcgataaagtcctgaaaagcctgggattcctggagagcggctctggctccggcggtggcaccctgaagtacgtggaggatgtgacaaacgtggtcagacgggatgtggagaagtggggccccttcgatctggtgtacggcagcacccaacccctgggcagctcttgtgaccggtgccctggctggtacatgtttcagttccaccggatcctgcagtacgccctgccgagacaggagtcccagcggccattcttttggattttcatggacaacttgctgctgaccgaggatgaccaggaaactaccactcggttcctgcagaccgaagccgtgaccctgcaggacgtgagaggccgggactaccagaacgccatgcgggtgtggtccaacatccctggactgaaaagcaagcacgcacctctgacccctaaagaagaggagtacctgcaggcccaggtgcggagcagaagcaagctggacgcccctaaggtggatctgctggtgaagaattgcctcctgcccctgagagagtacttcaagtatttcagccagaatagtctgcccctgggaggcagcggcggcggcacccaggacagcgtgaccttcaaggacgtggccgtggacttcaccagggaggagtgggagaggctgaacagcacccagagggacctgtacagggacgtgatgctggagaactacaggaacctggtgagcctgggcctggccgtgagcaagcccgacatcatcttccagctggagcaggagaaggagctgtggatgctgaagaggaaggtgctgaggagcaccaggcccgcccagaagaccgagggcggcccaagcagcggcgcccctcctcccagcggcggcagcccagccggctccccaacctctaccgaggagggcacctctgagtccgccacccccgagagcggccctggcacctccaccgagcccagcgagggcagcgcacccggcagccctgccggcagccccacctccacagaggagggaaccagcaccgagcccagcgaaggcagcgccccaggcaccagcaccgagcctagtgagcaggagattaaacggatcaacaagatcagaagaagacttgtgaaagacagcaacaccaagaaggccggcaagacaggccccatgaaaaccctgctggttagagtgatgacacccgatctgagagagcggctggaaaacctgagaaagaagcctgaaaatatcccccagcccatcagcaatacatctagagccaacctgaataagctgctgaccgattacaccgaaatgaagaaggcgatcctgcatgtgtactgggaagagttccagaaggaccctgtgggcctgatgagccgggtggcccagcctgccagcaagaagatcgatcagaacaagctgaaacctgagatggacgagaagggcaacctgaccaccgccggctttgcctgctctcagtgtggccagcccctgttcgtgtacaagctggagcaggtgtctgagaagggcaaggcttacaccaactacttcggacggtgcaatgtggccgagcacgaaaagctgatcctgctggcccagctgaagcccgagaaggatagcgacgaagccgtgacatatagcctgggaaagtttgggcagagggccctggatttctacagcattcatgtgaccaaggagtccacccaccccgtgaagcccctggcccagatcgccggaaacagatacgcctccggacctgtgggaaaggccctgagcgacgcatgtatgggcacaatcgcctccttcctgtctaagtaccaggacatcatcatcgaacaccagaaggtggtgaagggcaaccagaagagactggagagcctgcgggagctggccggcaaggaaaacctggaataccctagcgtgaccctgccacctcagcctcacaccaaggagggcgttgatgcctacaacgaagtgatcgcccgggtgcgaatgtgggtgaacctgaacctgtggcagaagctgaagctaagcagagatgatgccaagcctctgctgagactgaagggattcccttcctttcctctggtcgagagacaggccaacgaagtggactggtgggacatggtgtgtaacgtgaagaagctgatcaacgagaaaaaggaggatggcaaggtgttttggcagaatctggctggctacaagagacaggaagccctgagaccatacctgagcagcgaggaagatcggaagaagggaaagaaattcgctcggtaccagctgggcgacctgctgctgcacctggaaaagaagcacggcgaggactggggaaaggtgtacgacgaggcctgggagcggattgacaagaaagtggaaggcctgagcaagcacatcaagctggaagaggaacggagaagcgaggacgcccagagcaaggccgccctgaccgactggctgcgggctaaggccagcttcgtgatcgagggcctgaaggaggccgacaaggacgagttctgcagatgcgagctgaagctgcagaagtggtacggggacctgcggggaaagcccttcgccatcgaagccgagaacagcatcctggacatcagcggcttcagcaagcagtacaactgtgccttcatctggcagaaggacggcgtgaagaagctgaacctgtacctgatcatcaactacttcaagggcggcaagctgcggttcaagaagatcaaacctgaagccttcgaagccaacagattctacaccgtgatcaacaaaaagagcggcgagatcgtgcccatggaggtgaacttcaacttcgacgaccccaacctgatcatcctgcctctggcctttggcaagagacagggcagagaattcatctggaacgacctgctgtccctggaaaccggcagcctgaagctggccaacggaagagtgatcgagaagacactgtacaacagaagaacccggcaggatgagcctgccctgttcgtggccctgaccttcgagcggcgggaggtcctggactcctccaatatcaaaccaatgaacctgatcggcgtggcaagaggcgaaaacatccccgccgtgatcgccctgaccgaccccgagggctgcccactgagccggtttaaggatagcctgggaaacccaacccacatcctgagaatcggcgagagctataaggagaagcagcggaccatccaggccaagaaggaggtggagcagcggagagccggcggctacagccggaagtacgccagcaaagccaagaatctggcagacgatatggtgagaaacaccgctagagatctgctgtactacgccgtgacccaggatgccatgctgatcttcgccaacctgagccggggcttcggccggcagggcaagcggaccttcatggccgagagacagtacacacggatggaggactggctgaccgccaagctggcctacgagggcctgagcaagacctacctgtccaagacactggcccagtacacctccaagacatgcagcaactgtgggtttaccatcaccagcgccgactacgacagggtgctggagaagctgaagaagacagcaacaggctggatgaccacaattaacggcaaggagctgaaggtggagggccagattacctactacaacagatacaagagacagaacgtagtcaaggacctgtccgtcgagctggatagactgagcgaagaatctgtgaacaacgacatctcctcctggacaaagggcagaagcggagaagctctgagcctcctgaagaaaagattctcccatagacccgtgcaggagaagttcgtgtgcctgaactgcggcttcgagacacacgcagccgagcaagccgccctgaacatcgccagatcctggctgttcctgcggagccaggagtacaagaaataccagacaaacaagacaaccggcaacaccgataagagagccttcgtcgagacctggcagtccttttaccggaagaagcttaaggaggtgtggaaacctgccgtgcggtctggcggatctggcggaggctccaccagccccaagaaaaagagaaaagtctaagctgccttctgcggggcttgccttctggccatgcccttcttctctcccttgcacctgtacctcttggtctttgaataaagcctgagtaggaaggctagcaaaaaaaaaaaaaaaaaaaaaaaaaaaaaaaaaaaaaaaaaaaaaaaaaaaaaaaaaaaaaaaaaaaaaaaaaaaaaaaa

SEQ ID NO: 13230 - RNA, 5785 nt, synthetic construct
  source 1..5785: mol_type = other RNA
aggaaataagagagaaaagaagagtaagaagaaatataagagccaccatggcccctaagaagaagcgtaaagtgagccggatggaacgcctcgtctacgaggtgcggcagaagtgcagaaacatcgaggacatctgcatctcctgcggatctctgaacgtgaccctggagcacccactgttcatcggcggcatgtgccagaactgtaaaaactgttttctggagtgtgcctatcaatacgacgatgacggctaccagagctactgcaccatctgttgcggcggaagagaggtgctgatgtgtggaaataacaactgctgccggtgcttctgcgtggaatgcgtggacctgctggtgggccccggcgccgcccaggccgctattaaggaagatccttggaactgctacatgtgcggccacaagggcacatacggcctgctgagacggagagaggactggcctagcagactgcagatgttcttcgccaataaccacgaccaggagttcgacccccctaaggtgtaccctcccgtccccgccgagaagagaaagcccatccgggtcctgagcctgttcgatggcatcgccaccggtctgctggtgctgaaggacctgggcatccaggtggataggtacattgcctccgaggtgtgcgaggactccatcaccgtgggaatggtgcgtcatcagggcaagatcatgtacgtgggcgacgtgcggagcgtgacacagaagcatatccaggagtggggccctttcgacctggtgatcggcggcagcccttgcaatgacctgagcatcgtgaacccagcccggaagggcctgtacgagggaaccggcagactgttcttcgagttttacagactgctgcacgacgcccggcctaaggaaggcgacgaccggcccttcttttggctgttcgagaatgtggtggccatgggagtcagcgacaagcgggatattagccggttcctggagagcaaccccgtgatgatcgatgccaaggaagtgagcgccgcccaccgggccagatacttctggggcaatctgcctggcatgaacagacccctggccagcaccgtgaacgacaagctggagctgcaggagtgcctggagcacggccggatcgccaagttcagcaaggtgagaaccatcaccacccgaagcaacagcatcaaacaaggcaaggaccagcactttcctgtgttcatgaacgagaaggaggacatcctgtggtgtaccgagatggagagagtgttcgggttcccagtccactacacagatgtcagcaacatgtctagactggccagacagagactgctgggaagaagctggtccgtccctgtgatcagacacctgttcgcccctctgaaggagtacttcgcctgcgtgagcagcggcaacagcaacgccaacagccggggccccagcttctctagcggcctggtgccactgtccctgagagggagccacatgggccccatggagatctacaaaaccgtgagcgcctggaagcggcagcctgtgcgcgtgctgagcctgtttcggaatatcgataaagtcctgaaaagcctgggattcctggagagcggctctggctccggcggtggcaccctgaagtacgtggaggatgtgacaaacgtggtcagacgggatgtggagaagtggggccccttcgatctggtgtacggcagcacccaacccctgggcagctcttgtgaccggtgccctggctggtacatgtttcagttccaccggatcctgcagtacgccctgccgagacaggagtcccagcggccattcttttggattttcatggacaacttgctgctgaccgaggatgaccaggaaactaccactcggttcctgcagaccgaagccgtgaccctgcaggacgtgagaggccgggactaccagaacgccatgcgggtgtggtccaacatccctggactgaaaagcaagcacgcacctctgacccctaaagaagaggagtacctgcaggcccaggtgcggagcagaagcaagctggacgcccctaaggtggatctgctggtgaagaattgcctcctgcccctgagagagtacttcaagtatttcagccagaatagtctgcccctgggaggcagcggcggcggcaggcaggagcccgtgaccttcgaggacgtggccgtgtacttcacccagaacgagtgggtgatcctggaccccgcccagagggccctgtacagggaggtgatgctggagaactacgccaacgtggccagcctggccttcagcttcaccaggcccgtgctggtgagccagctggagaggggcgagctgccccccggcctggacccctgggagagggccagccccgaggccctgaggggcatctgcggcggcccaagcagcggcgcccctcctcccagcggcggcagcccagccggctccccaacctctaccgaggagggcacctctgagtccgccacccccgagagcggccctggcacctccaccgagcccagcgagggcagcgcacccggcagccctgccggcagccccacctccacagaggagggaaccagcaccgagcccagcgaaggcagcgccccaggcaccagcaccgagcctagtgagcaggagattaaacggatcaacaagatcagaagaagacttgtgaaagacagcaacaccaagaaggccggcaagacaggccccatgaaaaccctgctggttagagtgatgacacccgatctgagagagcggctggaaaacctgagaaagaagcctgaaaatatcccccagcccatcagcaatacatctagagccaacctgaataagctgctgaccgattacaccgaaatgaagaaggcgatcctgcatgtgtactgggaagagttccagaaggaccctgtgggcctgatgagccgggtggcccagcctgccagcaagaagatcgatcagaacaagctgaaacctgagatggacgagaagggcaacctgaccaccgccggctttgcctgctctcagtgtggccagcccctgttcgtgtacaagctggagcaggtgtctgagaagggcaaggcttacaccaactacttcggacggtgcaatgtggccgagcacgaaaagctgatcctgctggcccagctgaagcccgagaaggatagcgacgaagccgtgacatatagcctgggaaagtttgggcagagggccctggatttctacagcattcatgtgaccaaggagtccacccaccccgtgaagcccctggcccagatcgccggaaacagatacgcctccggacctgtgggaaaggccctgagcgacgcatgtatgggcacaatcgcctccttcctgtctaagtaccaggacatcatcatcgaacaccagaaggtggtgaagggcaaccagaagagactggagagcctgcgggagctggccggcaaggaaaacctggaataccctagcgtgaccctgccacctcagcctcacaccaaggagggcgttgatgcctacaacgaagtgatcgcccgggtgcgaatgtgggtgaacctgaacctgtggcagaagctgaagctaagcagagatgatgccaagcctctgctgagactgaagggattcccttcctttcctctggtcgagagacaggccaacgaagtggactggtgggacatggtgtgtaacgtgaagaagctgatcaacgagaaaaaggaggatggcaaggtgttttggcagaatctggctggctacaagagacaggaagccctgagaccatacctgagcagcgaggaagatcggaagaagggaaagaaattcgctcggtaccagctgggcgacctgctgctgcacctggaaaagaagcacggcgaggactggggaaaggtgtacgacgaggcctgggagcggattgacaagaaagtggaaggcctgagcaagcacatcaagctggaagaggaacggagaagcgaggacgcccagagcaaggccgccctgaccgactggctgcgggctaaggccagcttcgtgatcgagggcctgaaggaggccgacaaggacgagttctgcagatgcgagctgaagctgcagaagtggtacggggacctgcggggaaagcccttcgccatcgaagccgagaacagcatcctggacatcagcggcttcagcaagcagtacaactgtgccttcatctggcagaaggacggcgtgaagaagctgaacctgtacctgatcatcaactacttcaagggcggcaagctgcggttcaagaagatcaaacctgaagccttcgaagccaacagattctacaccgtgatcaacaaaaagagcggcgagatcgtgcccatggaggtgaacttcaacttcgacgaccccaacctgatcatcctgcctctggcctttggcaagagacagggcagagaattcatctggaacgacctgctgtccctggaaaccggcagcctgaagctggccaacggaagagtgatcgagaagacactgtacaacagaagaacccggcaggatgagcctgccctgttcgtggccctgaccttcgagcggcgggaggtcctggactcctccaatatcaaaccaatgaacctgatcggcgtggcaagaggcgaaaacatccccgccgtgatcgccctgaccgaccccgagggctgcccactgagccggtttaaggatagcctgggaaacccaacccacatcctgagaatcggcgagagctataaggagaagcagcggaccatccaggccaagaaggaggtggagcagcggagagccggcggctacagccggaagtacgccagcaaagccaagaatctggcagacgatatggtgagaaacaccgctagagatctgctgtactacgccgtgacccaggatgccatgctgatcttcgccaacctgagccggggcttcggccggcagggcaagcggaccttcatggccgagagacagtacacacggatggaggactggctgaccgccaagctggcctacgagggcctgagcaagacctacctgtccaagacactggcccagtacacctccaagacatgcagcaactgtgggtttaccatcaccagcgccgactacgacagggtgctggagaagctgaagaagacagcaacaggctggatgaccacaattaacggcaaggagctgaaggtggagggccagattacctactacaacagatacaagagacagaacgtagtcaaggacctgtccgtcgagctggatagactgagcgaagaatctgtgaacaacgacatctcctcctggacaaagggcagaagcggagaagctctgagcctcctgaagaaaagattctcccatagacccgtgcaggagaagttcgtgtgcctgaactgcggcttcgagacacacgcagccgagcaagccgccctgaacatcgccagatcctggctgttcctgcggagccaggagtacaagaaataccagacaaacaagacaaccggcaacaccgataagagagccttcgtcgagacctggcagtccttttaccggaagaagcttaaggaggtgtggaaacctgccgtgcggtctggcggatctggcggaggctccaccagccccaagaaaaagagaaaagtctaagctgccttctgcggggcttgccttctggccatgcccttcttctctcccttgcacctgtacctcttggtctttgaataaagcctgagtaggaaggctagcaaaaaaaaaaaaaaaaaaaaaaaaaaaaaaaaaaaaaaaaaaaaaaaaaaaaaaaaaaaaaaaaaaaaaaaaaaaaaaaa

SEQ ID NO: 13231 - RNA, 5785 nt, synthetic construct
  source 1..5785: mol_type = other RNA
aggaaataagagagaaaagaagagtaagaagaaatataagagccaccatggcccctaagaagaagcgtaaagtgagccggatggaacgcctcgtctacgaggtgcggcagaagtgcagaaacatcgaggacatctgcatctcctgcggatctctgaacgtgaccctggagcacccactgttcatcggcggcatgtgccagaactgtaaaaactgttttctggagtgtgcctatcaatacgacgatgacggctaccagagctactgcaccatctgttgcggcggaagagaggtgctgatgtgtggaaataacaactgctgccggtgcttctgcgtggaatgcgtggacctgctggtgggccccggcgccgcccaggccgctattaaggaagatccttggaactgctacatgtgcggccacaagggcacatacggcctgctgagacggagagaggactggcctagcagactgcagatgttcttcgccaataaccacgaccaggagttcgacccccctaaggtgtaccctcccgtccccgccgagaagagaaagcccatccgggtcctgagcctgttcgatggcatcgccaccggtctgctggtgctgaaggacctgggcatccaggtggataggtacattgcctccgaggtgtgcgaggactccatcaccgtgggaatggtgcgtcatcagggcaagatcatgtacgtgggcgacgtgcggagcgtgacacagaagcatatccaggagtggggccctttcgacctggtgatcggcggcagcccttgcaatgacctgagcatcgtgaacccagcccggaagggcctgtacgagggaaccggcagactgttcttcgagttttacagactgctgcacgacgcccggcctaaggaaggcgacgaccggcccttcttttggctgttcgagaatgtggtggccatgggagtcagcgacaagcgggatattagccggttcctggagagcaaccccgtgatgatcgatgccaaggaagtgagcgccgcccaccgggccagatacttctggggcaatctgcctggcatgaacagacccctggccagcaccgtgaacgacaagctggagctgcaggagtgcctggagcacggccggatcgccaagttcagcaaggtgagaaccatcaccacccgaagcaacagcatcaaacaaggcaaggaccagcactttcctgtgttcatgaacgagaaggaggacatcctgtggtgtaccgagatggagagagtgttcgggttcccagtccactacacagatgtcagcaacatgtctagactggccagacagagactgctgggaagaagctggtccgtccctgtgatcagacacctgttcgcccctctgaaggagtacttcgcctgcgtgagcagcggcaacagcaacgccaacagccggggccccagcttctctagcggcctggtgccactgtccctgagagggagccacatgggccccatggagatctacaaaaccgtgagcgcctggaagcggcagcctgtgcgcgtgctgagcctgtttcggaatatcgataaagtcctgaaaagcctgggattcctggagagcggctctggctccggcggtggcaccctgaagtacgtggaggatgtgacaaacgtggtcagacgggatgtggagaagtggggccccttcgatctggtgtacggcagcacccaacccctgggcagctcttgtgaccggtgccctggctggtacatgtttcagttccaccggatcctgcagtacgccctgccgagacaggagtcccagcggccattcttttggattttcatggacaacttgctgctgaccgaggatgaccaggaaactaccactcggttcctgcagaccgaagccgtgaccctgcaggacgtgagaggccgggactaccagaacgccatgcgggtgtggtccaacatccctggactgaaaagcaagcacgcacctctgacccctaaagaagaggagtacctgcaggcccaggtgcggagcagaagcaagctggacgcccctaaggtggatctgctggtgaagaattgcctcctgcccctgagagagtacttcaagtatttcagccagaatagtctgcccctgggaggcagcggcggcggcaagcccgagctggtgagcttcgccgacgtggccgtgtacttcagcccccaggagtggggctgcctgaggcccgcccagagggccctgtacagggaggtgatgagggagacctacggcctgctgggcgccctgggcttccccggccccaagcccgccctgatcagctggatggagcaggagagcgaggcctggagccccgccgcccaggaccccgaggagggcgagagcctgggcggcgcccccggcggcccaagcagcggcgcccctcctcccagcggcggcagcccagccggctccccaacctctaccgaggagggcacctctgagtccgccacccccgagagcggccctggcacctccaccgagcccagcgagggcagcgcacccggcagccctgccggcagccccacctccacagaggagggaaccagcaccgagcccagcgaaggcagcgccccaggcaccagcaccgagcctagtgagcaggagattaaacggatcaacaagatcagaagaagacttgtgaaagacagcaacaccaagaaggccggcaagacaggccccatgaaaaccctgctggttagagtgatgacacccgatctgagagagcggctggaaaacctgagaaagaagcctgaaaatatcccccagcccatcagcaatacatctagagccaacctgaataagctgctgaccgattacaccgaaatgaagaaggcgatcctgcatgtgtactgggaagagttccagaaggaccctgtgggcctgatgagccgggtggcccagcctgccagcaagaagatcgatcagaacaagctgaaacctgagatggacgagaagggcaacctgaccaccgccggctttgcctgctctcagtgtggccagcccctgttcgtgtacaagctggagcaggtgtctgagaagggcaaggcttacaccaactacttcggacggtgcaatgtggccgagcacgaaaagctgatcctgctggcccagctgaagcccgagaaggatagcgacgaagccgtgacatatagcctgggaaagtttgggcagagggccctggatttctacagcattcatgtgaccaaggagtccacccaccccgtgaagcccctggcccagatcgccggaaacagatacgcctccggacctgtgggaaaggccctgagcgacgcatgtatgggcacaatcgcctccttcctgtctaagtaccaggacatcatcatcgaacaccagaaggtggtgaagggcaaccagaagagactggagagcctgcgggagctggccggcaaggaaaacctggaataccctagcgtgaccctgccacctcagcctcacaccaaggagggcgttgatgcctacaacgaagtgatcgcccgggtgcgaatgtgggtgaacctgaacctgtggcagaagctgaagctaagcagagatgatgccaagcctctgctgagactgaagggattcccttcctttcctctggtcgagagacaggccaacgaagtggactggtgggacatggtgtgtaacgtgaagaagctgatcaacgagaaaaaggaggatggcaaggtgttttggcagaatctggctggctacaagagacaggaagccctgagaccatacctgagcagcgaggaagatcggaagaagggaaagaaattcgctcggtaccagctgggcgacctgctgctgcacctggaaaagaagcacggcgaggactggggaaaggtgtacgacgaggcctgggagcggattgacaagaaagtggaaggcctgagcaagcacatcaagctggaagaggaacggagaagcgaggacgcccagagcaaggccgccctgaccgactggctgcgggctaaggccagcttcgtgatcgagggcctgaaggaggccgacaaggacgagttctgcagatgcgagctgaagctgcagaagtggtacggggacctgcggggaaagcccttcgccatcgaagccgagaacagcatcctggacatcagcggcttcagcaagcagtacaactgtgccttcatctggcagaaggacggcgtgaagaagctgaacctgtacctgatcatcaactacttcaagggcggcaagctgcggttcaagaagatcaaacctgaagccttcgaagccaacagattctacaccgtgatcaacaaaaagagcggcgagatcgtgcccatggaggtgaacttcaacttcgacgaccccaacctgatcatcctgcctctggcctttggcaagagacagggcagagaattcatctggaacgacctgctgtccctggaaaccggcagcctgaagctggccaacggaagagtgatcgagaagacactgtacaacagaagaacccggcaggatgagcctgccctgttcgtggccctgaccttcgagcggcgggaggtcctggactcctccaatatcaaaccaatgaacctgatcggcgtggcaagaggcgaaaacatccccgccgtgatcgccctgaccgaccccgagggctgcccactgagccggtttaaggatagcctgggaaacccaacccacatcctgagaatcggcgagagctataaggagaagcagcggaccatccaggccaagaaggaggtggagcagcggagagccggcggctacagccggaagtacgccagcaaagccaagaatctggcagacgatatggtgagaaacaccgctagagatctgctgtactacgccgtgacccaggatgccatgctgatcttcgccaacctgagccggggcttcggccggcagggcaagcggaccttcatggccgagagacagtacacacggatggaggactggctgaccgccaagctggcctacgagggcctgagcaagacctacctgtccaagacactggcccagtacacctccaagacatgcagcaactgtgggtttaccatcaccagcgccgactacgacagggtgctggagaagctgaagaagacagcaacaggctggatgaccacaattaacggcaaggagctgaaggtggagggccagattacctactacaacagatacaagagacagaacgtagtcaaggacctgtccgtcgagctggatagactgagcgaagaatctgtgaacaacgacatctcctcctggacaaagggcagaagcggagaagctctgagcctcctgaagaaaagattctcccatagacccgtgcaggagaagttcgtgtgcctgaactgcggcttcgagacacacgcagccgagcaagccgccctgaacatcgccagatcctggctgttcctgcggagccaggagtacaagaaataccagacaaacaagacaaccggcaacaccgataagagagccttcgtcgagacctggcagtccttttaccggaagaagcttaaggaggtgtggaaacctgccgtgcggtctggcggatctggcggaggctccaccagccccaagaaaaagagaaaagtctaagctgccttctgcggggcttgccttctggccatgcccttcttctctcccttgcacctgtacctcttggtctttgaataaagcctgagtaggaaggctagcaaaaaaaaaaaaaaaaaaaaaaaaaaaaaaaaaaaaaaaaaaaaaaaaaaaaaaaaaaaaaaaaaaaaaaaaaaaaaaaa

SEQ ID NO: 13232 - RNA, 5785 nt, synthetic construct
  source 1..5785: mol_type = other RNA
aggaaataagagagaaaagaagagtaagaagaaatataagagccaccatggcccctaagaagaagcgtaaagtgagccggatggaacgcctcgtctacgaggtgcggcagaagtgcagaaacatcgaggacatctgcatctcctgcggatctctgaacgtgaccctggagcacccactgttcatcggcggcatgtgccagaactgtaaaaactgttttctggagtgtgcctatcaatacgacgatgacggctaccagagctactgcaccatctgttgcggcggaagagaggtgctgatgtgtggaaataacaactgctgccggtgcttctgcgtggaatgcgtggacctgctggtgggccccggcgccgcccaggccgctattaaggaagatccttggaactgctacatgtgcggccacaagggcacatacggcctgctgagacggagagaggactggcctagcagactgcagatgttcttcgccaataaccacgaccaggagttcgacccccctaaggtgtaccctcccgtccccgccgagaagagaaagcccatccgggtcctgagcctgttcgatggcatcgccaccggtctgctggtgctgaaggacctgggcatccaggtggataggtacattgcctccgaggtgtgcgaggactccatcaccgtgggaatggtgcgtcatcagggcaagatcatgtacgtgggcgacgtgcggagcgtgacacagaagcatatccaggagtggggccctttcgacctggtgatcggcggcagcccttgcaatgacctgagcatcgtgaacccagcccggaagggcctgtacgagggaaccggcagactgttcttcgagttttacagactgctgcacgacgcccggcctaaggaaggcgacgaccggcccttcttttggctgttcgagaatgtggtggccatgggagtcagcgacaagcgggatattagccggttcctggagagcaaccccgtgatgatcgatgccaaggaagtgagcgccgcccaccgggccagatacttctggggcaatctgcctggcatgaacagacccctggccagcaccgtgaacgacaagctggagctgcaggagtgcctggagcacggccggatcgccaagttcagcaaggtgagaaccatcaccacccgaagcaacagcatcaaacaaggcaaggaccagcactttcctgtgttcatgaacgagaaggaggacatcctgtggtgtaccgagatggagagagtgttcgggttcccagtccactacacagatgtcagcaacatgtctagactggccagacagagactgctgggaagaagctggtccgtccctgtgatcagacacctgttcgcccctctgaaggagtacttcgcctgcgtgagcagcggcaacagcaacgccaacagccggggccccagcttctctagcggcctggtgccactgtccctgagagggagccacatgggccccatggagatctacaaaaccgtgagcgcctggaagcggcagcctgtgcgcgtgctgagcctgtttcggaatatcgataaagtcctgaaaagcctgggattcctggagagcggctctggctccggcggtggcaccctgaagtacgtggaggatgtgacaaacgtggtcagacgggatgtggagaagtggggccccttcgatctggtgtacggcagcacccaacccctgggcagctcttgtgaccggtgccctggctggtacatgtttcagttccaccggatcctgcagtacgccctgccgagacaggagtcccagcggccattcttttggattttcatggacaacttgctgctgaccgaggatgaccaggaaactaccactcggttcctgcagaccgaagccgtgaccctgcaggacgtgagaggccgggactaccagaacgccatgcgggtgtggtccaacatccctggactgaaaagcaagcacgcacctctgacccctaaagaagaggagtacctgcaggcccaggtgcggagcagaagcaagctggacgcccctaaggtggatctgctggtgaagaattgcctcctgcccctgagagagtacttcaagtatttcagccagaatagtctgcccctgggaggcagcggcggcggcatccagggccaggtgaacttcgaggacgtgttcgtgtacttcagccaggaggagtgggtgctgctggacgaggcccagaggctgctgtacagggacgtgatgctggagaacttcgccctgatggccagcctgggccacaccagcttcaccagccacaccgtggccagcctggtgatgggccccgactgggtggacgtgacccccgccgtggccaccggcaccctgagcggcagcggccccggcggcggcccaagcagcggcgcccctcctcccagcggcggcagcccagccggctccccaacctctaccgaggagggcacctctgagtccgccacccccgagagcggccctggcacctccaccgagcccagcgagggcagcgcacccggcagccctgccggcagccccacctccacagaggagggaaccagcaccgagcccagcgaaggcagcgccccaggcaccagcaccgagcctagtgagcaggagattaaacggatcaacaagatcagaagaagacttgtgaaagacagcaacaccaagaaggccggcaagacaggccccatgaaaaccctgctggttagagtgatgacacccgatctgagagagcggctggaaaacctgagaaagaagcctgaaaatatcccccagcccatcagcaatacatctagagccaacctgaataagctgctgaccgattacaccgaaatgaagaaggcgatcctgcatgtgtactgggaagagttccagaaggaccctgtgggcctgatgagccgggtggcccagcctgccagcaagaagatcgatcagaacaagctgaaacctgagatggacgagaagggcaacctgaccaccgccggctttgcctgctctcagtgtggccagcccctgttcgtgtacaagctggagcaggtgtctgagaagggcaaggcttacaccaactacttcggacggtgcaatgtggccgagcacgaaaagctgatcctgctggcccagctgaagcccgagaaggatagcgacgaagccgtgacatatagcctgggaaagtttgggcagagggccctggatttctacagcattcatgtgaccaaggagtccacccaccccgtgaagcccctggcccagatcgccggaaacagatacgcctccggacctgtgggaaaggccctgagcgacgcatgtatgggcacaatcgcctccttcctgtctaagtaccaggacatcatcatcgaacaccagaaggtggtgaagggcaaccagaagagactggagagcctgcgggagctggccggcaaggaaaacctggaataccctagcgtgaccctgccacctcagcctcacaccaaggagggcgttgatgcctacaacgaagtgatcgcccgggtgcgaatgtgggtgaacctgaacctgtggcagaagctgaagctaagcagagatgatgccaagcctctgctgagactgaagggattcccttcctttcctctggtcgagagacaggccaacgaagtggactggtgggacatggtgtgtaacgtgaagaagctgatcaacgagaaaaaggaggatggcaaggtgttttggcagaatctggctggctacaagagacaggaagccctgagaccatacctgagcagcgaggaagatcggaagaagggaaagaaattcgctcggtaccagctgggcgacctgctgctgcacctggaaaagaagcacggcgaggactggggaaaggtgtacgacgaggcctgggagcggattgacaagaaagtggaaggcctgagcaagcacatcaagctggaagaggaacggagaagcgaggacgcccagagcaaggccgccctgaccgactggctgcgggctaaggccagcttcgtgatcgagggcctgaaggaggccgacaaggacgagttctgcagatgcgagctgaagctgcagaagtggtacggggacctgcggggaaagcccttcgccatcgaagccgagaacagcatcctggacatcagcggcttcagcaagcagtacaactgtgccttcatctggcagaaggacggcgtgaagaagctgaacctgtacctgatcatcaactacttcaagggcggcaagctgcggttcaagaagatcaaacctgaagccttcgaagccaacagattctacaccgtgatcaacaaaaagagcggcgagatcgtgcccatggaggtgaacttcaacttcgacgaccccaacctgatcatcctgcctctggcctttggcaagagacagggcagagaattcatctggaacgacctgctgtccctggaaaccggcagcctgaagctggccaacggaagagtgatcgagaagacactgtacaacagaagaacccggcaggatgagcctgccctgttcgtggccctgaccttcgagcggcgggaggtcctggactcctccaatatcaaaccaatgaacctgatcggcgtggcaagaggcgaaaacatccccgccgtgatcgccctgaccgaccccgagggctgcccactgagccggtttaaggatagcctgggaaacccaacccacatcctgagaatcggcgagagctataaggagaagcagcggaccatccaggccaagaaggaggtggagcagcggagagccggcggctacagccggaagtacgccagcaaagccaagaatctggcagacgatatggtgagaaacaccgctagagatctgctgtactacgccgtgacccaggatgccatgctgatcttcgccaacctgagccggggcttcggccggcagggcaagcggaccttcatggccgagagacagtacacacggatggaggactggctgaccgccaagctggcctacgagggcctgagcaagacctacctgtccaagacactggcccagtacacctccaagacatgcagcaactgtgggtttaccatcaccagcgccgactacgacagggtgctggagaagctgaagaagacagcaacaggctggatgaccacaattaacggcaaggagctgaaggtggagggccagattacctactacaacagatacaagagacagaacgtagtcaaggacctgtccgtcgagctggatagactgagcgaagaatctgtgaacaacgacatctcctcctggacaaagggcagaagcggagaagctctgagcctcctgaagaaaagattctcccatagacccgtgcaggagaagttcgtgtgcctgaactgcggcttcgagacacacgcagccgagcaagccgccctgaacatcgccagatcctggctgttcctgcggagccaggagtacaagaaataccagacaaacaagacaaccggcaacaccgataagagagccttcgtcgagacctggcagtccttttaccggaagaagcttaaggaggtgtggaaacctgccgtgcggtctggcggatctggcggaggctccaccagccccaagaaaaagagaaaagtctaagctgccttctgcggggcttgccttctggccatgcccttcttctctcccttgcacctgtacctcttggtctttgaataaagcctgagtaggaaggctagcaaaaaaaaaaaaaaaaaaaaaaaaaaaaaaaaaaaaaaaaaaaaaaaaaaaaaaaaaaaaaaaaaaaaaaaaaaaaaaaa

SEQ ID NO: 13233 - RNA, 5785 nt, synthetic construct
  source 1..5785: mol_type = other RNA
aggaaataagagagaaaagaagagtaagaagaaatataagagccaccatggcccctaagaagaagcgtaaagtgagccggatggaacgcctcgtctacgaggtgcggcagaagtgcagaaacatcgaggacatctgcatctcctgcggatctctgaacgtgaccctggagcacccactgttcatcggcggcatgtgccagaactgtaaaaactgttttctggagtgtgcctatcaatacgacgatgacggctaccagagctactgcaccatctgttgcggcggaagagaggtgctgatgtgtggaaataacaactgctgccggtgcttctgcgtggaatgcgtggacctgctggtgggccccggcgccgcccaggccgctattaaggaagatccttggaactgctacatgtgcggccacaagggcacatacggcctgctgagacggagagaggactggcctagcagactgcagatgttcttcgccaataaccacgaccaggagttcgacccccctaaggtgtaccctcccgtccccgccgagaagagaaagcccatccgggtcctgagcctgttcgatggcatcgccaccggtctgctggtgctgaaggacctgggcatccaggtggataggtacattgcctccgaggtgtgcgaggactccatcaccgtgggaatggtgcgtcatcagggcaagatcatgtacgtgggcgacgtgcggagcgtgacacagaagcatatccaggagtggggccctttcgacctggtgatcggcggcagcccttgcaatgacctgagcatcgtgaacccagcccggaagggcctgtacgagggaaccggcagactgttcttcgagttttacagactgctgcacgacgcccggcctaaggaaggcgacgaccggcccttcttttggctgttcgagaatgtggtggccatgggagtcagcgacaagcgggatattagccggttcctggagagcaaccccgtgatgatcgatgccaaggaagtgagcgccgcccaccgggccagatacttctggggcaatctgcctggcatgaacagacccctggccagcaccgtgaacgacaagctggagctgcaggagtgcctggagcacggccggatcgccaagttcagcaaggtgagaaccatcaccacccgaagcaacagcatcaaacaaggcaaggaccagcactttcctgtgttcatgaacgagaaggaggacatcctgtggtgtaccgagatggagagagtgttcgggttcccagtccactacacagatgtcagcaacatgtctagactggccagacagagactgctgggaagaagctggtccgtccctgtgatcagacacctgttcgcccctctgaaggagtacttcgcctgcgtgagcagcggcaacagcaacgccaacagccggggccccagcttctctagcggcctggtgccactgtccctgagagggagccacatgggccccatggagatctacaaaaccgtgagcgcctggaagcggcagcctgtgcgcgtgctgagcctgtttcggaatatcgataaagtcctgaaaagcctgggattcctggagagcggctctggctccggcggtggcaccctgaagtacgtggaggatgtgacaaacgtggtcagacgggatgtggagaagtggggccccttcgatctggtgtacggcagcacccaacccctgggcagctcttgtgaccggtgccctggctggtacatgtttcagttccaccggatcctgcagtacgccctgccgagacaggagtcccagcggccattcttttggattttcatggacaacttgctgctgaccgaggatgaccaggaaactaccactcggttcctgcagaccgaagccgtgaccctgcaggacgtgagaggccgggactaccagaacgccatgcgggtgtggtccaacatccctggactgaaaagcaagcacgcacctctgacccctaaagaagaggagtacctgcaggcccaggtgcggagcagaagcaagctggacgcccctaaggtggatctgctggtgaagaattgcctcctgcccctgagagagtacttcaagtatttcagccagaatagtctgcccctgggaggcagcggcggcggcgaggccctgcccgtggtgttcgaggacgtggccgtgtacttcaccagggaggagtggggcatgctggacaagaggcagaaggagctgtacagggacgtgatgaggatgaactacgagctgctggccagcctgggccccgccgccgccaagcccgacctgatcagcaagctggagaggaggaccgccccctggatcaaggaccccaacggccccaagctgggcaagggctgcccccccggcaagggcggcccaagcagcggcgcccctcctcccagcggcggcagcccagccggctccccaacctctaccgaggagggcacctctgagtccgccacccccgagagcggccctggcacctccaccgagcccagcgagggcagcgcacccggcagccctgccggcagccccacctccacagaggagggaaccagcaccgagcccagcgaaggcagcgccccaggcaccagcaccgagcctagtgagcaggagattaaacggatcaacaagatcagaagaagacttgtgaaagacagcaacaccaagaaggccggcaagacaggccccatgaaaaccctgctggttagagtgatgacacccgatctgagagagcggctggaaaacctgagaaagaagcctgaaaatatcccccagcccatcagcaatacatctagagccaacctgaataagctgctgaccgattacaccgaaatgaagaaggcgatcctgcatgtgtactgggaagagttccagaaggaccctgtgggcctgatgagccgggtggcccagcctgccagcaagaagatcgatcagaacaagctgaaacctgagatggacgagaagggcaacctgaccaccgccggctttgcctgctctcagtgtggccagcccctgttcgtgtacaagctggagcaggtgtctgagaagggcaaggcttacaccaactacttcggacggtgcaatgtggccgagcacgaaaagctgatcctgctggcccagctgaagcccgagaaggatagcgacgaagccgtgacatatagcctgggaaagtttgggcagagggccctggatttctacagcattcatgtgaccaaggagtccacccaccccgtgaagcccctggcccagatcgccggaaacagatacgcctccggacctgtgggaaaggccctgagcgacgcatgtatgggcacaatcgcctccttcctgtctaagtaccaggacatcatcatcgaacaccagaaggtggtgaagggcaaccagaagagactggagagcctgcgggagctggccggcaaggaaaacctggaataccctagcgtgaccctgccacctcagcctcacaccaaggagggcgttgatgcctacaacgaagtgatcgcccgggtgcgaatgtgggtgaacctgaacctgtggcagaagctgaagctaagcagagatgatgccaagcctctgctgagactgaagggattcccttcctttcctctggtcgagagacaggccaacgaagtggactggtgggacatggtgtgtaacgtgaagaagctgatcaacgagaaaaaggaggatggcaaggtgttttggcagaatctggctggctacaagagacaggaagccctgagaccatacctgagcagcgaggaagatcggaagaagggaaagaaattcgctcggtaccagctgggcgacctgctgctgcacctggaaaagaagcacggcgaggactggggaaaggtgtacgacgaggcctgggagcggattgacaagaaagtggaaggcctgagcaagcacatcaagctggaagaggaacggagaagcgaggacgcccagagcaaggccgccctgaccgactggctgcgggctaaggccagcttcgtgatcgagggcctgaaggaggccgacaaggacgagttctgcagatgcgagctgaagctgcagaagtggtacggggacctgcggggaaagcccttcgccatcgaagccgagaacagcatcctggacatcagcggcttcagcaagcagtacaactgtgccttcatctggcagaaggacggcgtgaagaagctgaacctgtacctgatcatcaactacttcaagggcggcaagctgcggttcaagaagatcaaacctgaagccttcgaagccaacagattctacaccgtgatcaacaaaaagagcggcgagatcgtgcccatggaggtgaacttcaacttcgacgaccccaacctgatcatcctgcctctggcctttggcaagagacagggcagagaattcatctggaacgacctgctgtccctggaaaccggcagcctgaagctggccaacggaagagtgatcgagaagacactgtacaacagaagaacccggcaggatgagcctgccctgttcgtggccctgaccttcgagcggcgggaggtcctggactcctccaatatcaaaccaatgaacctgatcggcgtggcaagaggcgaaaacatccccgccgtgatcgccctgaccgaccccgagggctgcccactgagccggtttaaggatagcctgggaaacccaacccacatcctgagaatcggcgagagctataaggagaagcagcggaccatccaggccaagaaggaggtggagcagcggagagccggcggctacagccggaagtacgccagcaaagccaagaatctggcagacgatatggtgagaaacaccgctagagatctgctgtactacgccgtgacccaggatgccatgctgatcttcgccaacctgagccggggcttcggccggcagggcaagcggaccttcatggccgagagacagtacacacggatggaggactggctgaccgccaagctggcctacgagggcctgagcaagacctacctgtccaagacactggcccagtacacctccaagacatgcagcaactgtgggtttaccatcaccagcgccgactacgacagggtgctggagaagctgaagaagacagcaacaggctggatgaccacaattaacggcaaggagctgaaggtggagggccagattacctactacaacagatacaagagacagaacgtagtcaaggacctgtccgtcgagctggatagactgagcgaagaatctgtgaacaacgacatctcctcctggacaaagggcagaagcggagaagctctgagcctcctgaagaaaagattctcccatagacccgtgcaggagaagttcgtgtgcctgaactgcggcttcgagacacacgcagccgagcaagccgccctgaacatcgccagatcctggctgttcctgcggagccaggagtacaagaaataccagacaaacaagacaaccggcaacaccgataagagagccttcgtcgagacctggcagtccttttaccggaagaagcttaaggaggtgtggaaacctgccgtgcggtctggcggatctggcggaggctccaccagccccaagaaaaagagaaaagtctaagctgccttctgcggggcttgccttctggccatgcccttcttctctcccttgcacctgtacctcttggtctttgaataaagcctgagtaggaaggctagcaaaaaaaaaaaaaaaaaaaaaaaaaaaaaaaaaaaaaaaaaaaaaaaaaaaaaaaaaaaaaaaaaaaaaaaaaaaaaaaa

SEQ ID NO: 13234 - RNA, 5785 nt, synthetic construct
  source 1..5785: mol_type = other RNA
aggaaataagagagaaaagaagagtaagaagaaatataagagccaccatggcccctaagaagaagcgtaaagtgagccggatggaacgcctcgtctacgaggtgcggcagaagtgcagaaacatcgaggacatctgcatctcctgcggatctctgaacgtgaccctggagcacccactgttcatcggcggcatgtgccagaactgtaaaaactgttttctggagtgtgcctatcaatacgacgatgacggctaccagagctactgcaccatctgttgcggcggaagagaggtgctgatgtgtggaaataacaactgctgccggtgcttctgcgtggaatgcgtggacctgctggtgggccccggcgccgcccaggccgctattaaggaagatccttggaactgctacatgtgcggccacaagggcacatacggcctgctgagacggagagaggactggcctagcagactgcagatgttcttcgccaataaccacgaccaggagttcgacccccctaaggtgtaccctcccgtccccgccgagaagagaaagcccatccgggtcctgagcctgttcgatggcatcgccaccggtctgctggtgctgaaggacctgggcatccaggtggataggtacattgcctccgaggtgtgcgaggactccatcaccgtgggaatggtgcgtcatcagggcaagatcatgtacgtgggcgacgtgcggagcgtgacacagaagcatatccaggagtggggccctttcgacctggtgatcggcggcagcccttgcaatgacctgagcatcgtgaacccagcccggaagggcctgtacgagggaaccggcagactgttcttcgagttttacagactgctgcacgacgcccggcctaaggaaggcgacgaccggcccttcttttggctgttcgagaatgtggtggccatgggagtcagcgacaagcgggatattagccggttcctggagagcaaccccgtgatgatcgatgccaaggaagtgagcgccgcccaccgggccagatacttctggggcaatctgcctggcatgaacagacccctggccagcaccgtgaacgacaagctggagctgcaggagtgcctggagcacggccggatcgccaagttcagcaaggtgagaaccatcaccacccgaagcaacagcatcaaacaaggcaaggaccagcactttcctgtgttcatgaacgagaaggaggacatcctgtggtgtaccgagatggagagagtgttcgggttcccagtccactacacagatgtcagcaacatgtctagactggccagacagagactgctgggaagaagctggtccgtccctgtgatcagacacctgttcgcccctctgaaggagtacttcgcctgcgtgagcagcggcaacagcaacgccaacagccggggccccagcttctctagcggcctggtgccactgtccctgagagggagccacatgggccccatggagatctacaaaaccgtgagcgcctggaagcggcagcctgtgcgcgtgctgagcctgtttcggaatatcgataaagtcctgaaaagcctgggattcctggagagcggctctggctccggcggtggcaccctgaagtacgtggaggatgtgacaaacgtggtcagacgggatgtggagaagtggggccccttcgatctggtgtacggcagcacccaacccctgggcagctcttgtgaccggtgccctggctggtacatgtttcagttccaccggatcctgcagtacgccctgccgagacaggagtcccagcggccattcttttggattttcatggacaacttgctgctgaccgaggatgaccaggaaactaccactcggttcctgcagaccgaagccgtgaccctgcaggacgtgagaggccgggactaccagaacgccatgcgggtgtggtccaacatccctggactgaaaagcaagcacgcacctctgacccctaaagaagaggagtacctgcaggcccaggtgcggagcagaagcaagctggacgcccctaaggtggatctgctggtgaagaattgcctcctgcccctgagagagtacttcaagtatttcagccagaatagtctgcccctgggaggcagcggcggcggcaagcaggtgagcatcagcttcgaggacgtgaccgtggacttcagcagggaggagtggcagcacctggaccccgcccagaggtgcctgtacagggacgtgaccctggagaactacagccacctgctgagcgtgggctaccaggtgcccaagcccgagatcatcttccagctggagcagggcgagggcccctggatgctggagagggagaccccccaccagagctgcagcgacgaggacatcggcggcggcccaagcagcggcgcccctcctcccagcggcggcagcccagccggctccccaacctctaccgaggagggcacctctgagtccgccacccccgagagcggccctggcacctccaccgagcccagcgagggcagcgcacccggcagccctgccggcagccccacctccacagaggagggaaccagcaccgagcccagcgaaggcagcgccccaggcaccagcaccgagcctagtgagcaggagattaaacggatcaacaagatcagaagaagacttgtgaaagacagcaacaccaagaaggccggcaagacaggccccatgaaaaccctgctggttagagtgatgacacccgatctgagagagcggctggaaaacctgagaaagaagcctgaaaatatcccccagcccatcagcaatacatctagagccaacctgaataagctgctgaccgattacaccgaaatgaagaaggcgatcctgcatgtgtactgggaagagttccagaaggaccctgtgggcctgatgagccgggtggcccagcctgccagcaagaagatcgatcagaacaagctgaaacctgagatggacgagaagggcaacctgaccaccgccggctttgcctgctctcagtgtggccagcccctgttcgtgtacaagctggagcaggtgtctgagaagggcaaggcttacaccaactacttcggacggtgcaatgtggccgagcacgaaaagctgatcctgctggcccagctgaagcccgagaaggatagcgacgaagccgtgacatatagcctgggaaagtttgggcagagggccctggatttctacagcattcatgtgaccaaggagtccacccaccccgtgaagcccctggcccagatcgccggaaacagatacgcctccggacctgtgggaaaggccctgagcgacgcatgtatgggcacaatcgcctccttcctgtctaagtaccaggacatcatcatcgaacaccagaaggtggtgaagggcaaccagaagagactggagagcctgcgggagctggccggcaaggaaaacctggaataccctagcgtgaccctgccacctcagcctcacaccaaggagggcgttgatgcctacaacgaagtgatcgcccgggtgcgaatgtgggtgaacctgaacctgtggcagaagctgaagctaagcagagatgatgccaagcctctgctgagactgaagggattcccttcctttcctctggtcgagagacaggccaacgaagtggactggtgggacatggtgtgtaacgtgaagaagctgatcaacgagaaaaaggaggatggcaaggtgttttggcagaatctggctggctacaagagacaggaagccctgagaccatacctgagcagcgaggaagatcggaagaagggaaagaaattcgctcggtaccagctgggcgacctgctgctgcacctggaaaagaagcacggcgaggactggggaaaggtgtacgacgaggcctgggagcggattgacaagaaagtggaaggcctgagcaagcacatcaagctggaagaggaacggagaagcgaggacgcccagagcaaggccgccctgaccgactggctgcgggctaaggccagcttcgtgatcgagggcctgaaggaggccgacaaggacgagttctgcagatgcgagctgaagctgcagaagtggtacggggacctgcggggaaagcccttcgccatcgaagccgagaacagcatcctggacatcagcggcttcagcaagcagtacaactgtgccttcatctggcagaaggacggcgtgaagaagctgaacctgtacctgatcatcaactacttcaagggcggcaagctgcggttcaagaagatcaaacctgaagccttcgaagccaacagattctacaccgtgatcaacaaaaagagcggcgagatcgtgcccatggaggtgaacttcaacttcgacgaccccaacctgatcatcctgcctctggcctttggcaagagacagggcagagaattcatctggaacgacctgctgtccctggaaaccggcagcctgaagctggccaacggaagagtgatcgagaagacactgtacaacagaagaacccggcaggatgagcctgccctgttcgtggccctgaccttcgagcggcgggaggtcctggactcctccaatatcaaaccaatgaacctgatcggcgtggcaagaggcgaaaacatccccgccgtgatcgccctgaccgaccccgagggctgcccactgagccggtttaaggatagcctgggaaacccaacccacatcctgagaatcggcgagagctataaggagaagcagcggaccatccaggccaagaaggaggtggagcagcggagagccggcggctacagccggaagtacgccagcaaagccaagaatctggcagacgatatggtgagaaacaccgctagagatctgctgtactacgccgtgacccaggatgccatgctgatcttcgccaacctgagccggggcttcggccggcagggcaagcggaccttcatggccgagagacagtacacacggatggaggactggctgaccgccaagctggcctacgagggcctgagcaagacctacctgtccaagacactggcccagtacacctccaagacatgcagcaactgtgggtttaccatcaccagcgccgactacgacagggtgctggagaagctgaagaagacagcaacaggctggatgaccacaattaacggcaaggagctgaaggtggagggccagattacctactacaacagatacaagagacagaacgtagtcaaggacctgtccgtcgagctggatagactgagcgaagaatctgtgaacaacgacatctcctcctggacaaagggcagaagcggagaagctctgagcctcctgaagaaaagattctcccatagacccgtgcaggagaagttcgtgtgcctgaactgcggcttcgagacacacgcagccgagcaagccgccctgaacatcgccagatcctggctgttcctgcggagccaggagtacaagaaataccagacaaacaagacaaccggcaacaccgataagagagccttcgtcgagacctggcagtccttttaccggaagaagcttaaggaggtgtggaaacctgccgtgcggtctggcggatctggcggaggctccaccagccccaagaaaaagagaaaagtctaagctgccttctgcggggcttgccttctggccatgcccttcttctctcccttgcacctgtacctcttggtctttgaataaagcctgagtaggaaggctagcaaaaaaaaaaaaaaaaaaaaaaaaaaaaaaaaaaaaaaaaaaaaaaaaaaaaaaaaaaaaaaaaaaaaaaaaaaaaaaaa

SEQ ID NO: 13235 - RNA, 5785 nt, synthetic construct
  source 1..5785: mol_type = other RNA
aggaaataagagagaaaagaagagtaagaagaaatataagagccaccatggcccctaagaagaagcgtaaagtgagccggatggaacgcctcgtctacgaggtgcggcagaagtgcagaaacatcgaggacatctgcatctcctgcggatctctgaacgtgaccctggagcacccactgttcatcggcggcatgtgccagaactgtaaaaactgttttctggagtgtgcctatcaatacgacgatgacggctaccagagctactgcaccatctgttgcggcggaagagaggtgctgatgtgtggaaataacaactgctgccggtgcttctgcgtggaatgcgtggacctgctggtgggccccggcgccgcccaggccgctattaaggaagatccttggaactgctacatgtgcggccacaagggcacatacggcctgctgagacggagagaggactggcctagcagactgcagatgttcttcgccaataaccacgaccaggagttcgacccccctaaggtgtaccctcccgtccccgccgagaagagaaagcccatccgggtcctgagcctgttcgatggcatcgccaccggtctgctggtgctgaaggacctgggcatccaggtggataggtacattgcctccgaggtgtgcgaggactccatcaccgtgggaatggtgcgtcatcagggcaagatcatgtacgtgggcgacgtgcggagcgtgacacagaagcatatccaggagtggggccctttcgacctggtgatcggcggcagcccttgcaatgacctgagcatcgtgaacccagcccggaagggcctgtacgagggaaccggcagactgttcttcgagttttacagactgctgcacgacgcccggcctaaggaaggcgacgaccggcccttcttttggctgttcgagaatgtggtggccatgggagtcagcgacaagcgggatattagccggttcctggagagcaaccccgtgatgatcgatgccaaggaagtgagcgccgcccaccgggccagatacttctggggcaatctgcctggcatgaacagacccctggccagcaccgtgaacgacaagctggagctgcaggagtgcctggagcacggccggatcgccaagttcagcaaggtgagaaccatcaccacccgaagcaacagcatcaaacaaggcaaggaccagcactttcctgtgttcatgaacgagaaggaggacatcctgtggtgtaccgagatggagagagtgttcgggttcccagtccactacacagatgtcagcaacatgtctagactggccagacagagactgctgggaagaagctggtccgtccctgtgatcagacacctgttcgcccctctgaaggagtacttcgcctgcgtgagcagcggcaacagcaacgccaacagccggggccccagcttctctagcggcctggtgccactgtccctgagagggagccacatgggccccatggagatctacaaaaccgtgagcgcctggaagcggcagcctgtgcgcgtgctgagcctgtttcggaatatcgataaagtcctgaaaagcctgggattcctggagagcggctctggctccggcggtggcaccctgaagtacgtggaggatgtgacaaacgtggtcagacgggatgtggagaagtggggccccttcgatctggtgtacggcagcacccaacccctgggcagctcttgtgaccggtgccctggctggtacatgtttcagttccaccggatcctgcagtacgccctgccgagacaggagtcccagcggccattcttttggattttcatggacaacttgctgctgaccgaggatgaccaggaaactaccactcggttcctgcagaccgaagccgtgaccctgcaggacgtgagaggccgggactaccagaacgccatgcgggtgtggtccaacatccctggactgaaaagcaagcacgcacctctgacccctaaagaagaggagtacctgcaggcccaggtgcggagcagaagcaagctggacgcccctaaggtggatctgctggtgaagaattgcctcctgcccctgagagagtacttcaagtatttcagccagaatagtctgcccctgggaggcagcggcggcggcagccagtgcctgctgaccttcggcgacgtgagcgtggacttcagccaggaggagtgggagtgcctggacagcgcccagagggccctgtacatcgacgtgatgctggagaactacagcaacctggtgagcgtggagaactacagcacctgcgacaccgtgcaccagcacgtgaacaccggcaaggagagctgccagaggaacaacctgggcgagatgctgaggaaccccagccacgacgccctgggcggcccaagcagcggcgcccctcctcccagcggcggcagcccagccggctccccaacctctaccgaggagggcacctctgagtccgccacccccgagagcggccctggcacctccaccgagcccagcgagggcagcgcacccggcagccctgccggcagccccacctccacagaggagggaaccagcaccgagcccagcgaaggcagcgccccaggcaccagcaccgagcctagtgagcaggagattaaacggatcaacaagatcagaagaagacttgtgaaagacagcaacaccaagaaggccggcaagacaggccccatgaaaaccctgctggttagagtgatgacacccgatctgagagagcggctggaaaacctgagaaagaagcctgaaaatatcccccagcccatcagcaatacatctagagccaacctgaataagctgctgaccgattacaccgaaatgaagaaggcgatcctgcatgtgtactgggaagagttccagaaggaccctgtgggcctgatgagccgggtggcccagcctgccagcaagaagatcgatcagaacaagctgaaacctgagatggacgagaagggcaacctgaccaccgccggctttgcctgctctcagtgtggccagcccctgttcgtgtacaagctggagcaggtgtctgagaagggcaaggcttacaccaactacttcggacggtgcaatgtggccgagcacgaaaagctgatcctgctggcccagctgaagcccgagaaggatagcgacgaagccgtgacatatagcctgggaaagtttgggcagagggccctggatttctacagcattcatgtgaccaaggagtccacccaccccgtgaagcccctggcccagatcgccggaaacagatacgcctccggacctgtgggaaaggccctgagcgacgcatgtatgggcacaatcgcctccttcctgtctaagtaccaggacatcatcatcgaacaccagaaggtggtgaagggcaaccagaagagactggagagcctgcgggagctggccggcaaggaaaacctggaataccctagcgtgaccctgccacctcagcctcacaccaaggagggcgttgatgcctacaacgaagtgatcgcccgggtgcgaatgtgggtgaacctgaacctgtggcagaagctgaagctaagcagagatgatgccaagcctctgctgagactgaagggattcccttcctttcctctggtcgagagacaggccaacgaagtggactggtgggacatggtgtgtaacgtgaagaagctgatcaacgagaaaaaggaggatggcaaggtgttttggcagaatctggctggctacaagagacaggaagccctgagaccatacctgagcagcgaggaagatcggaagaagggaaagaaattcgctcggtaccagctgggcgacctgctgctgcacctggaaaagaagcacggcgaggactggggaaaggtgtacgacgaggcctgggagcggattgacaagaaagtggaaggcctgagcaagcacatcaagctggaagaggaacggagaagcgaggacgcccagagcaaggccgccctgaccgactggctgcgggctaaggccagcttcgtgatcgagggcctgaaggaggccgacaaggacgagttctgcagatgcgagctgaagctgcagaagtggtacggggacctgcggggaaagcccttcgccatcgaagccgagaacagcatcctggacatcagcggcttcagcaagcagtacaactgtgccttcatctggcagaaggacggcgtgaagaagctgaacctgtacctgatcatcaactacttcaagggcggcaagctgcggttcaagaagatcaaacctgaagccttcgaagccaacagattctacaccgtgatcaacaaaaagagcggcgagatcgtgcccatggaggtgaacttcaacttcgacgaccccaacctgatcatcctgcctctggcctttggcaagagacagggcagagaattcatctggaacgacctgctgtccctggaaaccggcagcctgaagctggccaacggaagagtgatcgagaagacactgtacaacagaagaacccggcaggatgagcctgccctgttcgtggccctgaccttcgagcggcgggaggtcctggactcctccaatatcaaaccaatgaacctgatcggcgtggcaagaggcgaaaacatccccgccgtgatcgccctgaccgaccccgagggctgcccactgagccggtttaaggatagcctgggaaacccaacccacatcctgagaatcggcgagagctataaggagaagcagcggaccatccaggccaagaaggaggtggagcagcggagagccggcggctacagccggaagtacgccagcaaagccaagaatctggcagacgatatggtgagaaacaccgctagagatctgctgtactacgccgtgacccaggatgccatgctgatcttcgccaacctgagccggggcttcggccggcagggcaagcggaccttcatggccgagagacagtacacacggatggaggactggctgaccgccaagctggcctacgagggcctgagcaagacctacctgtccaagacactggcccagtacacctccaagacatgcagcaactgtgggtttaccatcaccagcgccgactacgacagggtgctggagaagctgaagaagacagcaacaggctggatgaccacaattaacggcaaggagctgaaggtggagggccagattacctactacaacagatacaagagacagaacgtagtcaaggacctgtccgtcgagctggatagactgagcgaagaatctgtgaacaacgacatctcctcctggacaaagggcagaagcggagaagctctgagcctcctgaagaaaagattctcccatagacccgtgcaggagaagttcgtgtgcctgaactgcggcttcgagacacacgcagccgagcaagccgccctgaacatcgccagatcctggctgttcctgcggagccaggagtacaagaaataccagacaaacaagacaaccggcaacaccgataagagagccttcgtcgagacctggcagtccttttaccggaagaagcttaaggaggtgtggaaacctgccgtgcggtctggcggatctggcggaggctccaccagccccaagaaaaagagaaaagtctaagctgccttctgcggggcttgccttctggccatgcccttcttctctcccttgcacctgtacctcttggtctttgaataaagcctgagtaggaaggctagcaaaaaaaaaaaaaaaaaaaaaaaaaaaaaaaaaaaaaaaaaaaaaaaaaaaaaaaaaaaaaaaaaaaaaaaaaaaaaaaa

SEQ ID NO: 13236 - RNA, 5785 nt, synthetic construct
  source 1..5785: mol_type = other RNA
aggaaataagagagaaaagaagagtaagaagaaatataagagccaccatggcccctaagaagaagcgtaaagtgagccggatggaacgcctcgtctacgaggtgcggcagaagtgcagaaacatcgaggacatctgcatctcctgcggatctctgaacgtgaccctggagcacccactgttcatcggcggcatgtgccagaactgtaaaaactgttttctggagtgtgcctatcaatacgacgatgacggctaccagagctactgcaccatctgttgcggcggaagagaggtgctgatgtgtggaaataacaactgctgccggtgcttctgcgtggaatgcgtggacctgctggtgggccccggcgccgcccaggccgctattaaggaagatccttggaactgctacatgtgcggccacaagggcacatacggcctgctgagacggagagaggactggcctagcagactgcagatgttcttcgccaataaccacgaccaggagttcgacccccctaaggtgtaccctcccgtccccgccgagaagagaaagcccatccgggtcctgagcctgttcgatggcatcgccaccggtctgctggtgctgaaggacctgggcatccaggtggataggtacattgcctccgaggtgtgcgaggactccatcaccgtgggaatggtgcgtcatcagggcaagatcatgtacgtgggcgacgtgcggagcgtgacacagaagcatatccaggagtggggccctttcgacctggtgatcggcggcagcccttgcaatgacctgagcatcgtgaacccagcccggaagggcctgtacgagggaaccggcagactgttcttcgagttttacagactgctgcacgacgcccggcctaaggaaggcgacgaccggcccttcttttggctgttcgagaatgtggtggccatgggagtcagcgacaagcgggatattagccggttcctggagagcaaccccgtgatgatcgatgccaaggaagtgagcgccgcccaccgggccagatacttctggggcaatctgcctggcatgaacagacccctggccagcaccgtgaacgacaagctggagctgcaggagtgcctggagcacggccggatcgccaagttcagcaaggtgagaaccatcaccacccgaagcaacagcatcaaacaaggcaaggaccagcactttcctgtgttcatgaacgagaaggaggacatcctgtggtgtaccgagatggagagagtgttcgggttcccagtccactacacagatgtcagcaacatgtctagactggccagacagagactgctgggaagaagctggtccgtccctgtgatcagacacctgttcgcccctctgaaggagtacttcgcctgcgtgagcagcggcaacagcaacgccaacagccggggccccagcttctctagcggcctggtgccactgtccctgagagggagccacatgggccccatggagatctacaaaaccgtgagcgcctggaagcggcagcctgtgcgcgtgctgagcctgtttcggaatatcgataaagtcctgaaaagcctgggattcctggagagcggctctggctccggcggtggcaccctgaagtacgtggaggatgtgacaaacgtggtcagacgggatgtggagaagtggggccccttcgatctggtgtacggcagcacccaacccctgggcagctcttgtgaccggtgccctggctggtacatgtttcagttccaccggatcctgcagtacgccctgccgagacaggagtcccagcggccattcttttggattttcatggacaacttgctgctgaccgaggatgaccaggaaactaccactcggttcctgcagaccgaagccgtgaccctgcaggacgtgagaggccgggactaccagaacgccatgcgggtgtggtccaacatccctggactgaaaagcaagcacgcacctctgacccctaaagaagaggagtacctgcaggcccaggtgcggagcagaagcaagctggacgcccctaaggtggatctgctggtgaagaattgcctcctgcccctgagagagtacttcaagtatttcagccagaatagtctgcccctgggaggcagcggcggcggccagcagggcagcgtgaccttccaggacgtggccgtggacttcagctgggaggagtggggccacctgggccccacccagaaggagctgtacagggaggtgatgctggagaactacggcaacctggtgtgcctgggcctggccgtgagcagccccgacgtggtgtgccagctggagaggggcgagggcccctggatgcccgagggcgacgcccccggcagcagcagggccggcagcagcaagcacggcggcccaagcagcggcgcccctcctcccagcggcggcagcccagccggctccccaacctctaccgaggagggcacctctgagtccgccacccccgagagcggccctggcacctccaccgagcccagcgagggcagcgcacccggcagccctgccggcagccccacctccacagaggagggaaccagcaccgagcccagcgaaggcagcgccccaggcaccagcaccgagcctagtgagcaggagattaaacggatcaacaagatcagaagaagacttgtgaaagacagcaacaccaagaaggccggcaagacaggccccatgaaaaccctgctggttagagtgatgacacccgatctgagagagcggctggaaaacctgagaaagaagcctgaaaatatcccccagcccatcagcaatacatctagagccaacctgaataagctgctgaccgattacaccgaaatgaagaaggcgatcctgcatgtgtactgggaagagttccagaaggaccctgtgggcctgatgagccgggtggcccagcctgccagcaagaagatcgatcagaacaagctgaaacctgagatggacgagaagggcaacctgaccaccgccggctttgcctgctctcagtgtggccagcccctgttcgtgtacaagctggagcaggtgtctgagaagggcaaggcttacaccaactacttcggacggtgcaatgtggccgagcacgaaaagctgatcctgctggcccagctgaagcccgagaaggatagcgacgaagccgtgacatatagcctgggaaagtttgggcagagggccctggatttctacagcattcatgtgaccaaggagtccacccaccccgtgaagcccctggcccagatcgccggaaacagatacgcctccggacctgtgggaaaggccctgagcgacgcatgtatgggcacaatcgcctccttcctgtctaagtaccaggacatcatcatcgaacaccagaaggtggtgaagggcaaccagaagagactggagagcctgcgggagctggccggcaaggaaaacctggaataccctagcgtgaccctgccacctcagcctcacaccaaggagggcgttgatgcctacaacgaagtgatcgcccgggtgcgaatgtgggtgaacctgaacctgtggcagaagctgaagctaagcagagatgatgccaagcctctgctgagactgaagggattcccttcctttcctctggtcgagagacaggccaacgaagtggactggtgggacatggtgtgtaacgtgaagaagctgatcaacgagaaaaaggaggatggcaaggtgttttggcagaatctggctggctacaagagacaggaagccctgagaccatacctgagcagcgaggaagatcggaagaagggaaagaaattcgctcggtaccagctgggcgacctgctgctgcacctggaaaagaagcacggcgaggactggggaaaggtgtacgacgaggcctgggagcggattgacaagaaagtggaaggcctgagcaagcacatcaagctggaagaggaacggagaagcgaggacgcccagagcaaggccgccctgaccgactggctgcgggctaaggccagcttcgtgatcgagggcctgaaggaggccgacaaggacgagttctgcagatgcgagctgaagctgcagaagtggtacggggacctgcggggaaagcccttcgccatcgaagccgagaacagcatcctggacatcagcggcttcagcaagcagtacaactgtgccttcatctggcagaaggacggcgtgaagaagctgaacctgtacctgatcatcaactacttcaagggcggcaagctgcggttcaagaagatcaaacctgaagccttcgaagccaacagattctacaccgtgatcaacaaaaagagcggcgagatcgtgcccatggaggtgaacttcaacttcgacgaccccaacctgatcatcctgcctctggcctttggcaagagacagggcagagaattcatctggaacgacctgctgtccctggaaaccggcagcctgaagctggccaacggaagagtgatcgagaagacactgtacaacagaagaacccggcaggatgagcctgccctgttcgtggccctgaccttcgagcggcgggaggtcctggactcctccaatatcaaaccaatgaacctgatcggcgtggcaagaggcgaaaacatccccgccgtgatcgccctgaccgaccccgagggctgcccactgagccggtttaaggatagcctgggaaacccaacccacatcctgagaatcggcgagagctataaggagaagcagcggaccatccaggccaagaaggaggtggagcagcggagagccggcggctacagccggaagtacgccagcaaagccaagaatctggcagacgatatggtgagaaacaccgctagagatctgctgtactacgccgtgacccaggatgccatgctgatcttcgccaacctgagccggggcttcggccggcagggcaagcggaccttcatggccgagagacagtacacacggatggaggactggctgaccgccaagctggcctacgagggcctgagcaagacctacctgtccaagacactggcccagtacacctccaagacatgcagcaactgtgggtttaccatcaccagcgccgactacgacagggtgctggagaagctgaagaagacagcaacaggctggatgaccacaattaacggcaaggagctgaaggtggagggccagattacctactacaacagatacaagagacagaacgtagtcaaggacctgtccgtcgagctggatagactgagcgaagaatctgtgaacaacgacatctcctcctggacaaagggcagaagcggagaagctctgagcctcctgaagaaaagattctcccatagacccgtgcaggagaagttcgtgtgcctgaactgcggcttcgagacacacgcagccgagcaagccgccctgaacatcgccagatcctggctgttcctgcggagccaggagtacaagaaataccagacaaacaagacaaccggcaacaccgataagagagccttcgtcgagacctggcagtccttttaccggaagaagcttaaggaggtgtggaaacctgccgtgcggtctggcggatctggcggaggctccaccagccccaagaaaaagagaaaagtctaagctgccttctgcggggcttgccttctggccatgcccttcttctctcccttgcacctgtacctcttggtctttgaataaagcctgagtaggaaggctagcaaaaaaaaaaaaaaaaaaaaaaaaaaaaaaaaaaaaaaaaaaaaaaaaaaaaaaaaaaaaaaaaaaaaaaaaaaaaaaaa

SEQ ID NO: 13237 - RNA, 5785 nt, synthetic construct
  source 1..5785: mol_type = other RNA
aggaaataagagagaaaagaagagtaagaagaaatataagagccaccatggcccctaagaagaagcgtaaagtgagccggatggaacgcctcgtctacgaggtgcggcagaagtgcagaaacatcgaggacatctgcatctcctgcggatctctgaacgtgaccctggagcacccactgttcatcggcggcatgtgccagaactgtaaaaactgttttctggagtgtgcctatcaatacgacgatgacggctaccagagctactgcaccatctgttgcggcggaagagaggtgctgatgtgtggaaataacaactgctgccggtgcttctgcgtggaatgcgtggacctgctggtgggccccggcgccgcccaggccgctattaaggaagatccttggaactgctacatgtgcggccacaagggcacatacggcctgctgagacggagagaggactggcctagcagactgcagatgttcttcgccaataaccacgaccaggagttcgacccccctaaggtgtaccctcccgtccccgccgagaagagaaagcccatccgggtcctgagcctgttcgatggcatcgccaccggtctgctggtgctgaaggacctgggcatccaggtggataggtacattgcctccgaggtgtgcgaggactccatcaccgtgggaatggtgcgtcatcagggcaagatcatgtacgtgggcgacgtgcggagcgtgacacagaagcatatccaggagtggggccctttcgacctggtgatcggcggcagcccttgcaatgacctgagcatcgtgaacccagcccggaagggcctgtacgagggaaccggcagactgttcttcgagttttacagactgctgcacgacgcccggcctaaggaaggcgacgaccggcccttcttttggctgttcgagaatgtggtggccatgggagtcagcgacaagcgggatattagccggttcctggagagcaaccccgtgatgatcgatgccaaggaagtgagcgccgcccaccgggccagatacttctggggcaatctgcctggcatgaacagacccctggccagcaccgtgaacgacaagctggagctgcaggagtgcctggagcacggccggatcgccaagttcagcaaggtgagaaccatcaccacccgaagcaacagcatcaaacaaggcaaggaccagcactttcctgtgttcatgaacgagaaggaggacatcctgtggtgtaccgagatggagagagtgttcgggttcccagtccactacacagatgtcagcaacatgtctagactggccagacagagactgctgggaagaagctggtccgtccctgtgatcagacacctgttcgcccctctgaaggagtacttcgcctgcgtgagcagcggcaacagcaacgccaacagccggggccccagcttctctagcggcctggtgccactgtccctgagagggagccacatgggccccatggagatctacaaaaccgtgagcgcctggaagcggcagcctgtgcgcgtgctgagcctgtttcggaatatcgataaagtcctgaaaagcctgggattcctggagagcggctctggctccggcggtggcaccctgaagtacgtggaggatgtgacaaacgtggtcagacgggatgtggagaagtggggccccttcgatctggtgtacggcagcacccaacccctgggcagctcttgtgaccggtgccctggctggtacatgtttcagttccaccggatcctgcagtacgccctgccgagacaggagtcccagcggccattcttttggattttcatggacaacttgctgctgaccgaggatgaccaggaaactaccactcggttcctgcagaccgaagccgtgaccctgcaggacgtgagaggccgggactaccagaacgccatgcgggtgtggtccaacatccctggactgaaaagcaagcacgcacctctgacccctaaagaagaggagtacctgcaggcccaggtgcggagcagaagcaagctggacgcccctaaggtggatctgctggtgaagaattgcctcctgcccctgagagagtacttcaagtatttcagccagaatagtctgcccctgggaggcagcggcggcggcgccctggagagcgtgaccttcagggacgtggccgtgttcttcagcagggacgagtggctgcacctgaaccccgcccagagggccctgtacagggaggtgatgctggacaactacagcgccctgctgagcctgggcatcctgttcagcaagcccaaggtgatcctgcagctggagcagggcgaggacccctggatggtggagaacggcgtgagccagagcgcctgcctgggctgggagagcctgggcggcccaagcagcggcgcccctcctcccagcggcggcagcccagccggctccccaacctctaccgaggagggcacctctgagtccgccacccccgagagcggccctggcacctccaccgagcccagcgagggcagcgcacccggcagccctgccggcagccccacctccacagaggagggaaccagcaccgagcccagcgaaggcagcgccccaggcaccagcaccgagcctagtgagcaggagattaaacggatcaacaagatcagaagaagacttgtgaaagacagcaacaccaagaaggccggcaagacaggccccatgaaaaccctgctggttagagtgatgacacccgatctgagagagcggctggaaaacctgagaaagaagcctgaaaatatcccccagcccatcagcaatacatctagagccaacctgaataagctgctgaccgattacaccgaaatgaagaaggcgatcctgcatgtgtactgggaagagttccagaaggaccctgtgggcctgatgagccgggtggcccagcctgccagcaagaagatcgatcagaacaagctgaaacctgagatggacgagaagggcaacctgaccaccgccggctttgcctgctctcagtgtggccagcccctgttcgtgtacaagctggagcaggtgtctgagaagggcaaggcttacaccaactacttcggacggtgcaatgtggccgagcacgaaaagctgatcctgctggcccagctgaagcccgagaaggatagcgacgaagccgtgacatatagcctgggaaagtttgggcagagggccctggatttctacagcattcatgtgaccaaggagtccacccaccccgtgaagcccctggcccagatcgccggaaacagatacgcctccggacctgtgggaaaggccctgagcgacgcatgtatgggcacaatcgcctccttcctgtctaagtaccaggacatcatcatcgaacaccagaaggtggtgaagggcaaccagaagagactggagagcctgcgggagctggccggcaaggaaaacctggaataccctagcgtgaccctgccacctcagcctcacaccaaggagggcgttgatgcctacaacgaagtgatcgcccgggtgcgaatgtgggtgaacctgaacctgtggcagaagctgaagctaagcagagatgatgccaagcctctgctgagactgaagggattcccttcctttcctctggtcgagagacaggccaacgaagtggactggtgggacatggtgtgtaacgtgaagaagctgatcaacgagaaaaaggaggatggcaaggtgttttggcagaatctggctggctacaagagacaggaagccctgagaccatacctgagcagcgaggaagatcggaagaagggaaagaaattcgctcggtaccagctgggcgacctgctgctgcacctggaaaagaagcacggcgaggactggggaaaggtgtacgacgaggcctgggagcggattgacaagaaagtggaaggcctgagcaagcacatcaagctggaagaggaacggagaagcgaggacgcccagagcaaggccgccctgaccgactggctgcgggctaaggccagcttcgtgatcgagggcctgaaggaggccgacaaggacgagttctgcagatgcgagctgaagctgcagaagtggtacggggacctgcggggaaagcccttcgccatcgaagccgagaacagcatcctggacatcagcggcttcagcaagcagtacaactgtgccttcatctggcagaaggacggcgtgaagaagctgaacctgtacctgatcatcaactacttcaagggcggcaagctgcggttcaagaagatcaaacctgaagccttcgaagccaacagattctacaccgtgatcaacaaaaagagcggcgagatcgtgcccatggaggtgaacttcaacttcgacgaccccaacctgatcatcctgcctctggcctttggcaagagacagggcagagaattcatctggaacgacctgctgtccctggaaaccggcagcctgaagctggccaacggaagagtgatcgagaagacactgtacaacagaagaacccggcaggatgagcctgccctgttcgtggccctgaccttcgagcggcgggaggtcctggactcctccaatatcaaaccaatgaacctgatcggcgtggcaagaggcgaaaacatccccgccgtgatcgccctgaccgaccccgagggctgcccactgagccggtttaaggatagcctgggaaacccaacccacatcctgagaatcggcgagagctataaggagaagcagcggaccatccaggccaagaaggaggtggagcagcggagagccggcggctacagccggaagtacgccagcaaagccaagaatctggcagacgatatggtgagaaacaccgctagagatctgctgtactacgccgtgacccaggatgccatgctgatcttcgccaacctgagccggggcttcggccggcagggcaagcggaccttcatggccgagagacagtacacacggatggaggactggctgaccgccaagctggcctacgagggcctgagcaagacctacctgtccaagacactggcccagtacacctccaagacatgcagcaactgtgggtttaccatcaccagcgccgactacgacagggtgctggagaagctgaagaagacagcaacaggctggatgaccacaattaacggcaaggagctgaaggtggagggccagattacctactacaacagatacaagagacagaacgtagtcaaggacctgtccgtcgagctggatagactgagcgaagaatctgtgaacaacgacatctcctcctggacaaagggcagaagcggagaagctctgagcctcctgaagaaaagattctcccatagacccgtgcaggagaagttcgtgtgcctgaactgcggcttcgagacacacgcagccgagcaagccgccctgaacatcgccagatcctggctgttcctgcggagccaggagtacaagaaataccagacaaacaagacaaccggcaacaccgataagagagccttcgtcgagacctggcagtccttttaccggaagaagcttaaggaggtgtggaaacctgccgtgcggtctggcggatctggcggaggctccaccagccccaagaaaaagagaaaagtctaagctgccttctgcggggcttgccttctggccatgcccttcttctctcccttgcacctgtacctcttggtctttgaataaagcctgagtaggaaggctagcaaaaaaaaaaaaaaaaaaaaaaaaaaaaaaaaaaaaaaaaaaaaaaaaaaaaaaaaaaaaaaaaaaaaaaaaaaaaaaaa

SEQ ID NO: 13238 - RNA, 5785 nt, synthetic construct
  source 1..5785: mol_type = other RNA
aggaaataagagagaaaagaagagtaagaagaaatataagagccaccatggcccctaagaagaagcgtaaagtgagccggatggaacgcctcgtctacgaggtgcggcagaagtgcagaaacatcgaggacatctgcatctcctgcggatctctgaacgtgaccctggagcacccactgttcatcggcggcatgtgccagaactgtaaaaactgttttctggagtgtgcctatcaatacgacgatgacggctaccagagctactgcaccatctgttgcggcggaagagaggtgctgatgtgtggaaataacaactgctgccggtgcttctgcgtggaatgcgtggacctgctggtgggccccggcgccgcccaggccgctattaaggaagatccttggaactgctacatgtgcggccacaagggcacatacggcctgctgagacggagagaggactggcctagcagactgcagatgttcttcgccaataaccacgaccaggagttcgacccccctaaggtgtaccctcccgtccccgccgagaagagaaagcccatccgggtcctgagcctgttcgatggcatcgccaccggtctgctggtgctgaaggacctgggcatccaggtggataggtacattgcctccgaggtgtgcgaggactccatcaccgtgggaatggtgcgtcatcagggcaagatcatgtacgtgggcgacgtgcggagcgtgacacagaagcatatccaggagtggggccctttcgacctggtgatcggcggcagcccttgcaatgacctgagcatcgtgaacccagcccggaagggcctgtacgagggaaccggcagactgttcttcgagttttacagactgctgcacgacgcccggcctaaggaaggcgacgaccggcccttcttttggctgttcgagaatgtggtggccatgggagtcagcgacaagcgggatattagccggttcctggagagcaaccccgtgatgatcgatgccaaggaagtgagcgccgcccaccgggccagatacttctggggcaatctgcctggcatgaacagacccctggccagcaccgtgaacgacaagctggagctgcaggagtgcctggagcacggccggatcgccaagttcagcaaggtgagaaccatcaccacccgaagcaacagcatcaaacaaggcaaggaccagcactttcctgtgttcatgaacgagaaggaggacatcctgtggtgtaccgagatggagagagtgttcgggttcccagtccactacacagatgtcagcaacatgtctagactggccagacagagactgctgggaagaagctggtccgtccctgtgatcagacacctgttcgcccctctgaaggagtacttcgcctgcgtgagcagcggcaacagcaacgccaacagccggggccccagcttctctagcggcctggtgccactgtccctgagagggagccacatgggccccatggagatctacaaaaccgtgagcgcctggaagcggcagcctgtgcgcgtgctgagcctgtttcggaatatcgataaagtcctgaaaagcctgggattcctggagagcggctctggctccggcggtggcaccctgaagtacgtggaggatgtgacaaacgtggtcagacgggatgtggagaagtggggccccttcgatctggtgtacggcagcacccaacccctgggcagctcttgtgaccggtgccctggctggtacatgtttcagttccaccggatcctgcagtacgccctgccgagacaggagtcccagcggccattcttttggattttcatggacaacttgctgctgaccgaggatgaccaggaaactaccactcggttcctgcagaccgaagccgtgaccctgcaggacgtgagaggccgggactaccagaacgccatgcgggtgtggtccaacatccctggactgaaaagcaagcacgcacctctgacccctaaagaagaggagtacctgcaggcccaggtgcggagcagaagcaagctggacgcccctaaggtggatctgctggtgaagaattgcctcctgcccctgagagagtacttcaagtatttcagccagaatagtctgcccctgggaggcagcggcggcggcagccaggacctggtgaccttcaaggacgtggccatcgacttcagccaggaggagtgggagtggctgaaccccgcccagaggaacctgtacaagaacatgatgctggagaactaccagaacctggtgagcctgggcctgtgcatcagcaagccctacgtgatcagcctgctggagcagggcaagggcccctgggagatgaagaccgagatgaccaggagccccttccccgacagcggcagcgtgggcggcccaagcagcggcgcccctcctcccagcggcggcagcccagccggctccccaacctctaccgaggagggcacctctgagtccgccacccccgagagcggccctggcacctccaccgagcccagcgagggcagcgcacccggcagccctgccggcagccccacctccacagaggagggaaccagcaccgagcccagcgaaggcagcgccccaggcaccagcaccgagcctagtgagcaggagattaaacggatcaacaagatcagaagaagacttgtgaaagacagcaacaccaagaaggccggcaagacaggccccatgaaaaccctgctggttagagtgatgacacccgatctgagagagcggctggaaaacctgagaaagaagcctgaaaatatcccccagcccatcagcaatacatctagagccaacctgaataagctgctgaccgattacaccgaaatgaagaaggcgatcctgcatgtgtactgggaagagttccagaaggaccctgtgggcctgatgagccgggtggcccagcctgccagcaagaagatcgatcagaacaagctgaaacctgagatggacgagaagggcaacctgaccaccgccggctttgcctgctctcagtgtggccagcccctgttcgtgtacaagctggagcaggtgtctgagaagggcaaggcttacaccaactacttcggacggtgcaatgtggccgagcacgaaaagctgatcctgctggcccagctgaagcccgagaaggatagcgacgaagccgtgacatatagcctgggaaagtttgggcagagggccctggatttctacagcattcatgtgaccaaggagtccacccaccccgtgaagcccctggcccagatcgccggaaacagatacgcctccggacctgtgggaaaggccctgagcgacgcatgtatgggcacaatcgcctccttcctgtctaagtaccaggacatcatcatcgaacaccagaaggtggtgaagggcaaccagaagagactggagagcctgcgggagctggccggcaaggaaaacctggaataccctagcgtgaccctgccacctcagcctcacaccaaggagggcgttgatgcctacaacgaagtgatcgcccgggtgcgaatgtgggtgaacctgaacctgtggcagaagctgaagctaagcagagatgatgccaagcctctgctgagactgaagggattcccttcctttcctctggtcgagagacaggccaacgaagtggactggtgggacatggtgtgtaacgtgaagaagctgatcaacgagaaaaaggaggatggcaaggtgttttggcagaatctggctggctacaagagacaggaagccctgagaccatacctgagcagcgaggaagatcggaagaagggaaagaaattcgctcggtaccagctgggcgacctgctgctgcacctggaaaagaagcacggcgaggactggggaaaggtgtacgacgaggcctgggagcggattgacaagaaagtggaaggcctgagcaagcacatcaagctggaagaggaacggagaagcgaggacgcccagagcaaggccgccctgaccgactggctgcgggctaaggccagcttcgtgatcgagggcctgaaggaggccgacaaggacgagttctgcagatgcgagctgaagctgcagaagtggtacggggacctgcggggaaagcccttcgccatcgaagccgagaacagcatcctggacatcagcggcttcagcaagcagtacaactgtgccttcatctggcagaaggacggcgtgaagaagctgaacctgtacctgatcatcaactacttcaagggcggcaagctgcggttcaagaagatcaaacctgaagccttcgaagccaacagattctacaccgtgatcaacaaaaagagcggcgagatcgtgcccatggaggtgaacttcaacttcgacgaccccaacctgatcatcctgcctctggcctttggcaagagacagggcagagaattcatctggaacgacctgctgtccctggaaaccggcagcctgaagctggccaacggaagagtgatcgagaagacactgtacaacagaagaacccggcaggatgagcctgccctgttcgtggccctgaccttcgagcggcgggaggtcctggactcctccaatatcaaaccaatgaacctgatcggcgtggcaagaggcgaaaacatccccgccgtgatcgccctgaccgaccccgagggctgcccactgagccggtttaaggatagcctgggaaacccaacccacatcctgagaatcggcgagagctataaggagaagcagcggaccatccaggccaagaaggaggtggagcagcggagagccggcggctacagccggaagtacgccagcaaagccaagaatctggcagacgatatggtgagaaacaccgctagagatctgctgtactacgccgtgacccaggatgccatgctgatcttcgccaacctgagccggggcttcggccggcagggcaagcggaccttcatggccgagagacagtacacacggatggaggactggctgaccgccaagctggcctacgagggcctgagcaagacctacctgtccaagacactggcccagtacacctccaagacatgcagcaactgtgggtttaccatcaccagcgccgactacgacagggtgctggagaagctgaagaagacagcaacaggctggatgaccacaattaacggcaaggagctgaaggtggagggccagattacctactacaacagatacaagagacagaacgtagtcaaggacctgtccgtcgagctggatagactgagcgaagaatctgtgaacaacgacatctcctcctggacaaagggcagaagcggagaagctctgagcctcctgaagaaaagattctcccatagacccgtgcaggagaagttcgtgtgcctgaactgcggcttcgagacacacgcagccgagcaagccgccctgaacatcgccagatcctggctgttcctgcggagccaggagtacaagaaataccagacaaacaagacaaccggcaacaccgataagagagccttcgtcgagacctggcagtccttttaccggaagaagcttaaggaggtgtggaaacctgccgtgcggtctggcggatctggcggaggctccaccagccccaagaaaaagagaaaagtctaagctgccttctgcggggcttgccttctggccatgcccttcttctctcccttgcacctgtacctcttggtctttgaataaagcctgagtaggaaggctagcaaaaaaaaaaaaaaaaaaaaaaaaaaaaaaaaaaaaaaaaaaaaaaaaaaaaaaaaaaaaaaaaaaaaaaaaaaaaaaaa

SEQ ID NO: 13239 - RNA, 5785 nt, synthetic construct
  source 1..5785: mol_type = other RNA
aggaaataagagagaaaagaagagtaagaagaaatataagagccaccatggcccctaagaagaagcgtaaagtgagccggatggaacgcctcgtctacgaggtgcggcagaagtgcagaaacatcgaggacatctgcatctcctgcggatctctgaacgtgaccctggagcacccactgttcatcggcggcatgtgccagaactgtaaaaactgttttctggagtgtgcctatcaatacgacgatgacggctaccagagctactgcaccatctgttgcggcggaagagaggtgctgatgtgtggaaataacaactgctgccggtgcttctgcgtggaatgcgtggacctgctggtgggccccggcgccgcccaggccgctattaaggaagatccttggaactgctacatgtgcggccacaagggcacatacggcctgctgagacggagagaggactggcctagcagactgcagatgttcttcgccaataaccacgaccaggagttcgacccccctaaggtgtaccctcccgtccccgccgagaagagaaagcccatccgggtcctgagcctgttcgatggcatcgccaccggtctgctggtgctgaaggacctgggcatccaggtggataggtacattgcctccgaggtgtgcgaggactccatcaccgtgggaatggtgcgtcatcagggcaagatcatgtacgtgggcgacgtgcggagcgtgacacagaagcatatccaggagtggggccctttcgacctggtgatcggcggcagcccttgcaatgacctgagcatcgtgaacccagcccggaagggcctgtacgagggaaccggcagactgttcttcgagttttacagactgctgcacgacgcccggcctaaggaaggcgacgaccggcccttcttttggctgttcgagaatgtggtggccatgggagtcagcgacaagcgggatattagccggttcctggagagcaaccccgtgatgatcgatgccaaggaagtgagcgccgcccaccgggccagatacttctggggcaatctgcctggcatgaacagacccctggccagcaccgtgaacgacaagctggagctgcaggagtgcctggagcacggccggatcgccaagttcagcaaggtgagaaccatcaccacccgaagcaacagcatcaaacaaggcaaggaccagcactttcctgtgttcatgaacgagaaggaggacatcctgtggtgtaccgagatggagagagtgttcgggttcccagtccactacacagatgtcagcaacatgtctagactggccagacagagactgctgggaagaagctggtccgtccctgtgatcagacacctgttcgcccctctgaaggagtacttcgcctgcgtgagcagcggcaacagcaacgccaacagccggggccccagcttctctagcggcctggtgccactgtccctgagagggagccacatgggccccatggagatctacaaaaccgtgagcgcctggaagcggcagcctgtgcgcgtgctgagcctgtttcggaatatcgataaagtcctgaaaagcctgggattcctggagagcggctctggctccggcggtggcaccctgaagtacgtggaggatgtgacaaacgtggtcagacgggatgtggagaagtggggccccttcgatctggtgtacggcagcacccaacccctgggcagctcttgtgaccggtgccctggctggtacatgtttcagttccaccggatcctgcagtacgccctgccgagacaggagtcccagcggccattcttttggattttcatggacaacttgctgctgaccgaggatgaccaggaaactaccactcggttcctgcagaccgaagccgtgaccctgcaggacgtgagaggccgggactaccagaacgccatgcgggtgtggtccaacatccctggactgaaaagcaagcacgcacctctgacccctaaagaagaggagtacctgcaggcccaggtgcggagcagaagcaagctggacgcccctaaggtggatctgctggtgaagaattgcctcctgcccctgagagagtacttcaagtatttcagccagaatagtctgcccctgggaggcagcggcggcggccagcaggtgcccgtgaccttcgaggacgtggccgtgagcttcagccaggaggagtggaagtacctggacgaggcccagaagaacctgtactgggaggtgatgaaggagaactacgagaccctgatcagcctggacagcgaggtgcaccaggaggaggagagggagaagaaccaggaggagtaccccatgctgtggggcctgatcagcaggcagagcaggaagaaccacgagaaggtgtactggggcggcccaagcagcggcgcccctcctcccagcggcggcagcccagccggctccccaacctctaccgaggagggcacctctgagtccgccacccccgagagcggccctggcacctccaccgagcccagcgagggcagcgcacccggcagccctgccggcagccccacctccacagaggagggaaccagcaccgagcccagcgaaggcagcgccccaggcaccagcaccgagcctagtgagcaggagattaaacggatcaacaagatcagaagaagacttgtgaaagacagcaacaccaagaaggccggcaagacaggccccatgaaaaccctgctggttagagtgatgacacccgatctgagagagcggctggaaaacctgagaaagaagcctgaaaatatcccccagcccatcagcaatacatctagagccaacctgaataagctgctgaccgattacaccgaaatgaagaaggcgatcctgcatgtgtactgggaagagttccagaaggaccctgtgggcctgatgagccgggtggcccagcctgccagcaagaagatcgatcagaacaagctgaaacctgagatggacgagaagggcaacctgaccaccgccggctttgcctgctctcagtgtggccagcccctgttcgtgtacaagctggagcaggtgtctgagaagggcaaggcttacaccaactacttcggacggtgcaatgtggccgagcacgaaaagctgatcctgctggcccagctgaagcccgagaaggatagcgacgaagccgtgacatatagcctgggaaagtttgggcagagggccctggatttctacagcattcatgtgaccaaggagtccacccaccccgtgaagcccctggcccagatcgccggaaacagatacgcctccggacctgtgggaaaggccctgagcgacgcatgtatgggcacaatcgcctccttcctgtctaagtaccaggacatcatcatcgaacaccagaaggtggtgaagggcaaccagaagagactggagagcctgcgggagctggccggcaaggaaaacctggaataccctagcgtgaccctgccacctcagcctcacaccaaggagggcgttgatgcctacaacgaagtgatcgcccgggtgcgaatgtgggtgaacctgaacctgtggcagaagctgaagctaagcagagatgatgccaagcctctgctgagactgaagggattcccttcctttcctctggtcgagagacaggccaacgaagtggactggtgggacatggtgtgtaacgtgaagaagctgatcaacgagaaaaaggaggatggcaaggtgttttggcagaatctggctggctacaagagacaggaagccctgagaccatacctgagcagcgaggaagatcggaagaagggaaagaaattcgctcggtaccagctgggcgacctgctgctgcacctggaaaagaagcacggcgaggactggggaaaggtgtacgacgaggcctgggagcggattgacaagaaagtggaaggcctgagcaagcacatcaagctggaagaggaacggagaagcgaggacgcccagagcaaggccgccctgaccgactggctgcgggctaaggccagcttcgtgatcgagggcctgaaggaggccgacaaggacgagttctgcagatgcgagctgaagctgcagaagtggtacggggacctgcggggaaagcccttcgccatcgaagccgagaacagcatcctggacatcagcggcttcagcaagcagtacaactgtgccttcatctggcagaaggacggcgtgaagaagctgaacctgtacctgatcatcaactacttcaagggcggcaagctgcggttcaagaagatcaaacctgaagccttcgaagccaacagattctacaccgtgatcaacaaaaagagcggcgagatcgtgcccatggaggtgaacttcaacttcgacgaccccaacctgatcatcctgcctctggcctttggcaagagacagggcagagaattcatctggaacgacctgctgtccctggaaaccggcagcctgaagctggccaacggaagagtgatcgagaagacactgtacaacagaagaacccggcaggatgagcctgccctgttcgtggccctgaccttcgagcggcgggaggtcctggactcctccaatatcaaaccaatgaacctgatcggcgtggcaagaggcgaaaacatccccgccgtgatcgccctgaccgaccccgagggctgcccactgagccggtttaaggatagcctgggaaacccaacccacatcctgagaatcggcgagagctataaggagaagcagcggaccatccaggccaagaaggaggtggagcagcggagagccggcggctacagccggaagtacgccagcaaagccaagaatctggcagacgatatggtgagaaacaccgctagagatctgctgtactacgccgtgacccaggatgccatgctgatcttcgccaacctgagccggggcttcggccggcagggcaagcggaccttcatggccgagagacagtacacacggatggaggactggctgaccgccaagctggcctacgagggcctgagcaagacctacctgtccaagacactggcccagtacacctccaagacatgcagcaactgtgggtttaccatcaccagcgccgactacgacagggtgctggagaagctgaagaagacagcaacaggctggatgaccacaattaacggcaaggagctgaaggtggagggccagattacctactacaacagatacaagagacagaacgtagtcaaggacctgtccgtcgagctggatagactgagcgaagaatctgtgaacaacgacatctcctcctggacaaagggcagaagcggagaagctctgagcctcctgaagaaaagattctcccatagacccgtgcaggagaagttcgtgtgcctgaactgcggcttcgagacacacgcagccgagcaagccgccctgaacatcgccagatcctggctgttcctgcggagccaggagtacaagaaataccagacaaacaagacaaccggcaacaccgataagagagccttcgtcgagacctggcagtccttttaccggaagaagcttaaggaggtgtggaaacctgccgtgcggtctggcggatctggcggaggctccaccagccccaagaaaaagagaaaagtctaagctgccttctgcggggcttgccttctggccatgcccttcttctctcccttgcacctgtacctcttggtctttgaataaagcctgagtaggaaggctagcaaaaaaaaaaaaaaaaaaaaaaaaaaaaaaaaaaaaaaaaaaaaaaaaaaaaaaaaaaaaaaaaaaaaaaaaaaaaaaaa

SEQ ID NO: 13240 - RNA, 5785 nt, synthetic construct
  source 1..5785: mol_type = other RNA
aggaaataagagagaaaagaagagtaagaagaaatataagagccaccatggcccctaagaagaagcgtaaagtgagccggatggaacgcctcgtctacgaggtgcggcagaagtgcagaaacatcgaggacatctgcatctcctgcggatctctgaacgtgaccctggagcacccactgttcatcggcggcatgtgccagaactgtaaaaactgttttctggagtgtgcctatcaatacgacgatgacggctaccagagctactgcaccatctgttgcggcggaagagaggtgctgatgtgtggaaataacaactgctgccggtgcttctgcgtggaatgcgtggacctgctggtgggccccggcgccgcccaggccgctattaaggaagatccttggaactgctacatgtgcggccacaagggcacatacggcctgctgagacggagagaggactggcctagcagactgcagatgttcttcgccaataaccacgaccaggagttcgacccccctaaggtgtaccctcccgtccccgccgagaagagaaagcccatccgggtcctgagcctgttcgatggcatcgccaccggtctgctggtgctgaaggacctgggcatccaggtggataggtacattgcctccgaggtgtgcgaggactccatcaccgtgggaatggtgcgtcatcagggcaagatcatgtacgtgggcgacgtgcggagcgtgacacagaagcatatccaggagtggggccctttcgacctggtgatcggcggcagcccttgcaatgacctgagcatcgtgaacccagcccggaagggcctgtacgagggaaccggcagactgttcttcgagttttacagactgctgcacgacgcccggcctaaggaaggcgacgaccggcccttcttttggctgttcgagaatgtggtggccatgggagtcagcgacaagcgggatattagccggttcctggagagcaaccccgtgatgatcgatgccaaggaagtgagcgccgcccaccgggccagatacttctggggcaatctgcctggcatgaacagacccctggccagcaccgtgaacgacaagctggagctgcaggagtgcctggagcacggccggatcgccaagttcagcaaggtgagaaccatcaccacccgaagcaacagcatcaaacaaggcaaggaccagcactttcctgtgttcatgaacgagaaggaggacatcctgtggtgtaccgagatggagagagtgttcgggttcccagtccactacacagatgtcagcaacatgtctagactggccagacagagactgctgggaagaagctggtccgtccctgtgatcagacacctgttcgcccctctgaaggagtacttcgcctgcgtgagcagcggcaacagcaacgccaacagccggggccccagcttctctagcggcctggtgccactgtccctgagagggagccacatgggccccatggagatctacaaaaccgtgagcgcctggaagcggcagcctgtgcgcgtgctgagcctgtttcggaatatcgataaagtcctgaaaagcctgggattcctggagagcggctctggctccggcggtggcaccctgaagtacgtggaggatgtgacaaacgtggtcagacgggatgtggagaagtggggccccttcgatctggtgtacggcagcacccaacccctgggcagctcttgtgaccggtgccctggctggtacatgtttcagttccaccggatcctgcagtacgccctgccgagacaggagtcccagcggccattcttttggattttcatggacaacttgctgctgaccgaggatgaccaggaaactaccactcggttcctgcagaccgaagccgtgaccctgcaggacgtgagaggccgggactaccagaacgccatgcgggtgtggtccaacatccctggactgaaaagcaagcacgcacctctgacccctaaagaagaggagtacctgcaggcccaggtgcggagcagaagcaagctggacgcccctaaggtggatctgctggtgaagaattgcctcctgcccctgagagagtacttcaagtatttcagccagaatagtctgcccctgggaggcagcggcggcggccccagggagagcgtgaccttcgaggacgtggccgtgaacttcagccacgaggagtggcagtgcctgacccacagccagaggcacctgtacaaggacgtgatgctggagaactacggcaacatggtgagcctgggcttcagcttcagcaagccccccctgatcagctgcctggagcagggcgccgagagctacgtgcaggaccagcaggactgggagttcctgagctgcagctaccccgtgagcggcggcccaagcagcggcgcccctcctcccagcggcggcagcccagccggctccccaacctctaccgaggagggcacctctgagtccgccacccccgagagcggccctggcacctccaccgagcccagcgagggcagcgcacccggcagccctgccggcagccccacctccacagaggagggaaccagcaccgagcccagcgaaggcagcgccccaggcaccagcaccgagcctagtgagcaggagattaaacggatcaacaagatcagaagaagacttgtgaaagacagcaacaccaagaaggccggcaagacaggccccatgaaaaccctgctggttagagtgatgacacccgatctgagagagcggctggaaaacctgagaaagaagcctgaaaatatcccccagcccatcagcaatacatctagagccaacctgaataagctgctgaccgattacaccgaaatgaagaaggcgatcctgcatgtgtactgggaagagttccagaaggaccctgtgggcctgatgagccgggtggcccagcctgccagcaagaagatcgatcagaacaagctgaaacctgagatggacgagaagggcaacctgaccaccgccggctttgcctgctctcagtgtggccagcccctgttcgtgtacaagctggagcaggtgtctgagaagggcaaggcttacaccaactacttcggacggtgcaatgtggccgagcacgaaaagctgatcctgctggcccagctgaagcccgagaaggatagcgacgaagccgtgacatatagcctgggaaagtttgggcagagggccctggatttctacagcattcatgtgaccaaggagtccacccaccccgtgaagcccctggcccagatcgccggaaacagatacgcctccggacctgtgggaaaggccctgagcgacgcatgtatgggcacaatcgcctccttcctgtctaagtaccaggacatcatcatcgaacaccagaaggtggtgaagggcaaccagaagagactggagagcctgcgggagctggccggcaaggaaaacctggaataccctagcgtgaccctgccacctcagcctcacaccaaggagggcgttgatgcctacaacgaagtgatcgcccgggtgcgaatgtgggtgaacctgaacctgtggcagaagctgaagctaagcagagatgatgccaagcctctgctgagactgaagggattcccttcctttcctctggtcgagagacaggccaacgaagtggactggtgggacatggtgtgtaacgtgaagaagctgatcaacgagaaaaaggaggatggcaaggtgttttggcagaatctggctggctacaagagacaggaagccctgagaccatacctgagcagcgaggaagatcggaagaagggaaagaaattcgctcggtaccagctgggcgacctgctgctgcacctggaaaagaagcacggcgaggactggggaaaggtgtacgacgaggcctgggagcggattgacaagaaagtggaaggcctgagcaagcacatcaagctggaagaggaacggagaagcgaggacgcccagagcaaggccgccctgaccgactggctgcgggctaaggccagcttcgtgatcgagggcctgaaggaggccgacaaggacgagttctgcagatgcgagctgaagctgcagaagtggtacggggacctgcggggaaagcccttcgccatcgaagccgagaacagcatcctggacatcagcggcttcagcaagcagtacaactgtgccttcatctggcagaaggacggcgtgaagaagctgaacctgtacctgatcatcaactacttcaagggcggcaagctgcggttcaagaagatcaaacctgaagccttcgaagccaacagattctacaccgtgatcaacaaaaagagcggcgagatcgtgcccatggaggtgaacttcaacttcgacgaccccaacctgatcatcctgcctctggcctttggcaagagacagggcagagaattcatctggaacgacctgctgtccctggaaaccggcagcctgaagctggccaacggaagagtgatcgagaagacactgtacaacagaagaacccggcaggatgagcctgccctgttcgtggccctgaccttcgagcggcgggaggtcctggactcctccaatatcaaaccaatgaacctgatcggcgtggcaagaggcgaaaacatccccgccgtgatcgccctgaccgaccccgagggctgcccactgagccggtttaaggatagcctgggaaacccaacccacatcctgagaatcggcgagagctataaggagaagcagcggaccatccaggccaagaaggaggtggagcagcggagagccggcggctacagccggaagtacgccagcaaagccaagaatctggcagacgatatggtgagaaacaccgctagagatctgctgtactacgccgtgacccaggatgccatgctgatcttcgccaacctgagccggggcttcggccggcagggcaagcggaccttcatggccgagagacagtacacacggatggaggactggctgaccgccaagctggcctacgagggcctgagcaagacctacctgtccaagacactggcccagtacacctccaagacatgcagcaactgtgggtttaccatcaccagcgccgactacgacagggtgctggagaagctgaagaagacagcaacaggctggatgaccacaattaacggcaaggagctgaaggtggagggccagattacctactacaacagatacaagagacagaacgtagtcaaggacctgtccgtcgagctggatagactgagcgaagaatctgtgaacaacgacatctcctcctggacaaagggcagaagcggagaagctctgagcctcctgaagaaaagattctcccatagacccgtgcaggagaagttcgtgtgcctgaactgcggcttcgagacacacgcagccgagcaagccgccctgaacatcgccagatcctggctgttcctgcggagccaggagtacaagaaataccagacaaacaagacaaccggcaacaccgataagagagccttcgtcgagacctggcagtccttttaccggaagaagcttaaggaggtgtggaaacctgccgtgcggtctggcggatctggcggaggctccaccagccccaagaaaaagagaaaagtctaagctgccttctgcggggcttgccttctggccatgcccttcttctctcccttgcacctgtacctcttggtctttgaataaagcctgagtaggaaggctagcaaaaaaaaaaaaaaaaaaaaaaaaaaaaaaaaaaaaaaaaaaaaaaaaaaaaaaaaaaaaaaaaaaaaaaaaaaaaaaaa

SEQ ID NO: 13241 - RNA, 5785 nt, synthetic construct
  source 1..5785: mol_type = other RNA
aggaaataagagagaaaagaagagtaagaagaaatataagagccaccatggcccctaagaagaagcgtaaagtgagccggatggaacgcctcgtctacgaggtgcggcagaagtgcagaaacatcgaggacatctgcatctcctgcggatctctgaacgtgaccctggagcacccactgttcatcggcggcatgtgccagaactgtaaaaactgttttctggagtgtgcctatcaatacgacgatgacggctaccagagctactgcaccatctgttgcggcggaagagaggtgctgatgtgtggaaataacaactgctgccggtgcttctgcgtggaatgcgtggacctgctggtgggccccggcgccgcccaggccgctattaaggaagatccttggaactgctacatgtgcggccacaagggcacatacggcctgctgagacggagagaggactggcctagcagactgcagatgttcttcgccaataaccacgaccaggagttcgacccccctaaggtgtaccctcccgtccccgccgagaagagaaagcccatccgggtcctgagcctgttcgatggcatcgccaccggtctgctggtgctgaaggacctgggcatccaggtggataggtacattgcctccgaggtgtgcgaggactccatcaccgtgggaatggtgcgtcatcagggcaagatcatgtacgtgggcgacgtgcggagcgtgacacagaagcatatccaggagtggggccctttcgacctggtgatcggcggcagcccttgcaatgacctgagcatcgtgaacccagcccggaagggcctgtacgagggaaccggcagactgttcttcgagttttacagactgctgcacgacgcccggcctaaggaaggcgacgaccggcccttcttttggctgttcgagaatgtggtggccatgggagtcagcgacaagcgggatattagccggttcctggagagcaaccccgtgatgatcgatgccaaggaagtgagcgccgcccaccgggccagatacttctggggcaatctgcctggcatgaacagacccctggccagcaccgtgaacgacaagctggagctgcaggagtgcctggagcacggccggatcgccaagttcagcaaggtgagaaccatcaccacccgaagcaacagcatcaaacaaggcaaggaccagcactttcctgtgttcatgaacgagaaggaggacatcctgtggtgtaccgagatggagagagtgttcgggttcccagtccactacacagatgtcagcaacatgtctagactggccagacagagactgctgggaagaagctggtccgtccctgtgatcagacacctgttcgcccctctgaaggagtacttcgcctgcgtgagcagcggcaacagcaacgccaacagccggggccccagcttctctagcggcctggtgccactgtccctgagagggagccacatgggccccatggagatctacaaaaccgtgagcgcctggaagcggcagcctgtgcgcgtgctgagcctgtttcggaatatcgataaagtcctgaaaagcctgggattcctggagagcggctctggctccggcggtggcaccctgaagtacgtggaggatgtgacaaacgtggtcagacgggatgtggagaagtggggccccttcgatctggtgtacggcagcacccaacccctgggcagctcttgtgaccggtgccctggctggtacatgtttcagttccaccggatcctgcagtacgccctgccgagacaggagtcccagcggccattcttttggattttcatggacaacttgctgctgaccgaggatgaccaggaaactaccactcggttcctgcagaccgaagccgtgaccctgcaggacgtgagaggccgggactaccagaacgccatgcgggtgtggtccaacatccctggactgaaaagcaagcacgcacctctgacccctaaagaagaggagtacctgcaggcccaggtgcggagcagaagcaagctggacgcccctaaggtggatctgctggtgaagaattgcctcctgcccctgagagagtacttcaagtatttcagccagaatagtctgcccctgggaggcagcggcggcggcagcagccagggcctgctgaccttcagggacgtggccatcgagttcagccaggaggagtggggctgcctgaaccacacccagagggagctgtacagggacgtgatgctggagaactacggccacctgctgttcctgggcctgatcgtgagcaagcccgacctggtgagcttcctggagcagaagaaggacccctgggacgtgaagaggaagaagaccgtggccttccaccccggcaggtgggagggcggcccaagcagcggcgcccctcctcccagcggcggcagcccagccggctccccaacctctaccgaggagggcacctctgagtccgccacccccgagagcggccctggcacctccaccgagcccagcgagggcagcgcacccggcagccctgccggcagccccacctccacagaggagggaaccagcaccgagcccagcgaaggcagcgccccaggcaccagcaccgagcctagtgagcaggagattaaacggatcaacaagatcagaagaagacttgtgaaagacagcaacaccaagaaggccggcaagacaggccccatgaaaaccctgctggttagagtgatgacacccgatctgagagagcggctggaaaacctgagaaagaagcctgaaaatatcccccagcccatcagcaatacatctagagccaacctgaataagctgctgaccgattacaccgaaatgaagaaggcgatcctgcatgtgtactgggaagagttccagaaggaccctgtgggcctgatgagccgggtggcccagcctgccagcaagaagatcgatcagaacaagctgaaacctgagatggacgagaagggcaacctgaccaccgccggctttgcctgctctcagtgtggccagcccctgttcgtgtacaagctggagcaggtgtctgagaagggcaaggcttacaccaactacttcggacggtgcaatgtggccgagcacgaaaagctgatcctgctggcccagctgaagcccgagaaggatagcgacgaagccgtgacatatagcctgggaaagtttgggcagagggccctggatttctacagcattcatgtgaccaaggagtccacccaccccgtgaagcccctggcccagatcgccggaaacagatacgcctccggacctgtgggaaaggccctgagcgacgcatgtatgggcacaatcgcctccttcctgtctaagtaccaggacatcatcatcgaacaccagaaggtggtgaagggcaaccagaagagactggagagcctgcgggagctggccggcaaggaaaacctggaataccctagcgtgaccctgccacctcagcctcacaccaaggagggcgttgatgcctacaacgaagtgatcgcccgggtgcgaatgtgggtgaacctgaacctgtggcagaagctgaagctaagcagagatgatgccaagcctctgctgagactgaagggattcccttcctttcctctggtcgagagacaggccaacgaagtggactggtgggacatggtgtgtaacgtgaagaagctgatcaacgagaaaaaggaggatggcaaggtgttttggcagaatctggctggctacaagagacaggaagccctgagaccatacctgagcagcgaggaagatcggaagaagggaaagaaattcgctcggtaccagctgggcgacctgctgctgcacctggaaaagaagcacggcgaggactggggaaaggtgtacgacgaggcctgggagcggattgacaagaaagtggaaggcctgagcaagcacatcaagctggaagaggaacggagaagcgaggacgcccagagcaaggccgccctgaccgactggctgcgggctaaggccagcttcgtgatcgagggcctgaaggaggccgacaaggacgagttctgcagatgcgagctgaagctgcagaagtggtacggggacctgcggggaaagcccttcgccatcgaagccgagaacagcatcctggacatcagcggcttcagcaagcagtacaactgtgccttcatctggcagaaggacggcgtgaagaagctgaacctgtacctgatcatcaactacttcaagggcggcaagctgcggttcaagaagatcaaacctgaagccttcgaagccaacagattctacaccgtgatcaacaaaaagagcggcgagatcgtgcccatggaggtgaacttcaacttcgacgaccccaacctgatcatcctgcctctggcctttggcaagagacagggcagagaattcatctggaacgacctgctgtccctggaaaccggcagcctgaagctggccaacggaagagtgatcgagaagacactgtacaacagaagaacccggcaggatgagcctgccctgttcgtggccctgaccttcgagcggcgggaggtcctggactcctccaatatcaaaccaatgaacctgatcggcgtggcaagaggcgaaaacatccccgccgtgatcgccctgaccgaccccgagggctgcccactgagccggtttaaggatagcctgggaaacccaacccacatcctgagaatcggcgagagctataaggagaagcagcggaccatccaggccaagaaggaggtggagcagcggagagccggcggctacagccggaagtacgccagcaaagccaagaatctggcagacgatatggtgagaaacaccgctagagatctgctgtactacgccgtgacccaggatgccatgctgatcttcgccaacctgagccggggcttcggccggcagggcaagcggaccttcatggccgagagacagtacacacggatggaggactggctgaccgccaagctggcctacgagggcctgagcaagacctacctgtccaagacactggcccagtacacctccaagacatgcagcaactgtgggtttaccatcaccagcgccgactacgacagggtgctggagaagctgaagaagacagcaacaggctggatgaccacaattaacggcaaggagctgaaggtggagggccagattacctactacaacagatacaagagacagaacgtagtcaaggacctgtccgtcgagctggatagactgagcgaagaatctgtgaacaacgacatctcctcctggacaaagggcagaagcggagaagctctgagcctcctgaagaaaagattctcccatagacccgtgcaggagaagttcgtgtgcctgaactgcggcttcgagacacacgcagccgagcaagccgccctgaacatcgccagatcctggctgttcctgcggagccaggagtacaagaaataccagacaaacaagacaaccggcaacaccgataagagagccttcgtcgagacctggcagtccttttaccggaagaagcttaaggaggtgtggaaacctgccgtgcggtctggcggatctggcggaggctccaccagccccaagaaaaagagaaaagtctaagctgccttctgcggggcttgccttctggccatgcccttcttctctcccttgcacctgtacctcttggtctttgaataaagcctgagtaggaaggctagcaaaaaaaaaaaaaaaaaaaaaaaaaaaaaaaaaaaaaaaaaaaaaaaaaaaaaaaaaaaaaaaaaaaaaaaaaaaaaaaa

SEQ ID NO: 13242 - RNA, 5785 nt, synthetic construct
  source 1..5785: mol_type = other RNA
aggaaataagagagaaaagaagagtaagaagaaatataagagccaccatggcccctaagaagaagcgtaaagtgagccggatggaacgcctcgtctacgaggtgcggcagaagtgcagaaacatcgaggacatctgcatctcctgcggatctctgaacgtgaccctggagcacccactgttcatcggcggcatgtgccagaactgtaaaaactgttttctggagtgtgcctatcaatacgacgatgacggctaccagagctactgcaccatctgttgcggcggaagagaggtgctgatgtgtggaaataacaactgctgccggtgcttctgcgtggaatgcgtggacctgctggtgggccccggcgccgcccaggccgctattaaggaagatccttggaactgctacatgtgcggccacaagggcacatacggcctgctgagacggagagaggactggcctagcagactgcagatgttcttcgccaataaccacgaccaggagttcgacccccctaaggtgtaccctcccgtccccgccgagaagagaaagcccatccgggtcctgagcctgttcgatggcatcgccaccggtctgctggtgctgaaggacctgggcatccaggtggataggtacattgcctccgaggtgtgcgaggactccatcaccgtgggaatggtgcgtcatcagggcaagatcatgtacgtgggcgacgtgcggagcgtgacacagaagcatatccaggagtggggccctttcgacctggtgatcggcggcagcccttgcaatgacctgagcatcgtgaacccagcccggaagggcctgtacgagggaaccggcagactgttcttcgagttttacagactgctgcacgacgcccggcctaaggaaggcgacgaccggcccttcttttggctgttcgagaatgtggtggccatgggagtcagcgacaagcgggatattagccggttcctggagagcaaccccgtgatgatcgatgccaaggaagtgagcgccgcccaccgggccagatacttctggggcaatctgcctggcatgaacagacccctggccagcaccgtgaacgacaagctggagctgcaggagtgcctggagcacggccggatcgccaagttcagcaaggtgagaaccatcaccacccgaagcaacagcatcaaacaaggcaaggaccagcactttcctgtgttcatgaacgagaaggaggacatcctgtggtgtaccgagatggagagagtgttcgggttcccagtccactacacagatgtcagcaacatgtctagactggccagacagagactgctgggaagaagctggtccgtccctgtgatcagacacctgttcgcccctctgaaggagtacttcgcctgcgtgagcagcggcaacagcaacgccaacagccggggccccagcttctctagcggcctggtgccactgtccctgagagggagccacatgggccccatggagatctacaaaaccgtgagcgcctggaagcggcagcctgtgcgcgtgctgagcctgtttcggaatatcgataaagtcctgaaaagcctgggattcctggagagcggctctggctccggcggtggcaccctgaagtacgtggaggatgtgacaaacgtggtcagacgggatgtggagaagtggggccccttcgatctggtgtacggcagcacccaacccctgggcagctcttgtgaccggtgccctggctggtacatgtttcagttccaccggatcctgcagtacgccctgccgagacaggagtcccagcggccattcttttggattttcatggacaacttgctgctgaccgaggatgaccaggaaactaccactcggttcctgcagaccgaagccgtgaccctgcaggacgtgagaggccgggactaccagaacgccatgcgggtgtggtccaacatccctggactgaaaagcaagcacgcacctctgacccctaaagaagaggagtacctgcaggcccaggtgcggagcagaagcaagctggacgcccctaaggtggatctgctggtgaagaattgcctcctgcccctgagagagtacttcaagtatttcagccagaatagtctgcccctgggaggcagcggcggcggcatgctggcccccgtgaccttcgaggacgtgaccgtggtgttcaccgaggccgagtgggtgaccctgagcaccgagcagaagaacctgtacaaggaggtgaccctggagacctacaggaacctgctgagcctggccgagcccacccccgagacctaccccggccccagctgcctgctgcccttcagctgccagcagttcctgagccagcacgtgctgcagatcttccccggcgtgtgcgccgagggcggcccaagcagcggcgcccctcctcccagcggcggcagcccagccggctccccaacctctaccgaggagggcacctctgagtccgccacccccgagagcggccctggcacctccaccgagcccagcgagggcagcgcacccggcagccctgccggcagccccacctccacagaggagggaaccagcaccgagcccagcgaaggcagcgccccaggcaccagcaccgagcctagtgagcaggagattaaacggatcaacaagatcagaagaagacttgtgaaagacagcaacaccaagaaggccggcaagacaggccccatgaaaaccctgctggttagagtgatgacacccgatctgagagagcggctggaaaacctgagaaagaagcctgaaaatatcccccagcccatcagcaatacatctagagccaacctgaataagctgctgaccgattacaccgaaatgaagaaggcgatcctgcatgtgtactgggaagagttccagaaggaccctgtgggcctgatgagccgggtggcccagcctgccagcaagaagatcgatcagaacaagctgaaacctgagatggacgagaagggcaacctgaccaccgccggctttgcctgctctcagtgtggccagcccctgttcgtgtacaagctggagcaggtgtctgagaagggcaaggcttacaccaactacttcggacggtgcaatgtggccgagcacgaaaagctgatcctgctggcccagctgaagcccgagaaggatagcgacgaagccgtgacatatagcctgggaaagtttgggcagagggccctggatttctacagcattcatgtgaccaaggagtccacccaccccgtgaagcccctggcccagatcgccggaaacagatacgcctccggacctgtgggaaaggccctgagcgacgcatgtatgggcacaatcgcctccttcctgtctaagtaccaggacatcatcatcgaacaccagaaggtggtgaagggcaaccagaagagactggagagcctgcgggagctggccggcaaggaaaacctggaataccctagcgtgaccctgccacctcagcctcacaccaaggagggcgttgatgcctacaacgaagtgatcgcccgggtgcgaatgtgggtgaacctgaacctgtggcagaagctgaagctaagcagagatgatgccaagcctctgctgagactgaagggattcccttcctttcctctggtcgagagacaggccaacgaagtggactggtgggacatggtgtgtaacgtgaagaagctgatcaacgagaaaaaggaggatggcaaggtgttttggcagaatctggctggctacaagagacaggaagccctgagaccatacctgagcagcgaggaagatcggaagaagggaaagaaattcgctcggtaccagctgggcgacctgctgctgcacctggaaaagaagcacggcgaggactggggaaaggtgtacgacgaggcctgggagcggattgacaagaaagtggaaggcctgagcaagcacatcaagctggaagaggaacggagaagcgaggacgcccagagcaaggccgccctgaccgactggctgcgggctaaggccagcttcgtgatcgagggcctgaaggaggccgacaaggacgagttctgcagatgcgagctgaagctgcagaagtggtacggggacctgcggggaaagcccttcgccatcgaagccgagaacagcatcctggacatcagcggcttcagcaagcagtacaactgtgccttcatctggcagaaggacggcgtgaagaagctgaacctgtacctgatcatcaactacttcaagggcggcaagctgcggttcaagaagatcaaacctgaagccttcgaagccaacagattctacaccgtgatcaacaaaaagagcggcgagatcgtgcccatggaggtgaacttcaacttcgacgaccccaacctgatcatcctgcctctggcctttggcaagagacagggcagagaattcatctggaacgacctgctgtccctggaaaccggcagcctgaagctggccaacggaagagtgatcgagaagacactgtacaacagaagaacccggcaggatgagcctgccctgttcgtggccctgaccttcgagcggcgggaggtcctggactcctccaatatcaaaccaatgaacctgatcggcgtggcaagaggcgaaaacatccccgccgtgatcgccctgaccgaccccgagggctgcccactgagccggtttaaggatagcctgggaaacccaacccacatcctgagaatcggcgagagctataaggagaagcagcggaccatccaggccaagaaggaggtggagcagcggagagccggcggctacagccggaagtacgccagcaaagccaagaatctggcagacgatatggtgagaaacaccgctagagatctgctgtactacgccgtgacccaggatgccatgctgatcttcgccaacctgagccggggcttcggccggcagggcaagcggaccttcatggccgagagacagtacacacggatggaggactggctgaccgccaagctggcctacgagggcctgagcaagacctacctgtccaagacactggcccagtacacctccaagacatgcagcaactgtgggtttaccatcaccagcgccgactacgacagggtgctggagaagctgaagaagacagcaacaggctggatgaccacaattaacggcaaggagctgaaggtggagggccagattacctactacaacagatacaagagacagaacgtagtcaaggacctgtccgtcgagctggatagactgagcgaagaatctgtgaacaacgacatctcctcctggacaaagggcagaagcggagaagctctgagcctcctgaagaaaagattctcccatagacccgtgcaggagaagttcgtgtgcctgaactgcggcttcgagacacacgcagccgagcaagccgccctgaacatcgccagatcctggctgttcctgcggagccaggagtacaagaaataccagacaaacaagacaaccggcaacaccgataagagagccttcgtcgagacctggcagtccttttaccggaagaagcttaaggaggtgtggaaacctgccgtgcggtctggcggatctggcggaggctccaccagccccaagaaaaagagaaaagtctaagctgccttctgcggggcttgccttctggccatgcccttcttctctcccttgcacctgtacctcttggtctttgaataaagcctgagtaggaaggctagcaaaaaaaaaaaaaaaaaaaaaaaaaaaaaaaaaaaaaaaaaaaaaaaaaaaaaaaaaaaaaaaaaaaaaaaaaaaaaaaa

SEQ ID NO: 13243 - RNA, 5785 nt, synthetic construct
  source 1..5785: mol_type = other RNA
aggaaataagagagaaaagaagagtaagaagaaatataagagccaccatggcccctaagaagaagcgtaaagtgagccggatggaacgcctcgtctacgaggtgcggcagaagtgcagaaacatcgaggacatctgcatctcctgcggatctctgaacgtgaccctggagcacccactgttcatcggcggcatgtgccagaactgtaaaaactgttttctggagtgtgcctatcaatacgacgatgacggctaccagagctactgcaccatctgttgcggcggaagagaggtgctgatgtgtggaaataacaactgctgccggtgcttctgcgtggaatgcgtggacctgctggtgggccccggcgccgcccaggccgctattaaggaagatccttggaactgctacatgtgcggccacaagggcacatacggcctgctgagacggagagaggactggcctagcagactgcagatgttcttcgccaataaccacgaccaggagttcgacccccctaaggtgtaccctcccgtccccgccgagaagagaaagcccatccgggtcctgagcctgttcgatggcatcgccaccggtctgctggtgctgaaggacctgggcatccaggtggataggtacattgcctccgaggtgtgcgaggactccatcaccgtgggaatggtgcgtcatcagggcaagatcatgtacgtgggcgacgtgcggagcgtgacacagaagcatatccaggagtggggccctttcgacctggtgatcggcggcagcccttgcaatgacctgagcatcgtgaacccagcccggaagggcctgtacgagggaaccggcagactgttcttcgagttttacagactgctgcacgacgcccggcctaaggaaggcgacgaccggcccttcttttggctgttcgagaatgtggtggccatgggagtcagcgacaagcgggatattagccggttcctggagagcaaccccgtgatgatcgatgccaaggaagtgagcgccgcccaccgggccagatacttctggggcaatctgcctggcatgaacagacccctggccagcaccgtgaacgacaagctggagctgcaggagtgcctggagcacggccggatcgccaagttcagcaaggtgagaaccatcaccacccgaagcaacagcatcaaacaaggcaaggaccagcactttcctgtgttcatgaacgagaaggaggacatcctgtggtgtaccgagatggagagagtgttcgggttcccagtccactacacagatgtcagcaacatgtctagactggccagacagagactgctgggaagaagctggtccgtccctgtgatcagacacctgttcgcccctctgaaggagtacttcgcctgcgtgagcagcggcaacagcaacgccaacagccggggccccagcttctctagcggcctggtgccactgtccctgagagggagccacatgggccccatggagatctacaaaaccgtgagcgcctggaagcggcagcctgtgcgcgtgctgagcctgtttcggaatatcgataaagtcctgaaaagcctgggattcctggagagcggctctggctccggcggtggcaccctgaagtacgtggaggatgtgacaaacgtggtcagacgggatgtggagaagtggggccccttcgatctggtgtacggcagcacccaacccctgggcagctcttgtgaccggtgccctggctggtacatgtttcagttccaccggatcctgcagtacgccctgccgagacaggagtcccagcggccattcttttggattttcatggacaacttgctgctgaccgaggatgaccaggaaactaccactcggttcctgcagaccgaagccgtgaccctgcaggacgtgagaggccgggactaccagaacgccatgcgggtgtggtccaacatccctggactgaaaagcaagcacgcacctctgacccctaaagaagaggagtacctgcaggcccaggtgcggagcagaagcaagctggacgcccctaaggtggatctgctggtgaagaattgcctcctgcccctgagagagtacttcaagtatttcagccagaatagtctgcccctgggaggcagcggcggcggcatgagccagggcagcgtgaccttcagggacgtggccatcgacttcagccaggaggagtggaagtggctgcagcccgcccagagggacctgtacaggtgcgtgatgctggagaactacggccacctggtgagcctgggcctgagcatcagcaagcccgacgtggtgagcctgctggagcagggcaaggagccctggctgggcaagagagacgtgaagagggacctgttcagcgtgctgaaggagggcggcccaagcagcggcgcccctcctcccagcggcggcagcccagccggctccccaacctctaccgaggagggcacctctgagtccgccacccccgagagcggccctggcacctccaccgagcccagcgagggcagcgcacccggcagccctgccggcagccccacctccacagaggagggaaccagcaccgagcccagcgaaggcagcgccccaggcaccagcaccgagcctagtgagcaggagattaaacggatcaacaagatcagaagaagacttgtgaaagacagcaacaccaagaaggccggcaagacaggccccatgaaaaccctgctggttagagtgatgacacccgatctgagagagcggctggaaaacctgagaaagaagcctgaaaatatcccccagcccatcagcaatacatctagagccaacctgaataagctgctgaccgattacaccgaaatgaagaaggcgatcctgcatgtgtactgggaagagttccagaaggaccctgtgggcctgatgagccgggtggcccagcctgccagcaagaagatcgatcagaacaagctgaaacctgagatggacgagaagggcaacctgaccaccgccggctttgcctgctctcagtgtggccagcccctgttcgtgtacaagctggagcaggtgtctgagaagggcaaggcttacaccaactacttcggacggtgcaatgtggccgagcacgaaaagctgatcctgctggcccagctgaagcccgagaaggatagcgacgaagccgtgacatatagcctgggaaagtttgggcagagggccctggatttctacagcattcatgtgaccaaggagtccacccaccccgtgaagcccctggcccagatcgccggaaacagatacgcctccggacctgtgggaaaggccctgagcgacgcatgtatgggcacaatcgcctccttcctgtctaagtaccaggacatcatcatcgaacaccagaaggtggtgaagggcaaccagaagagactggagagcctgcgggagctggccggcaaggaaaacctggaataccctagcgtgaccctgccacctcagcctcacaccaaggagggcgttgatgcctacaacgaagtgatcgcccgggtgcgaatgtgggtgaacctgaacctgtggcagaagctgaagctaagcagagatgatgccaagcctctgctgagactgaagggattcccttcctttcctctggtcgagagacaggccaacgaagtggactggtgggacatggtgtgtaacgtgaagaagctgatcaacgagaaaaaggaggatggcaaggtgttttggcagaatctggctggctacaagagacaggaagccctgagaccatacctgagcagcgaggaagatcggaagaagggaaagaaattcgctcggtaccagctgggcgacctgctgctgcacctggaaaagaagcacggcgaggactggggaaaggtgtacgacgaggcctgggagcggattgacaagaaagtggaaggcctgagcaagcacatcaagctggaagaggaacggagaagcgaggacgcccagagcaaggccgccctgaccgactggctgcgggctaaggccagcttcgtgatcgagggcctgaaggaggccgacaaggacgagttctgcagatgcgagctgaagctgcagaagtggtacggggacctgcggggaaagcccttcgccatcgaagccgagaacagcatcctggacatcagcggcttcagcaagcagtacaactgtgccttcatctggcagaaggacggcgtgaagaagctgaacctgtacctgatcatcaactacttcaagggcggcaagctgcggttcaagaagatcaaacctgaagccttcgaagccaacagattctacaccgtgatcaacaaaaagagcggcgagatcgtgcccatggaggtgaacttcaacttcgacgaccccaacctgatcatcctgcctctggcctttggcaagagacagggcagagaattcatctggaacgacctgctgtccctggaaaccggcagcctgaagctggccaacggaagagtgatcgagaagacactgtacaacagaagaacccggcaggatgagcctgccctgttcgtggccctgaccttcgagcggcgggaggtcctggactcctccaatatcaaaccaatgaacctgatcggcgtggcaagaggcgaaaacatccccgccgtgatcgccctgaccgaccccgagggctgcccactgagccggtttaaggatagcctgggaaacccaacccacatcctgagaatcggcgagagctataaggagaagcagcggaccatccaggccaagaaggaggtggagcagcggagagccggcggctacagccggaagtacgccagcaaagccaagaatctggcagacgatatggtgagaaacaccgctagagatctgctgtactacgccgtgacccaggatgccatgctgatcttcgccaacctgagccggggcttcggccggcagggcaagcggaccttcatggccgagagacagtacacacggatggaggactggctgaccgccaagctggcctacgagggcctgagcaagacctacctgtccaagacactggcccagtacacctccaagacatgcagcaactgtgggtttaccatcaccagcgccgactacgacagggtgctggagaagctgaagaagacagcaacaggctggatgaccacaattaacggcaaggagctgaaggtggagggccagattacctactacaacagatacaagagacagaacgtagtcaaggacctgtccgtcgagctggatagactgagcgaagaatctgtgaacaacgacatctcctcctggacaaagggcagaagcggagaagctctgagcctcctgaagaaaagattctcccatagacccgtgcaggagaagttcgtgtgcctgaactgcggcttcgagacacacgcagccgagcaagccgccctgaacatcgccagatcctggctgttcctgcggagccaggagtacaagaaataccagacaaacaagacaaccggcaacaccgataagagagccttcgtcgagacctggcagtccttttaccggaagaagcttaaggaggtgtggaaacctgccgtgcggtctggcggatctggcggaggctccaccagccccaagaaaaagagaaaagtctaagctgccttctgcggggcttgccttctggccatgcccttcttctctcccttgcacctgtacctcttggtctttgaataaagcctgagtaggaaggctagcaaaaaaaaaaaaaaaaaaaaaaaaaaaaaaaaaaaaaaaaaaaaaaaaaaaaaaaaaaaaaaaaaaaaaaaaaaaaaaaa

SEQ ID NO: 13244 - RNA, 5785 nt, synthetic construct
  source 1..5785: mol_type = other RNA
aggaaataagagagaaaagaagagtaagaagaaatataagagccaccatggcccctaagaagaagcgtaaagtgagccggatggaacgcctcgtctacgaggtgcggcagaagtgcagaaacatcgaggacatctgcatctcctgcggatctctgaacgtgaccctggagcacccactgttcatcggcggcatgtgccagaactgtaaaaactgttttctggagtgtgcctatcaatacgacgatgacggctaccagagctactgcaccatctgttgcggcggaagagaggtgctgatgtgtggaaataacaactgctgccggtgcttctgcgtggaatgcgtggacctgctggtgggccccggcgccgcccaggccgctattaaggaagatccttggaactgctacatgtgcggccacaagggcacatacggcctgctgagacggagagaggactggcctagcagactgcagatgttcttcgccaataaccacgaccaggagttcgacccccctaaggtgtaccctcccgtccccgccgagaagagaaagcccatccgggtcctgagcctgttcgatggcatcgccaccggtctgctggtgctgaaggacctgggcatccaggtggataggtacattgcctccgaggtgtgcgaggactccatcaccgtgggaatggtgcgtcatcagggcaagatcatgtacgtgggcgacgtgcggagcgtgacacagaagcatatccaggagtggggccctttcgacctggtgatcggcggcagcccttgcaatgacctgagcatcgtgaacccagcccggaagggcctgtacgagggaaccggcagactgttcttcgagttttacagactgctgcacgacgcccggcctaaggaaggcgacgaccggcccttcttttggctgttcgagaatgtggtggccatgggagtcagcgacaagcgggatattagccggttcctggagagcaaccccgtgatgatcgatgccaaggaagtgagcgccgcccaccgggccagatacttctggggcaatctgcctggcatgaacagacccctggccagcaccgtgaacgacaagctggagctgcaggagtgcctggagcacggccggatcgccaagttcagcaaggtgagaaccatcaccacccgaagcaacagcatcaaacaaggcaaggaccagcactttcctgtgttcatgaacgagaaggaggacatcctgtggtgtaccgagatggagagagtgttcgggttcccagtccactacacagatgtcagcaacatgtctagactggccagacagagactgctgggaagaagctggtccgtccctgtgatcagacacctgttcgcccctctgaaggagtacttcgcctgcgtgagcagcggcaacagcaacgccaacagccggggccccagcttctctagcggcctggtgccactgtccctgagagggagccacatgggccccatggagatctacaaaaccgtgagcgcctggaagcggcagcctgtgcgcgtgctgagcctgtttcggaatatcgataaagtcctgaaaagcctgggattcctggagagcggctctggctccggcggtggcaccctgaagtacgtggaggatgtgacaaacgtggtcagacgggatgtggagaagtggggccccttcgatctggtgtacggcagcacccaacccctgggcagctcttgtgaccggtgccctggctggtacatgtttcagttccaccggatcctgcagtacgccctgccgagacaggagtcccagcggccattcttttggattttcatggacaacttgctgctgaccgaggatgaccaggaaactaccactcggttcctgcagaccgaagccgtgaccctgcaggacgtgagaggccgggactaccagaacgccatgcgggtgtggtccaacatccctggactgaaaagcaagcacgcacctctgacccctaaagaagaggagtacctgcaggcccaggtgcggagcagaagcaagctggacgcccctaaggtggatctgctggtgaagaattgcctcctgcccctgagagagtacttcaagtatttcagccagaatagtctgcccctgggaggcagcggcggcggcatgggcaggctgatgttccaggacgtggccatcgacttcacccaggaggagtgggagtgcctggacctgagccagagggacctgtacagggacgtgatgctggagacctacggcaacctggccagcctgggcctggtggtgagcaagcccgacctggtgaccttcctggagcagatgaagaacccctgggacgtgaggaggaccgacaccaaggccacctaccccgccgtgagcagccacaacggcggcccaagcagcggcgcccctcctcccagcggcggcagcccagccggctccccaacctctaccgaggagggcacctctgagtccgccacccccgagagcggccctggcacctccaccgagcccagcgagggcagcgcacccggcagccctgccggcagccccacctccacagaggagggaaccagcaccgagcccagcgaaggcagcgccccaggcaccagcaccgagcctagtgagcaggagattaaacggatcaacaagatcagaagaagacttgtgaaagacagcaacaccaagaaggccggcaagacaggccccatgaaaaccctgctggttagagtgatgacacccgatctgagagagcggctggaaaacctgagaaagaagcctgaaaatatcccccagcccatcagcaatacatctagagccaacctgaataagctgctgaccgattacaccgaaatgaagaaggcgatcctgcatgtgtactgggaagagttccagaaggaccctgtgggcctgatgagccgggtggcccagcctgccagcaagaagatcgatcagaacaagctgaaacctgagatggacgagaagggcaacctgaccaccgccggctttgcctgctctcagtgtggccagcccctgttcgtgtacaagctggagcaggtgtctgagaagggcaaggcttacaccaactacttcggacggtgcaatgtggccgagcacgaaaagctgatcctgctggcccagctgaagcccgagaaggatagcgacgaagccgtgacatatagcctgggaaagtttgggcagagggccctggatttctacagcattcatgtgaccaaggagtccacccaccccgtgaagcccctggcccagatcgccggaaacagatacgcctccggacctgtgggaaaggccctgagcgacgcatgtatgggcacaatcgcctccttcctgtctaagtaccaggacatcatcatcgaacaccagaaggtggtgaagggcaaccagaagagactggagagcctgcgggagctggccggcaaggaaaacctggaataccctagcgtgaccctgccacctcagcctcacaccaaggagggcgttgatgcctacaacgaagtgatcgcccgggtgcgaatgtgggtgaacctgaacctgtggcagaagctgaagctaagcagagatgatgccaagcctctgctgagactgaagggattcccttcctttcctctggtcgagagacaggccaacgaagtggactggtgggacatggtgtgtaacgtgaagaagctgatcaacgagaaaaaggaggatggcaaggtgttttggcagaatctggctggctacaagagacaggaagccctgagaccatacctgagcagcgaggaagatcggaagaagggaaagaaattcgctcggtaccagctgggcgacctgctgctgcacctggaaaagaagcacggcgaggactggggaaaggtgtacgacgaggcctgggagcggattgacaagaaagtggaaggcctgagcaagcacatcaagctggaagaggaacggagaagcgaggacgcccagagcaaggccgccctgaccgactggctgcgggctaaggccagcttcgtgatcgagggcctgaaggaggccgacaaggacgagttctgcagatgcgagctgaagctgcagaagtggtacggggacctgcggggaaagcccttcgccatcgaagccgagaacagcatcctggacatcagcggcttcagcaagcagtacaactgtgccttcatctggcagaaggacggcgtgaagaagctgaacctgtacctgatcatcaactacttcaagggcggcaagctgcggttcaagaagatcaaacctgaagccttcgaagccaacagattctacaccgtgatcaacaaaaagagcggcgagatcgtgcccatggaggtgaacttcaacttcgacgaccccaacctgatcatcctgcctctggcctttggcaagagacagggcagagaattcatctggaacgacctgctgtccctggaaaccggcagcctgaagctggccaacggaagagtgatcgagaagacactgtacaacagaagaacccggcaggatgagcctgccctgttcgtggccctgaccttcgagcggcgggaggtcctggactcctccaatatcaaaccaatgaacctgatcggcgtggcaagaggcgaaaacatccccgccgtgatcgccctgaccgaccccgagggctgcccactgagccggtttaaggatagcctgggaaacccaacccacatcctgagaatcggcgagagctataaggagaagcagcggaccatccaggccaagaaggaggtggagcagcggagagccggcggctacagccggaagtacgccagcaaagccaagaatctggcagacgatatggtgagaaacaccgctagagatctgctgtactacgccgtgacccaggatgccatgctgatcttcgccaacctgagccggggcttcggccggcagggcaagcggaccttcatggccgagagacagtacacacggatggaggactggctgaccgccaagctggcctacgagggcctgagcaagacctacctgtccaagacactggcccagtacacctccaagacatgcagcaactgtgggtttaccatcaccagcgccgactacgacagggtgctggagaagctgaagaagacagcaacaggctggatgaccacaattaacggcaaggagctgaaggtggagggccagattacctactacaacagatacaagagacagaacgtagtcaaggacctgtccgtcgagctggatagactgagcgaagaatctgtgaacaacgacatctcctcctggacaaagggcagaagcggagaagctctgagcctcctgaagaaaagattctcccatagacccgtgcaggagaagttcgtgtgcctgaactgcggcttcgagacacacgcagccgagcaagccgccctgaacatcgccagatcctggctgttcctgcggagccaggagtacaagaaataccagacaaacaagacaaccggcaacaccgataagagagccttcgtcgagacctggcagtccttttaccggaagaagcttaaggaggtgtggaaacctgccgtgcggtctggcggatctggcggaggctccaccagccccaagaaaaagagaaaagtctaagctgccttctgcggggcttgccttctggccatgcccttcttctctcccttgcacctgtacctcttggtctttgaataaagcctgagtaggaaggctagcaaaaaaaaaaaaaaaaaaaaaaaaaaaaaaaaaaaaaaaaaaaaaaaaaaaaaaaaaaaaaaaaaaaaaaaaaaaaaaaa

SEQ ID NO: 13245 - RNA, 5785 nt, synthetic construct
  source 1..5785: mol_type = other RNA
aggaaataagagagaaaagaagagtaagaagaaatataagagccaccatggcccctaagaagaagcgtaaagtgagccggatggaacgcctcgtctacgaggtgcggcagaagtgcagaaacatcgaggacatctgcatctcctgcggatctctgaacgtgaccctggagcacccactgttcatcggcggcatgtgccagaactgtaaaaactgttttctggagtgtgcctatcaatacgacgatgacggctaccagagctactgcaccatctgttgcggcggaagagaggtgctgatgtgtggaaataacaactgctgccggtgcttctgcgtggaatgcgtggacctgctggtgggccccggcgccgcccaggccgctattaaggaagatccttggaactgctacatgtgcggccacaagggcacatacggcctgctgagacggagagaggactggcctagcagactgcagatgttcttcgccaataaccacgaccaggagttcgacccccctaaggtgtaccctcccgtccccgccgagaagagaaagcccatccgggtcctgagcctgttcgatggcatcgccaccggtctgctggtgctgaaggacctgggcatccaggtggataggtacattgcctccgaggtgtgcgaggactccatcaccgtgggaatggtgcgtcatcagggcaagatcatgtacgtgggcgacgtgcggagcgtgacacagaagcatatccaggagtggggccctttcgacctggtgatcggcggcagcccttgcaatgacctgagcatcgtgaacccagcccggaagggcctgtacgagggaaccggcagactgttcttcgagttttacagactgctgcacgacgcccggcctaaggaaggcgacgaccggcccttcttttggctgttcgagaatgtggtggccatgggagtcagcgacaagcgggatattagccggttcctggagagcaaccccgtgatgatcgatgccaaggaagtgagcgccgcccaccgggccagatacttctggggcaatctgcctggcatgaacagacccctggccagcaccgtgaacgacaagctggagctgcaggagtgcctggagcacggccggatcgccaagttcagcaaggtgagaaccatcaccacccgaagcaacagcatcaaacaaggcaaggaccagcactttcctgtgttcatgaacgagaaggaggacatcctgtggtgtaccgagatggagagagtgttcgggttcccagtccactacacagatgtcagcaacatgtctagactggccagacagagactgctgggaagaagctggtccgtccctgtgatcagacacctgttcgcccctctgaaggagtacttcgcctgcgtgagcagcggcaacagcaacgccaacagccggggccccagcttctctagcggcctggtgccactgtccctgagagggagccacatgggccccatggagatctacaaaaccgtgagcgcctggaagcggcagcctgtgcgcgtgctgagcctgtttcggaatatcgataaagtcctgaaaagcctgggattcctggagagcggctctggctccggcggtggcaccctgaagtacgtggaggatgtgacaaacgtggtcagacgggatgtggagaagtggggccccttcgatctggtgtacggcagcacccaacccctgggcagctcttgtgaccggtgccctggctggtacatgtttcagttccaccggatcctgcagtacgccctgccgagacaggagtcccagcggccattcttttggattttcatggacaacttgctgctgaccgaggatgaccaggaaactaccactcggttcctgcagaccgaagccgtgaccctgcaggacgtgagaggccgggactaccagaacgccatgcgggtgtggtccaacatccctggactgaaaagcaagcacgcacctctgacccctaaagaagaggagtacctgcaggcccaggtgcggagcagaagcaagctggacgcccctaaggtggatctgctggtgaagaattgcctcctgcccctgagagagtacttcaagtatttcagccagaatagtctgcccctgggaggcagcggcggcggcttcctgatgcccgtgaccttcgaggaggtggccgtgtacttcacccccggccagggcgccctgctggaccccgcccagagggccctgtacagggacgtgatgcaggagaactacgagaccgtggccagcctgggcttcagcatccccaagcccgacctgatcgcccagctggagcagggcgaggagccctgggtgcccgacctgcagcccagcaaggagatggtgatcctgaggggcatctgcggcggcccaagcagcggcgcccctcctcccagcggcggcagcccagccggctccccaacctctaccgaggagggcacctctgagtccgccacccccgagagcggccctggcacctccaccgagcccagcgagggcagcgcacccggcagccctgccggcagccccacctccacagaggagggaaccagcaccgagcccagcgaaggcagcgccccaggcaccagcaccgagcctagtgagcaggagattaaacggatcaacaagatcagaagaagacttgtgaaagacagcaacaccaagaaggccggcaagacaggccccatgaaaaccctgctggttagagtgatgacacccgatctgagagagcggctggaaaacctgagaaagaagcctgaaaatatcccccagcccatcagcaatacatctagagccaacctgaataagctgctgaccgattacaccgaaatgaagaaggcgatcctgcatgtgtactgggaagagttccagaaggaccctgtgggcctgatgagccgggtggcccagcctgccagcaagaagatcgatcagaacaagctgaaacctgagatggacgagaagggcaacctgaccaccgccggctttgcctgctctcagtgtggccagcccctgttcgtgtacaagctggagcaggtgtctgagaagggcaaggcttacaccaactacttcggacggtgcaatgtggccgagcacgaaaagctgatcctgctggcccagctgaagcccgagaaggatagcgacgaagccgtgacatatagcctgggaaagtttgggcagagggccctggatttctacagcattcatgtgaccaaggagtccacccaccccgtgaagcccctggcccagatcgccggaaacagatacgcctccggacctgtgggaaaggccctgagcgacgcatgtatgggcacaatcgcctccttcctgtctaagtaccaggacatcatcatcgaacaccagaaggtggtgaagggcaaccagaagagactggagagcctgcgggagctggccggcaaggaaaacctggaataccctagcgtgaccctgccacctcagcctcacaccaaggagggcgttgatgcctacaacgaagtgatcgcccgggtgcgaatgtgggtgaacctgaacctgtggcagaagctgaagctaagcagagatgatgccaagcctctgctgagactgaagggattcccttcctttcctctggtcgagagacaggccaacgaagtggactggtgggacatggtgtgtaacgtgaagaagctgatcaacgagaaaaaggaggatggcaaggtgttttggcagaatctggctggctacaagagacaggaagccctgagaccatacctgagcagcgaggaagatcggaagaagggaaagaaattcgctcggtaccagctgggcgacctgctgctgcacctggaaaagaagcacggcgaggactggggaaaggtgtacgacgaggcctgggagcggattgacaagaaagtggaaggcctgagcaagcacatcaagctggaagaggaacggagaagcgaggacgcccagagcaaggccgccctgaccgactggctgcgggctaaggccagcttcgtgatcgagggcctgaaggaggccgacaaggacgagttctgcagatgcgagctgaagctgcagaagtggtacggggacctgcggggaaagcccttcgccatcgaagccgagaacagcatcctggacatcagcggcttcagcaagcagtacaactgtgccttcatctggcagaaggacggcgtgaagaagctgaacctgtacctgatcatcaactacttcaagggcggcaagctgcggttcaagaagatcaaacctgaagccttcgaagccaacagattctacaccgtgatcaacaaaaagagcggcgagatcgtgcccatggaggtgaacttcaacttcgacgaccccaacctgatcatcctgcctctggcctttggcaagagacagggcagagaattcatctggaacgacctgctgtccctggaaaccggcagcctgaagctggccaacggaagagtgatcgagaagacactgtacaacagaagaacccggcaggatgagcctgccctgttcgtggccctgaccttcgagcggcgggaggtcctggactcctccaatatcaaaccaatgaacctgatcggcgtggcaagaggcgaaaacatccccgccgtgatcgccctgaccgaccccgagggctgcccactgagccggtttaaggatagcctgggaaacccaacccacatcctgagaatcggcgagagctataaggagaagcagcggaccatccaggccaagaaggaggtggagcagcggagagccggcggctacagccggaagtacgccagcaaagccaagaatctggcagacgatatggtgagaaacaccgctagagatctgctgtactacgccgtgacccaggatgccatgctgatcttcgccaacctgagccggggcttcggccggcagggcaagcggaccttcatggccgagagacagtacacacggatggaggactggctgaccgccaagctggcctacgagggcctgagcaagacctacctgtccaagacactggcccagtacacctccaagacatgcagcaactgtgggtttaccatcaccagcgccgactacgacagggtgctggagaagctgaagaagacagcaacaggctggatgaccacaattaacggcaaggagctgaaggtggagggccagattacctactacaacagatacaagagacagaacgtagtcaaggacctgtccgtcgagctggatagactgagcgaagaatctgtgaacaacgacatctcctcctggacaaagggcagaagcggagaagctctgagcctcctgaagaaaagattctcccatagacccgtgcaggagaagttcgtgtgcctgaactgcggcttcgagacacacgcagccgagcaagccgccctgaacatcgccagatcctggctgttcctgcggagccaggagtacaagaaataccagacaaacaagacaaccggcaacaccgataagagagccttcgtcgagacctggcagtccttttaccggaagaagcttaaggaggtgtggaaacctgccgtgcggtctggcggatctggcggaggctccaccagccccaagaaaaagagaaaagtctaagctgccttctgcggggcttgccttctggccatgcccttcttctctcccttgcacctgtacctcttggtctttgaataaagcctgagtaggaaggctagcaaaaaaaaaaaaaaaaaaaaaaaaaaaaaaaaaaaaaaaaaaaaaaaaaaaaaaaaaaaaaaaaaaaaaaaaaaaaaaaa

SEQ ID NO: 13246 - RNA, 5785 nt, synthetic construct
  source 1..5785: mol_type = other RNA
aggaaataagagagaaaagaagagtaagaagaaatataagagccaccatggcccctaagaagaagcgtaaagtgagccggatggaacgcctcgtctacgaggtgcggcagaagtgcagaaacatcgaggacatctgcatctcctgcggatctctgaacgtgaccctggagcacccactgttcatcggcggcatgtgccagaactgtaaaaactgttttctggagtgtgcctatcaatacgacgatgacggctaccagagctactgcaccatctgttgcggcggaagagaggtgctgatgtgtggaaataacaactgctgccggtgcttctgcgtggaatgcgtggacctgctggtgggccccggcgccgcccaggccgctattaaggaagatccttggaactgctacatgtgcggccacaagggcacatacggcctgctgagacggagagaggactggcctagcagactgcagatgttcttcgccaataaccacgaccaggagttcgacccccctaaggtgtaccctcccgtccccgccgagaagagaaagcccatccgggtcctgagcctgttcgatggcatcgccaccggtctgctggtgctgaaggacctgggcatccaggtggataggtacattgcctccgaggtgtgcgaggactccatcaccgtgggaatggtgcgtcatcagggcaagatcatgtacgtgggcgacgtgcggagcgtgacacagaagcatatccaggagtggggccctttcgacctggtgatcggcggcagcccttgcaatgacctgagcatcgtgaacccagcccggaagggcctgtacgagggaaccggcagactgttcttcgagttttacagactgctgcacgacgcccggcctaaggaaggcgacgaccggcccttcttttggctgttcgagaatgtggtggccatgggagtcagcgacaagcgggatattagccggttcctggagagcaaccccgtgatgatcgatgccaaggaagtgagcgccgcccaccgggccagatacttctggggcaatctgcctggcatgaacagacccctggccagcaccgtgaacgacaagctggagctgcaggagtgcctggagcacggccggatcgccaagttcagcaaggtgagaaccatcaccacccgaagcaacagcatcaaacaaggcaaggaccagcactttcctgtgttcatgaacgagaaggaggacatcctgtggtgtaccgagatggagagagtgttcgggttcccagtccactacacagatgtcagcaacatgtctagactggccagacagagactgctgggaagaagctggtccgtccctgtgatcagacacctgttcgcccctctgaaggagtacttcgcctgcgtgagcagcggcaacagcaacgccaacagccggggccccagcttctctagcggcctggtgccactgtccctgagagggagccacatgggccccatggagatctacaaaaccgtgagcgcctggaagcggcagcctgtgcgcgtgctgagcctgtttcggaatatcgataaagtcctgaaaagcctgggattcctggagagcggctctggctccggcggtggcaccctgaagtacgtggaggatgtgacaaacgtggtcagacgggatgtggagaagtggggccccttcgatctggtgtacggcagcacccaacccctgggcagctcttgtgaccggtgccctggctggtacatgtttcagttccaccggatcctgcagtacgccctgccgagacaggagtcccagcggccattcttttggattttcatggacaacttgctgctgaccgaggatgaccaggaaactaccactcggttcctgcagaccgaagccgtgaccctgcaggacgtgagaggccgggactaccagaacgccatgcgggtgtggtccaacatccctggactgaaaagcaagcacgcacctctgacccctaaagaagaggagtacctgcaggcccaggtgcggagcagaagcaagctggacgcccctaaggtggatctgctggtgaagaattgcctcctgcccctgagagagtacttcaagtatttcagccagaatagtctgcccctgggaggcagcggcggcggctgcgagggcagcgtgagcttcgaggacgtgaccatggacttcagcagggaggagtggcagcagctggaccccgcccagaggtgcctgtaccaggacgtgatgctggagatctacagccacctgctgttcgtgggctacaacatccccaaccccgagatcatcagcaggatggagaagggcgaggagccctggatgagggagatccagctgccccaccagaggcacagggagagggccttcggcggcggcccaagcagcggcgcccctcctcccagcggcggcagcccagccggctccccaacctctaccgaggagggcacctctgagtccgccacccccgagagcggccctggcacctccaccgagcccagcgagggcagcgcacccggcagccctgccggcagccccacctccacagaggagggaaccagcaccgagcccagcgaaggcagcgccccaggcaccagcaccgagcctagtgagcaggagattaaacggatcaacaagatcagaagaagacttgtgaaagacagcaacaccaagaaggccggcaagacaggccccatgaaaaccctgctggttagagtgatgacacccgatctgagagagcggctggaaaacctgagaaagaagcctgaaaatatcccccagcccatcagcaatacatctagagccaacctgaataagctgctgaccgattacaccgaaatgaagaaggcgatcctgcatgtgtactgggaagagttccagaaggaccctgtgggcctgatgagccgggtggcccagcctgccagcaagaagatcgatcagaacaagctgaaacctgagatggacgagaagggcaacctgaccaccgccggctttgcctgctctcagtgtggccagcccctgttcgtgtacaagctggagcaggtgtctgagaagggcaaggcttacaccaactacttcggacggtgcaatgtggccgagcacgaaaagctgatcctgctggcccagctgaagcccgagaaggatagcgacgaagccgtgacatatagcctgggaaagtttgggcagagggccctggatttctacagcattcatgtgaccaaggagtccacccaccccgtgaagcccctggcccagatcgccggaaacagatacgcctccggacctgtgggaaaggccctgagcgacgcatgtatgggcacaatcgcctccttcctgtctaagtaccaggacatcatcatcgaacaccagaaggtggtgaagggcaaccagaagagactggagagcctgcgggagctggccggcaaggaaaacctggaataccctagcgtgaccctgccacctcagcctcacaccaaggagggcgttgatgcctacaacgaagtgatcgcccgggtgcgaatgtgggtgaacctgaacctgtggcagaagctgaagctaagcagagatgatgccaagcctctgctgagactgaagggattcccttcctttcctctggtcgagagacaggccaacgaagtggactggtgggacatggtgtgtaacgtgaagaagctgatcaacgagaaaaaggaggatggcaaggtgttttggcagaatctggctggctacaagagacaggaagccctgagaccatacctgagcagcgaggaagatcggaagaagggaaagaaattcgctcggtaccagctgggcgacctgctgctgcacctggaaaagaagcacggcgaggactggggaaaggtgtacgacgaggcctgggagcggattgacaagaaagtggaaggcctgagcaagcacatcaagctggaagaggaacggagaagcgaggacgcccagagcaaggccgccctgaccgactggctgcgggctaaggccagcttcgtgatcgagggcctgaaggaggccgacaaggacgagttctgcagatgcgagctgaagctgcagaagtggtacggggacctgcggggaaagcccttcgccatcgaagccgagaacagcatcctggacatcagcggcttcagcaagcagtacaactgtgccttcatctggcagaaggacggcgtgaagaagctgaacctgtacctgatcatcaactacttcaagggcggcaagctgcggttcaagaagatcaaacctgaagccttcgaagccaacagattctacaccgtgatcaacaaaaagagcggcgagatcgtgcccatggaggtgaacttcaacttcgacgaccccaacctgatcatcctgcctctggcctttggcaagagacagggcagagaattcatctggaacgacctgctgtccctggaaaccggcagcctgaagctggccaacggaagagtgatcgagaagacactgtacaacagaagaacccggcaggatgagcctgccctgttcgtggccctgaccttcgagcggcgggaggtcctggactcctccaatatcaaaccaatgaacctgatcggcgtggcaagaggcgaaaacatccccgccgtgatcgccctgaccgaccccgagggctgcccactgagccggtttaaggatagcctgggaaacccaacccacatcctgagaatcggcgagagctataaggagaagcagcggaccatccaggccaagaaggaggtggagcagcggagagccggcggctacagccggaagtacgccagcaaagccaagaatctggcagacgatatggtgagaaacaccgctagagatctgctgtactacgccgtgacccaggatgccatgctgatcttcgccaacctgagccggggcttcggccggcagggcaagcggaccttcatggccgagagacagtacacacggatggaggactggctgaccgccaagctggcctacgagggcctgagcaagacctacctgtccaagacactggcccagtacacctccaagacatgcagcaactgtgggtttaccatcaccagcgccgactacgacagggtgctggagaagctgaagaagacagcaacaggctggatgaccacaattaacggcaaggagctgaaggtggagggccagattacctactacaacagatacaagagacagaacgtagtcaaggacctgtccgtcgagctggatagactgagcgaagaatctgtgaacaacgacatctcctcctggacaaagggcagaagcggagaagctctgagcctcctgaagaaaagattctcccatagacccgtgcaggagaagttcgtgtgcctgaactgcggcttcgagacacacgcagccgagcaagccgccctgaacatcgccagatcctggctgttcctgcggagccaggagtacaagaaataccagacaaacaagacaaccggcaacaccgataagagagccttcgtcgagacctggcagtccttttaccggaagaagcttaaggaggtgtggaaacctgccgtgcggtctggcggatctggcggaggctccaccagccccaagaaaaagagaaaagtctaagctgccttctgcggggcttgccttctggccatgcccttcttctctcccttgcacctgtacctcttggtctttgaataaagcctgagtaggaaggctagcaaaaaaaaaaaaaaaaaaaaaaaaaaaaaaaaaaaaaaaaaaaaaaaaaaaaaaaaaaaaaaaaaaaaaaaaaaaaaaaa

SEQ ID NO: 13247 - RNA, 5785 nt, synthetic construct
  source 1..5785: mol_type = other RNA
aggaaataagagagaaaagaagagtaagaagaaatataagagccaccatggcccctaagaagaagcgtaaagtgagccggatggaacgcctcgtctacgaggtgcggcagaagtgcagaaacatcgaggacatctgcatctcctgcggatctctgaacgtgaccctggagcacccactgttcatcggcggcatgtgccagaactgtaaaaactgttttctggagtgtgcctatcaatacgacgatgacggctaccagagctactgcaccatctgttgcggcggaagagaggtgctgatgtgtggaaataacaactgctgccggtgcttctgcgtggaatgcgtggacctgctggtgggccccggcgccgcccaggccgctattaaggaagatccttggaactgctacatgtgcggccacaagggcacatacggcctgctgagacggagagaggactggcctagcagactgcagatgttcttcgccaataaccacgaccaggagttcgacccccctaaggtgtaccctcccgtccccgccgagaagagaaagcccatccgggtcctgagcctgttcgatggcatcgccaccggtctgctggtgctgaaggacctgggcatccaggtggataggtacattgcctccgaggtgtgcgaggactccatcaccgtgggaatggtgcgtcatcagggcaagatcatgtacgtgggcgacgtgcggagcgtgacacagaagcatatccaggagtggggccctttcgacctggtgatcggcggcagcccttgcaatgacctgagcatcgtgaacccagcccggaagggcctgtacgagggaaccggcagactgttcttcgagttttacagactgctgcacgacgcccggcctaaggaaggcgacgaccggcccttcttttggctgttcgagaatgtggtggccatgggagtcagcgacaagcgggatattagccggttcctggagagcaaccccgtgatgatcgatgccaaggaagtgagcgccgcccaccgggccagatacttctggggcaatctgcctggcatgaacagacccctggccagcaccgtgaacgacaagctggagctgcaggagtgcctggagcacggccggatcgccaagttcagcaaggtgagaaccatcaccacccgaagcaacagcatcaaacaaggcaaggaccagcactttcctgtgttcatgaacgagaaggaggacatcctgtggtgtaccgagatggagagagtgttcgggttcccagtccactacacagatgtcagcaacatgtctagactggccagacagagactgctgggaagaagctggtccgtccctgtgatcagacacctgttcgcccctctgaaggagtacttcgcctgcgtgagcagcggcaacagcaacgccaacagccggggccccagcttctctagcggcctggtgccactgtccctgagagggagccacatgggccccatggagatctacaaaaccgtgagcgcctggaagcggcagcctgtgcgcgtgctgagcctgtttcggaatatcgataaagtcctgaaaagcctgggattcctggagagcggctctggctccggcggtggcaccctgaagtacgtggaggatgtgacaaacgtggtcagacgggatgtggagaagtggggccccttcgatctggtgtacggcagcacccaacccctgggcagctcttgtgaccggtgccctggctggtacatgtttcagttccaccggatcctgcagtacgccctgccgagacaggagtcccagcggccattcttttggattttcatggacaacttgctgctgaccgaggatgaccaggaaactaccactcggttcctgcagaccgaagccgtgaccctgcaggacgtgagaggccgggactaccagaacgccatgcgggtgtggtccaacatccctggactgaaaagcaagcacgcacctctgacccctaaagaagaggagtacctgcaggcccaggtgcggagcagaagcaagctggacgcccctaaggtggatctgctggtgaagaattgcctcctgcccctgagagagtacttcaagtatttcagccagaatagtctgcccctgggaggcagcggcggcggccagggcctggtgagcttcaaggacgtggccgtggacttcacccaggaggagtggcagcagctggaccccgcccagaggaccctgtacagggacgtgatgctggagaacttcagccacctggtgagcatcggctacgccgtgagcaagcccgacgtgatcagcaagctggagcagggcgaggacccctggatcatcaagagggacatccccaactggatctaccccgacgagaaccaggccgacggcggcccaagcagcggcgcccctcctcccagcggcggcagcccagccggctccccaacctctaccgaggagggcacctctgagtccgccacccccgagagcggccctggcacctccaccgagcccagcgagggcagcgcacccggcagccctgccggcagccccacctccacagaggagggaaccagcaccgagcccagcgaaggcagcgccccaggcaccagcaccgagcctagtgagcaggagattaaacggatcaacaagatcagaagaagacttgtgaaagacagcaacaccaagaaggccggcaagacaggccccatgaaaaccctgctggttagagtgatgacacccgatctgagagagcggctggaaaacctgagaaagaagcctgaaaatatcccccagcccatcagcaatacatctagagccaacctgaataagctgctgaccgattacaccgaaatgaagaaggcgatcctgcatgtgtactgggaagagttccagaaggaccctgtgggcctgatgagccgggtggcccagcctgccagcaagaagatcgatcagaacaagctgaaacctgagatggacgagaagggcaacctgaccaccgccggctttgcctgctctcagtgtggccagcccctgttcgtgtacaagctggagcaggtgtctgagaagggcaaggcttacaccaactacttcggacggtgcaatgtggccgagcacgaaaagctgatcctgctggcccagctgaagcccgagaaggatagcgacgaagccgtgacatatagcctgggaaagtttgggcagagggccctggatttctacagcattcatgtgaccaaggagtccacccaccccgtgaagcccctggcccagatcgccggaaacagatacgcctccggacctgtgggaaaggccctgagcgacgcatgtatgggcacaatcgcctccttcctgtctaagtaccaggacatcatcatcgaacaccagaaggtggtgaagggcaaccagaagagactggagagcctgcgggagctggccggcaaggaaaacctggaataccctagcgtgaccctgccacctcagcctcacaccaaggagggcgttgatgcctacaacgaagtgatcgcccgggtgcgaatgtgggtgaacctgaacctgtggcagaagctgaagctaagcagagatgatgccaagcctctgctgagactgaagggattcccttcctttcctctggtcgagagacaggccaacgaagtggactggtgggacatggtgtgtaacgtgaagaagctgatcaacgagaaaaaggaggatggcaaggtgttttggcagaatctggctggctacaagagacaggaagccctgagaccatacctgagcagcgaggaagatcggaagaagggaaagaaattcgctcggtaccagctgggcgacctgctgctgcacctggaaaagaagcacggcgaggactggggaaaggtgtacgacgaggcctgggagcggattgacaagaaagtggaaggcctgagcaagcacatcaagctggaagaggaacggagaagcgaggacgcccagagcaaggccgccctgaccgactggctgcgggctaaggccagcttcgtgatcgagggcctgaaggaggccgacaaggacgagttctgcagatgcgagctgaagctgcagaagtggtacggggacctgcggggaaagcccttcgccatcgaagccgagaacagcatcctggacatcagcggcttcagcaagcagtacaactgtgccttcatctggcagaaggacggcgtgaagaagctgaacctgtacctgatcatcaactacttcaagggcggcaagctgcggttcaagaagatcaaacctgaagccttcgaagccaacagattctacaccgtgatcaacaaaaagagcggcgagatcgtgcccatggaggtgaacttcaacttcgacgaccccaacctgatcatcctgcctctggcctttggcaagagacagggcagagaattcatctggaacgacctgctgtccctggaaaccggcagcctgaagctggccaacggaagagtgatcgagaagacactgtacaacagaagaacccggcaggatgagcctgccctgttcgtggccctgaccttcgagcggcgggaggtcctggactcctccaatatcaaaccaatgaacctgatcggcgtggcaagaggcgaaaacatccccgccgtgatcgccctgaccgaccccgagggctgcccactgagccggtttaaggatagcctgggaaacccaacccacatcctgagaatcggcgagagctataaggagaagcagcggaccatccaggccaagaaggaggtggagcagcggagagccggcggctacagccggaagtacgccagcaaagccaagaatctggcagacgatatggtgagaaacaccgctagagatctgctgtactacgccgtgacccaggatgccatgctgatcttcgccaacctgagccggggcttcggccggcagggcaagcggaccttcatggccgagagacagtacacacggatggaggactggctgaccgccaagctggcctacgagggcctgagcaagacctacctgtccaagacactggcccagtacacctccaagacatgcagcaactgtgggtttaccatcaccagcgccgactacgacagggtgctggagaagctgaagaagacagcaacaggctggatgaccacaattaacggcaaggagctgaaggtggagggccagattacctactacaacagatacaagagacagaacgtagtcaaggacctgtccgtcgagctggatagactgagcgaagaatctgtgaacaacgacatctcctcctggacaaagggcagaagcggagaagctctgagcctcctgaagaaaagattctcccatagacccgtgcaggagaagttcgtgtgcctgaactgcggcttcgagacacacgcagccgagcaagccgccctgaacatcgccagatcctggctgttcctgcggagccaggagtacaagaaataccagacaaacaagacaaccggcaacaccgataagagagccttcgtcgagacctggcagtccttttaccggaagaagcttaaggaggtgtggaaacctgccgtgcggtctggcggatctggcggaggctccaccagccccaagaaaaagagaaaagtctaagctgccttctgcggggcttgccttctggccatgcccttcttctctcccttgcacctgtacctcttggtctttgaataaagcctgagtaggaaggctagcaaaaaaaaaaaaaaaaaaaaaaaaaaaaaaaaaaaaaaaaaaaaaaaaaaaaaaaaaaaaaaaaaaaaaaaaaaaaaaaa

SEQ ID NO: 13248 - RNA, 5785 nt, synthetic construct
  source 1..5785: mol_type = other RNA
aggaaataagagagaaaagaagagtaagaagaaatataagagccaccatggcccctaagaagaagcgtaaagtgagccggatggaacgcctcgtctacgaggtgcggcagaagtgcagaaacatcgaggacatctgcatctcctgcggatctctgaacgtgaccctggagcacccactgttcatcggcggcatgtgccagaactgtaaaaactgttttctggagtgtgcctatcaatacgacgatgacggctaccagagctactgcaccatctgttgcggcggaagagaggtgctgatgtgtggaaataacaactgctgccggtgcttctgcgtggaatgcgtggacctgctggtgggccccggcgccgcccaggccgctattaaggaagatccttggaactgctacatgtgcggccacaagggcacatacggcctgctgagacggagagaggactggcctagcagactgcagatgttcttcgccaataaccacgaccaggagttcgacccccctaaggtgtaccctcccgtccccgccgagaagagaaagcccatccgggtcctgagcctgttcgatggcatcgccaccggtctgctggtgctgaaggacctgggcatccaggtggataggtacattgcctccgaggtgtgcgaggactccatcaccgtgggaatggtgcgtcatcagggcaagatcatgtacgtgggcgacgtgcggagcgtgacacagaagcatatccaggagtggggccctttcgacctggtgatcggcggcagcccttgcaatgacctgagcatcgtgaacccagcccggaagggcctgtacgagggaaccggcagactgttcttcgagttttacagactgctgcacgacgcccggcctaaggaaggcgacgaccggcccttcttttggctgttcgagaatgtggtggccatgggagtcagcgacaagcgggatattagccggttcctggagagcaaccccgtgatgatcgatgccaaggaagtgagcgccgcccaccgggccagatacttctggggcaatctgcctggcatgaacagacccctggccagcaccgtgaacgacaagctggagctgcaggagtgcctggagcacggccggatcgccaagttcagcaaggtgagaaccatcaccacccgaagcaacagcatcaaacaaggcaaggaccagcactttcctgtgttcatgaacgagaaggaggacatcctgtggtgtaccgagatggagagagtgttcgggttcccagtccactacacagatgtcagcaacatgtctagactggccagacagagactgctgggaagaagctggtccgtccctgtgatcagacacctgttcgcccctctgaaggagtacttcgcctgcgtgagcagcggcaacagcaacgccaacagccggggccccagcttctctagcggcctggtgccactgtccctgagagggagccacatgggccccatggagatctacaaaaccgtgagcgcctggaagcggcagcctgtgcgcgtgctgagcctgtttcggaatatcgataaagtcctgaaaagcctgggattcctggagagcggctctggctccggcggtggcaccctgaagtacgtggaggatgtgacaaacgtggtcagacgggatgtggagaagtggggccccttcgatctggtgtacggcagcacccaacccctgggcagctcttgtgaccggtgccctggctggtacatgtttcagttccaccggatcctgcagtacgccctgccgagacaggagtcccagcggccattcttttggattttcatggacaacttgctgctgaccgaggatgaccaggaaactaccactcggttcctgcagaccgaagccgtgaccctgcaggacgtgagaggccgggactaccagaacgccatgcgggtgtggtccaacatccctggactgaaaagcaagcacgcacctctgacccctaaagaagaggagtacctgcaggcccaggtgcggagcagaagcaagctggacgcccctaaggtggatctgctggtgaagaattgcctcctgcccctgagagagtacttcaagtatttcagccagaatagtctgcccctgggaggcagcggcggcggcagcctgggcatggtgagcttcgacgacgtgatggtgaccttcagcctggaggagtggcagctgctgagcaccagccagaggaccctgtacaggaccgtgatgctggacacctacagcagcctggccgccctgggccactgcgccgtgaagcccggcgtgatcatcaagctggagcagggcgccgagccctggatgggcgcccaggccccccccaggagcctgagcgacccctgcggccccagcggcggcccaagcagcggcgcccctcctcccagcggcggcagcccagccggctccccaacctctaccgaggagggcacctctgagtccgccacccccgagagcggccctggcacctccaccgagcccagcgagggcagcgcacccggcagccctgccggcagccccacctccacagaggagggaaccagcaccgagcccagcgaaggcagcgccccaggcaccagcaccgagcctagtgagcaggagattaaacggatcaacaagatcagaagaagacttgtgaaagacagcaacaccaagaaggccggcaagacaggccccatgaaaaccctgctggttagagtgatgacacccgatctgagagagcggctggaaaacctgagaaagaagcctgaaaatatcccccagcccatcagcaatacatctagagccaacctgaataagctgctgaccgattacaccgaaatgaagaaggcgatcctgcatgtgtactgggaagagttccagaaggaccctgtgggcctgatgagccgggtggcccagcctgccagcaagaagatcgatcagaacaagctgaaacctgagatggacgagaagggcaacctgaccaccgccggctttgcctgctctcagtgtggccagcccctgttcgtgtacaagctggagcaggtgtctgagaagggcaaggcttacaccaactacttcggacggtgcaatgtggccgagcacgaaaagctgatcctgctggcccagctgaagcccgagaaggatagcgacgaagccgtgacatatagcctgggaaagtttgggcagagggccctggatttctacagcattcatgtgaccaaggagtccacccaccccgtgaagcccctggcccagatcgccggaaacagatacgcctccggacctgtgggaaaggccctgagcgacgcatgtatgggcacaatcgcctccttcctgtctaagtaccaggacatcatcatcgaacaccagaaggtggtgaagggcaaccagaagagactggagagcctgcgggagctggccggcaaggaaaacctggaataccctagcgtgaccctgccacctcagcctcacaccaaggagggcgttgatgcctacaacgaagtgatcgcccgggtgcgaatgtgggtgaacctgaacctgtggcagaagctgaagctaagcagagatgatgccaagcctctgctgagactgaagggattcccttcctttcctctggtcgagagacaggccaacgaagtggactggtgggacatggtgtgtaacgtgaagaagctgatcaacgagaaaaaggaggatggcaaggtgttttggcagaatctggctggctacaagagacaggaagccctgagaccatacctgagcagcgaggaagatcggaagaagggaaagaaattcgctcggtaccagctgggcgacctgctgctgcacctggaaaagaagcacggcgaggactggggaaaggtgtacgacgaggcctgggagcggattgacaagaaagtggaaggcctgagcaagcacatcaagctggaagaggaacggagaagcgaggacgcccagagcaaggccgccctgaccgactggctgcgggctaaggccagcttcgtgatcgagggcctgaaggaggccgacaaggacgagttctgcagatgcgagctgaagctgcagaagtggtacggggacctgcggggaaagcccttcgccatcgaagccgagaacagcatcctggacatcagcggcttcagcaagcagtacaactgtgccttcatctggcagaaggacggcgtgaagaagctgaacctgtacctgatcatcaactacttcaagggcggcaagctgcggttcaagaagatcaaacctgaagccttcgaagccaacagattctacaccgtgatcaacaaaaagagcggcgagatcgtgcccatggaggtgaacttcaacttcgacgaccccaacctgatcatcctgcctctggcctttggcaagagacagggcagagaattcatctggaacgacctgctgtccctggaaaccggcagcctgaagctggccaacggaagagtgatcgagaagacactgtacaacagaagaacccggcaggatgagcctgccctgttcgtggccctgaccttcgagcggcgggaggtcctggactcctccaatatcaaaccaatgaacctgatcggcgtggcaagaggcgaaaacatccccgccgtgatcgccctgaccgaccccgagggctgcccactgagccggtttaaggatagcctgggaaacccaacccacatcctgagaatcggcgagagctataaggagaagcagcggaccatccaggccaagaaggaggtggagcagcggagagccggcggctacagccggaagtacgccagcaaagccaagaatctggcagacgatatggtgagaaacaccgctagagatctgctgtactacgccgtgacccaggatgccatgctgatcttcgccaacctgagccggggcttcggccggcagggcaagcggaccttcatggccgagagacagtacacacggatggaggactggctgaccgccaagctggcctacgagggcctgagcaagacctacctgtccaagacactggcccagtacacctccaagacatgcagcaactgtgggtttaccatcaccagcgccgactacgacagggtgctggagaagctgaagaagacagcaacaggctggatgaccacaattaacggcaaggagctgaaggtggagggccagattacctactacaacagatacaagagacagaacgtagtcaaggacctgtccgtcgagctggatagactgagcgaagaatctgtgaacaacgacatctcctcctggacaaagggcagaagcggagaagctctgagcctcctgaagaaaagattctcccatagacccgtgcaggagaagttcgtgtgcctgaactgcggcttcgagacacacgcagccgagcaagccgccctgaacatcgccagatcctggctgttcctgcggagccaggagtacaagaaataccagacaaacaagacaaccggcaacaccgataagagagccttcgtcgagacctggcagtccttttaccggaagaagcttaaggaggtgtggaaacctgccgtgcggtctggcggatctggcggaggctccaccagccccaagaaaaagagaaaagtctaagctgccttctgcggggcttgccttctggccatgcccttcttctctcccttgcacctgtacctcttggtctttgaataaagcctgagtaggaaggctagcaaaaaaaaaaaaaaaaaaaaaaaaaaaaaaaaaaaaaaaaaaaaaaaaaaaaaaaaaaaaaaaaaaaaaaaaaaaaaaaa

SEQ ID NO: 13249 - RNA, 5785 nt, synthetic construct
  source 1..5785: mol_type = other RNA
aggaaataagagagaaaagaagagtaagaagaaatataagagccaccatggcccctaagaagaagcgtaaagtgagccggatggaacgcctcgtctacgaggtgcggcagaagtgcagaaacatcgaggacatctgcatctcctgcggatctctgaacgtgaccctggagcacccactgttcatcggcggcatgtgccagaactgtaaaaactgttttctggagtgtgcctatcaatacgacgatgacggctaccagagctactgcaccatctgttgcggcggaagagaggtgctgatgtgtggaaataacaactgctgccggtgcttctgcgtggaatgcgtggacctgctggtgggccccggcgccgcccaggccgctattaaggaagatccttggaactgctacatgtgcggccacaagggcacatacggcctgctgagacggagagaggactggcctagcagactgcagatgttcttcgccaataaccacgaccaggagttcgacccccctaaggtgtaccctcccgtccccgccgagaagagaaagcccatccgggtcctgagcctgttcgatggcatcgccaccggtctgctggtgctgaaggacctgggcatccaggtggataggtacattgcctccgaggtgtgcgaggactccatcaccgtgggaatggtgcgtcatcagggcaagatcatgtacgtgggcgacgtgcggagcgtgacacagaagcatatccaggagtggggccctttcgacctggtgatcggcggcagcccttgcaatgacctgagcatcgtgaacccagcccggaagggcctgtacgagggaaccggcagactgttcttcgagttttacagactgctgcacgacgcccggcctaaggaaggcgacgaccggcccttcttttggctgttcgagaatgtggtggccatgggagtcagcgacaagcgggatattagccggttcctggagagcaaccccgtgatgatcgatgccaaggaagtgagcgccgcccaccgggccagatacttctggggcaatctgcctggcatgaacagacccctggccagcaccgtgaacgacaagctggagctgcaggagtgcctggagcacggccggatcgccaagttcagcaaggtgagaaccatcaccacccgaagcaacagcatcaaacaaggcaaggaccagcactttcctgtgttcatgaacgagaaggaggacatcctgtggtgtaccgagatggagagagtgttcgggttcccagtccactacacagatgtcagcaacatgtctagactggccagacagagactgctgggaagaagctggtccgtccctgtgatcagacacctgttcgcccctctgaaggagtacttcgcctgcgtgagcagcggcaacagcaacgccaacagccggggccccagcttctctagcggcctggtgccactgtccctgagagggagccacatgggccccatggagatctacaaaaccgtgagcgcctggaagcggcagcctgtgcgcgtgctgagcctgtttcggaatatcgataaagtcctgaaaagcctgggattcctggagagcggctctggctccggcggtggcaccctgaagtacgtggaggatgtgacaaacgtggtcagacgggatgtggagaagtggggccccttcgatctggtgtacggcagcacccaacccctgggcagctcttgtgaccggtgccctggctggtacatgtttcagttccaccggatcctgcagtacgccctgccgagacaggagtcccagcggccattcttttggattttcatggacaacttgctgctgaccgaggatgaccaggaaactaccactcggttcctgcagaccgaagccgtgaccctgcaggacgtgagaggccgggactaccagaacgccatgcgggtgtggtccaacatccctggactgaaaagcaagcacgcacctctgacccctaaagaagaggagtacctgcaggcccaggtgcggagcagaagcaagctggacgcccctaaggtggatctgctggtgaagaattgcctcctgcccctgagagagtacttcaagtatttcagccagaatagtctgcccctgggaggcagcggcggcggcacccaggagagcgtgatgttcgaggacgtggccgtggacttcaccagggaggagtggagccacctggaccccgcccagagggccctgtacagggaggtgatgctggagaactacgagaacctggtgagcctgggcctgcccgtgagcaagctggacgtgatcagcctgctggagaggggcgaggccccctggaggcccgagggcggcggccccaggtgcagctgccccgaccccttcatcgagggcggcccaagcagcggcgcccctcctcccagcggcggcagcccagccggctccccaacctctaccgaggagggcacctctgagtccgccacccccgagagcggccctggcacctccaccgagcccagcgagggcagcgcacccggcagccctgccggcagccccacctccacagaggagggaaccagcaccgagcccagcgaaggcagcgccccaggcaccagcaccgagcctagtgagcaggagattaaacggatcaacaagatcagaagaagacttgtgaaagacagcaacaccaagaaggccggcaagacaggccccatgaaaaccctgctggttagagtgatgacacccgatctgagagagcggctggaaaacctgagaaagaagcctgaaaatatcccccagcccatcagcaatacatctagagccaacctgaataagctgctgaccgattacaccgaaatgaagaaggcgatcctgcatgtgtactgggaagagttccagaaggaccctgtgggcctgatgagccgggtggcccagcctgccagcaagaagatcgatcagaacaagctgaaacctgagatggacgagaagggcaacctgaccaccgccggctttgcctgctctcagtgtggccagcccctgttcgtgtacaagctggagcaggtgtctgagaagggcaaggcttacaccaactacttcggacggtgcaatgtggccgagcacgaaaagctgatcctgctggcccagctgaagcccgagaaggatagcgacgaagccgtgacatatagcctgggaaagtttgggcagagggccctggatttctacagcattcatgtgaccaaggagtccacccaccccgtgaagcccctggcccagatcgccggaaacagatacgcctccggacctgtgggaaaggccctgagcgacgcatgtatgggcacaatcgcctccttcctgtctaagtaccaggacatcatcatcgaacaccagaaggtggtgaagggcaaccagaagagactggagagcctgcgggagctggccggcaaggaaaacctggaataccctagcgtgaccctgccacctcagcctcacaccaaggagggcgttgatgcctacaacgaagtgatcgcccgggtgcgaatgtgggtgaacctgaacctgtggcagaagctgaagctaagcagagatgatgccaagcctctgctgagactgaagggattcccttcctttcctctggtcgagagacaggccaacgaagtggactggtgggacatggtgtgtaacgtgaagaagctgatcaacgagaaaaaggaggatggcaaggtgttttggcagaatctggctggctacaagagacaggaagccctgagaccatacctgagcagcgaggaagatcggaagaagggaaagaaattcgctcggtaccagctgggcgacctgctgctgcacctggaaaagaagcacggcgaggactggggaaaggtgtacgacgaggcctgggagcggattgacaagaaagtggaaggcctgagcaagcacatcaagctggaagaggaacggagaagcgaggacgcccagagcaaggccgccctgaccgactggctgcgggctaaggccagcttcgtgatcgagggcctgaaggaggccgacaaggacgagttctgcagatgcgagctgaagctgcagaagtggtacggggacctgcggggaaagcccttcgccatcgaagccgagaacagcatcctggacatcagcggcttcagcaagcagtacaactgtgccttcatctggcagaaggacggcgtgaagaagctgaacctgtacctgatcatcaactacttcaagggcggcaagctgcggttcaagaagatcaaacctgaagccttcgaagccaacagattctacaccgtgatcaacaaaaagagcggcgagatcgtgcccatggaggtgaacttcaacttcgacgaccccaacctgatcatcctgcctctggcctttggcaagagacagggcagagaattcatctggaacgacctgctgtccctggaaaccggcagcctgaagctggccaacggaagagtgatcgagaagacactgtacaacagaagaacccggcaggatgagcctgccctgttcgtggccctgaccttcgagcggcgggaggtcctggactcctccaatatcaaaccaatgaacctgatcggcgtggcaagaggcgaaaacatccccgccgtgatcgccctgaccgaccccgagggctgcccactgagccggtttaaggatagcctgggaaacccaacccacatcctgagaatcggcgagagctataaggagaagcagcggaccatccaggccaagaaggaggtggagcagcggagagccggcggctacagccggaagtacgccagcaaagccaagaatctggcagacgatatggtgagaaacaccgctagagatctgctgtactacgccgtgacccaggatgccatgctgatcttcgccaacctgagccggggcttcggccggcagggcaagcggaccttcatggccgagagacagtacacacggatggaggactggctgaccgccaagctggcctacgagggcctgagcaagacctacctgtccaagacactggcccagtacacctccaagacatgcagcaactgtgggtttaccatcaccagcgccgactacgacagggtgctggagaagctgaagaagacagcaacaggctggatgaccacaattaacggcaaggagctgaaggtggagggccagattacctactacaacagatacaagagacagaacgtagtcaaggacctgtccgtcgagctggatagactgagcgaagaatctgtgaacaacgacatctcctcctggacaaagggcagaagcggagaagctctgagcctcctgaagaaaagattctcccatagacccgtgcaggagaagttcgtgtgcctgaactgcggcttcgagacacacgcagccgagcaagccgccctgaacatcgccagatcctggctgttcctgcggagccaggagtacaagaaataccagacaaacaagacaaccggcaacaccgataagagagccttcgtcgagacctggcagtccttttaccggaagaagcttaaggaggtgtggaaacctgccgtgcggtctggcggatctggcggaggctccaccagccccaagaaaaagagaaaagtctaagctgccttctgcggggcttgccttctggccatgcccttcttctctcccttgcacctgtacctcttggtctttgaataaagcctgagtaggaaggctagcaaaaaaaaaaaaaaaaaaaaaaaaaaaaaaaaaaaaaaaaaaaaaaaaaaaaaaaaaaaaaaaaaaaaaaaaaaaaaaaa

SEQ ID NO: 13250 - RNA, 5785 nt, synthetic construct
  source 1..5785: mol_type = other RNA
aggaaataagagagaaaagaagagtaagaagaaatataagagccaccatggcccctaagaagaagcgtaaagtgagccggatggaacgcctcgtctacgaggtgcggcagaagtgcagaaacatcgaggacatctgcatctcctgcggatctctgaacgtgaccctggagcacccactgttcatcggcggcatgtgccagaactgtaaaaactgttttctggagtgtgcctatcaatacgacgatgacggctaccagagctactgcaccatctgttgcggcggaagagaggtgctgatgtgtggaaataacaactgctgccggtgcttctgcgtggaatgcgtggacctgctggtgggccccggcgccgcccaggccgctattaaggaagatccttggaactgctacatgtgcggccacaagggcacatacggcctgctgagacggagagaggactggcctagcagactgcagatgttcttcgccaataaccacgaccaggagttcgacccccctaaggtgtaccctcccgtccccgccgagaagagaaagcccatccgggtcctgagcctgttcgatggcatcgccaccggtctgctggtgctgaaggacctgggcatccaggtggataggtacattgcctccgaggtgtgcgaggactccatcaccgtgggaatggtgcgtcatcagggcaagatcatgtacgtgggcgacgtgcggagcgtgacacagaagcatatccaggagtggggccctttcgacctggtgatcggcggcagcccttgcaatgacctgagcatcgtgaacccagcccggaagggcctgtacgagggaaccggcagactgttcttcgagttttacagactgctgcacgacgcccggcctaaggaaggcgacgaccggcccttcttttggctgttcgagaatgtggtggccatgggagtcagcgacaagcgggatattagccggttcctggagagcaaccccgtgatgatcgatgccaaggaagtgagcgccgcccaccgggccagatacttctggggcaatctgcctggcatgaacagacccctggccagcaccgtgaacgacaagctggagctgcaggagtgcctggagcacggccggatcgccaagttcagcaaggtgagaaccatcaccacccgaagcaacagcatcaaacaaggcaaggaccagcactttcctgtgttcatgaacgagaaggaggacatcctgtggtgtaccgagatggagagagtgttcgggttcccagtccactacacagatgtcagcaacatgtctagactggccagacagagactgctgggaagaagctggtccgtccctgtgatcagacacctgttcgcccctctgaaggagtacttcgcctgcgtgagcagcggcaacagcaacgccaacagccggggccccagcttctctagcggcctggtgccactgtccctgagagggagccacatgggccccatggagatctacaaaaccgtgagcgcctggaagcggcagcctgtgcgcgtgctgagcctgtttcggaatatcgataaagtcctgaaaagcctgggattcctggagagcggctctggctccggcggtggcaccctgaagtacgtggaggatgtgacaaacgtggtcagacgggatgtggagaagtggggccccttcgatctggtgtacggcagcacccaacccctgggcagctcttgtgaccggtgccctggctggtacatgtttcagttccaccggatcctgcagtacgccctgccgagacaggagtcccagcggccattcttttggattttcatggacaacttgctgctgaccgaggatgaccaggaaactaccactcggttcctgcagaccgaagccgtgaccctgcaggacgtgagaggccgggactaccagaacgccatgcgggtgtggtccaacatccctggactgaaaagcaagcacgcacctctgacccctaaagaagaggagtacctgcaggcccaggtgcggagcagaagcaagctggacgcccctaaggtggatctgctggtgaagaattgcctcctgcccctgagagagtacttcaagtatttcagccagaatagtctgcccctgggaggcagcggcggcggcatggtgaccttcaaggacgtggccgtggccttcagcgaggaggagctgaggctgctggaccccgcccagaggaagctgtaccaggaggtgatggtggagaacttccagaacctgctgagcgtgggcatcaacaaccagagcgagctgagggccgtgcaggacggcggcagccacgaggccctgagctgctggcagatctggcagagggtgatcgacaacctgaccaggtgccaggacagcatgggcggcccaagcagcggcgcccctcctcccagcggcggcagcccagccggctccccaacctctaccgaggagggcacctctgagtccgccacccccgagagcggccctggcacctccaccgagcccagcgagggcagcgcacccggcagccctgccggcagccccacctccacagaggagggaaccagcaccgagcccagcgaaggcagcgccccaggcaccagcaccgagcctagtgagcaggagattaaacggatcaacaagatcagaagaagacttgtgaaagacagcaacaccaagaaggccggcaagacaggccccatgaaaaccctgctggttagagtgatgacacccgatctgagagagcggctggaaaacctgagaaagaagcctgaaaatatcccccagcccatcagcaatacatctagagccaacctgaataagctgctgaccgattacaccgaaatgaagaaggcgatcctgcatgtgtactgggaagagttccagaaggaccctgtgggcctgatgagccgggtggcccagcctgccagcaagaagatcgatcagaacaagctgaaacctgagatggacgagaagggcaacctgaccaccgccggctttgcctgctctcagtgtggccagcccctgttcgtgtacaagctggagcaggtgtctgagaagggcaaggcttacaccaactacttcggacggtgcaatgtggccgagcacgaaaagctgatcctgctggcccagctgaagcccgagaaggatagcgacgaagccgtgacatatagcctgggaaagtttgggcagagggccctggatttctacagcattcatgtgaccaaggagtccacccaccccgtgaagcccctggcccagatcgccggaaacagatacgcctccggacctgtgggaaaggccctgagcgacgcatgtatgggcacaatcgcctccttcctgtctaagtaccaggacatcatcatcgaacaccagaaggtggtgaagggcaaccagaagagactggagagcctgcgggagctggccggcaaggaaaacctggaataccctagcgtgaccctgccacctcagcctcacaccaaggagggcgttgatgcctacaacgaagtgatcgcccgggtgcgaatgtgggtgaacctgaacctgtggcagaagctgaagctaagcagagatgatgccaagcctctgctgagactgaagggattcccttcctttcctctggtcgagagacaggccaacgaagtggactggtgggacatggtgtgtaacgtgaagaagctgatcaacgagaaaaaggaggatggcaaggtgttttggcagaatctggctggctacaagagacaggaagccctgagaccatacctgagcagcgaggaagatcggaagaagggaaagaaattcgctcggtaccagctgggcgacctgctgctgcacctggaaaagaagcacggcgaggactggggaaaggtgtacgacgaggcctgggagcggattgacaagaaagtggaaggcctgagcaagcacatcaagctggaagaggaacggagaagcgaggacgcccagagcaaggccgccctgaccgactggctgcgggctaaggccagcttcgtgatcgagggcctgaaggaggccgacaaggacgagttctgcagatgcgagctgaagctgcagaagtggtacggggacctgcggggaaagcccttcgccatcgaagccgagaacagcatcctggacatcagcggcttcagcaagcagtacaactgtgccttcatctggcagaaggacggcgtgaagaagctgaacctgtacctgatcatcaactacttcaagggcggcaagctgcggttcaagaagatcaaacctgaagccttcgaagccaacagattctacaccgtgatcaacaaaaagagcggcgagatcgtgcccatggaggtgaacttcaacttcgacgaccccaacctgatcatcctgcctctggcctttggcaagagacagggcagagaattcatctggaacgacctgctgtccctggaaaccggcagcctgaagctggccaacggaagagtgatcgagaagacactgtacaacagaagaacccggcaggatgagcctgccctgttcgtggccctgaccttcgagcggcgggaggtcctggactcctccaatatcaaaccaatgaacctgatcggcgtggcaagaggcgaaaacatccccgccgtgatcgccctgaccgaccccgagggctgcccactgagccggtttaaggatagcctgggaaacccaacccacatcctgagaatcggcgagagctataaggagaagcagcggaccatccaggccaagaaggaggtggagcagcggagagccggcggctacagccggaagtacgccagcaaagccaagaatctggcagacgatatggtgagaaacaccgctagagatctgctgtactacgccgtgacccaggatgccatgctgatcttcgccaacctgagccggggcttcggccggcagggcaagcggaccttcatggccgagagacagtacacacggatggaggactggctgaccgccaagctggcctacgagggcctgagcaagacctacctgtccaagacactggcccagtacacctccaagacatgcagcaactgtgggtttaccatcaccagcgccgactacgacagggtgctggagaagctgaagaagacagcaacaggctggatgaccacaattaacggcaaggagctgaaggtggagggccagattacctactacaacagatacaagagacagaacgtagtcaaggacctgtccgtcgagctggatagactgagcgaagaatctgtgaacaacgacatctcctcctggacaaagggcagaagcggagaagctctgagcctcctgaagaaaagattctcccatagacccgtgcaggagaagttcgtgtgcctgaactgcggcttcgagacacacgcagccgagcaagccgccctgaacatcgccagatcctggctgttcctgcggagccaggagtacaagaaataccagacaaacaagacaaccggcaacaccgataagagagccttcgtcgagacctggcagtccttttaccggaagaagcttaaggaggtgtggaaacctgccgtgcggtctggcggatctggcggaggctccaccagccccaagaaaaagagaaaagtctaagctgccttctgcggggcttgccttctggccatgcccttcttctctcccttgcacctgtacctcttggtctttgaataaagcctgagtaggaaggctagcaaaaaaaaaaaaaaaaaaaaaaaaaaaaaaaaaaaaaaaaaaaaaaaaaaaaaaaaaaaaaaaaaaaaaaaaaaaaaaaa

SEQ ID NO: 13251 - RNA, 5785 nt, synthetic construct
  source 1..5785: mol_type = other RNA
aggaaataagagagaaaagaagagtaagaagaaatataagagccaccatggcccctaagaagaagcgtaaagtgagccggatggaacgcctcgtctacgaggtgcggcagaagtgcagaaacatcgaggacatctgcatctcctgcggatctctgaacgtgaccctggagcacccactgttcatcggcggcatgtgccagaactgtaaaaactgttttctggagtgtgcctatcaatacgacgatgacggctaccagagctactgcaccatctgttgcggcggaagagaggtgctgatgtgtggaaataacaactgctgccggtgcttctgcgtggaatgcgtggacctgctggtgggccccggcgccgcccaggccgctattaaggaagatccttggaactgctacatgtgcggccacaagggcacatacggcctgctgagacggagagaggactggcctagcagactgcagatgttcttcgccaataaccacgaccaggagttcgacccccctaaggtgtaccctcccgtccccgccgagaagagaaagcccatccgggtcctgagcctgttcgatggcatcgccaccggtctgctggtgctgaaggacctgggcatccaggtggataggtacattgcctccgaggtgtgcgaggactccatcaccgtgggaatggtgcgtcatcagggcaagatcatgtacgtgggcgacgtgcggagcgtgacacagaagcatatccaggagtggggccctttcgacctggtgatcggcggcagcccttgcaatgacctgagcatcgtgaacccagcccggaagggcctgtacgagggaaccggcagactgttcttcgagttttacagactgctgcacgacgcccggcctaaggaaggcgacgaccggcccttcttttggctgttcgagaatgtggtggccatgggagtcagcgacaagcgggatattagccggttcctggagagcaaccccgtgatgatcgatgccaaggaagtgagcgccgcccaccgggccagatacttctggggcaatctgcctggcatgaacagacccctggccagcaccgtgaacgacaagctggagctgcaggagtgcctggagcacggccggatcgccaagttcagcaaggtgagaaccatcaccacccgaagcaacagcatcaaacaaggcaaggaccagcactttcctgtgttcatgaacgagaaggaggacatcctgtggtgtaccgagatggagagagtgttcgggttcccagtccactacacagatgtcagcaacatgtctagactggccagacagagactgctgggaagaagctggtccgtccctgtgatcagacacctgttcgcccctctgaaggagtacttcgcctgcgtgagcagcggcaacagcaacgccaacagccggggccccagcttctctagcggcctggtgccactgtccctgagagggagccacatgggccccatggagatctacaaaaccgtgagcgcctggaagcggcagcctgtgcgcgtgctgagcctgtttcggaatatcgataaagtcctgaaaagcctgggattcctggagagcggctctggctccggcggtggcaccctgaagtacgtggaggatgtgacaaacgtggtcagacgggatgtggagaagtggggccccttcgatctggtgtacggcagcacccaacccctgggcagctcttgtgaccggtgccctggctggtacatgtttcagttccaccggatcctgcagtacgccctgccgagacaggagtcccagcggccattcttttggattttcatggacaacttgctgctgaccgaggatgaccaggaaactaccactcggttcctgcagaccgaagccgtgaccctgcaggacgtgagaggccgggactaccagaacgccatgcgggtgtggtccaacatccctggactgaaaagcaagcacgcacctctgacccctaaagaagaggagtacctgcaggcccaggtgcggagcagaagcaagctggacgcccctaaggtggatctgctggtgaagaattgcctcctgcccctgagagagtacttcaagtatttcagccagaatagtctgcccctgggaggcagcggcggcggcatgcccggcccccccggcagcctggagatgggcgtgctgaccttcagggacgtggccatcgagttcagcctggaggagtggcagtgcctggacatcacccagcagaacctgtacaggaacgtgatgctggagaactacaggaacctggtgttcgtgggcatcgccgccagcaagcccgacctgatcacctgcctggagcagggcaaggagccctggaacgtgaagaggcacgagatggtggccggcggcccaagcagcggcgcccctcctcccagcggcggcagcccagccggctccccaacctctaccgaggagggcacctctgagtccgccacccccgagagcggccctggcacctccaccgagcccagcgagggcagcgcacccggcagccctgccggcagccccacctccacagaggagggaaccagcaccgagcccagcgaaggcagcgccccaggcaccagcaccgagcctagtgagcaggagattaaacggatcaacaagatcagaagaagacttgtgaaagacagcaacaccaagaaggccggcaagacaggccccatgaaaaccctgctggttagagtgatgacacccgatctgagagagcggctggaaaacctgagaaagaagcctgaaaatatcccccagcccatcagcaatacatctagagccaacctgaataagctgctgaccgattacaccgaaatgaagaaggcgatcctgcatgtgtactgggaagagttccagaaggaccctgtgggcctgatgagccgggtggcccagcctgccagcaagaagatcgatcagaacaagctgaaacctgagatggacgagaagggcaacctgaccaccgccggctttgcctgctctcagtgtggccagcccctgttcgtgtacaagctggagcaggtgtctgagaagggcaaggcttacaccaactacttcggacggtgcaatgtggccgagcacgaaaagctgatcctgctggcccagctgaagcccgagaaggatagcgacgaagccgtgacatatagcctgggaaagtttgggcagagggccctggatttctacagcattcatgtgaccaaggagtccacccaccccgtgaagcccctggcccagatcgccggaaacagatacgcctccggacctgtgggaaaggccctgagcgacgcatgtatgggcacaatcgcctccttcctgtctaagtaccaggacatcatcatcgaacaccagaaggtggtgaagggcaaccagaagagactggagagcctgcgggagctggccggcaaggaaaacctggaataccctagcgtgaccctgccacctcagcctcacaccaaggagggcgttgatgcctacaacgaagtgatcgcccgggtgcgaatgtgggtgaacctgaacctgtggcagaagctgaagctaagcagagatgatgccaagcctctgctgagactgaagggattcccttcctttcctctggtcgagagacaggccaacgaagtggactggtgggacatggtgtgtaacgtgaagaagctgatcaacgagaaaaaggaggatggcaaggtgttttggcagaatctggctggctacaagagacaggaagccctgagaccatacctgagcagcgaggaagatcggaagaagggaaagaaattcgctcggtaccagctgggcgacctgctgctgcacctggaaaagaagcacggcgaggactggggaaaggtgtacgacgaggcctgggagcggattgacaagaaagtggaaggcctgagcaagcacatcaagctggaagaggaacggagaagcgaggacgcccagagcaaggccgccctgaccgactggctgcgggctaaggccagcttcgtgatcgagggcctgaaggaggccgacaaggacgagttctgcagatgcgagctgaagctgcagaagtggtacggggacctgcggggaaagcccttcgccatcgaagccgagaacagcatcctggacatcagcggcttcagcaagcagtacaactgtgccttcatctggcagaaggacggcgtgaagaagctgaacctgtacctgatcatcaactacttcaagggcggcaagctgcggttcaagaagatcaaacctgaagccttcgaagccaacagattctacaccgtgatcaacaaaaagagcggcgagatcgtgcccatggaggtgaacttcaacttcgacgaccccaacctgatcatcctgcctctggcctttggcaagagacagggcagagaattcatctggaacgacctgctgtccctggaaaccggcagcctgaagctggccaacggaagagtgatcgagaagacactgtacaacagaagaacccggcaggatgagcctgccctgttcgtggccctgaccttcgagcggcgggaggtcctggactcctccaatatcaaaccaatgaacctgatcggcgtggcaagaggcgaaaacatccccgccgtgatcgccctgaccgaccccgagggctgcccactgagccggtttaaggatagcctgggaaacccaacccacatcctgagaatcggcgagagctataaggagaagcagcggaccatccaggccaagaaggaggtggagcagcggagagccggcggctacagccggaagtacgccagcaaagccaagaatctggcagacgatatggtgagaaacaccgctagagatctgctgtactacgccgtgacccaggatgccatgctgatcttcgccaacctgagccggggcttcggccggcagggcaagcggaccttcatggccgagagacagtacacacggatggaggactggctgaccgccaagctggcctacgagggcctgagcaagacctacctgtccaagacactggcccagtacacctccaagacatgcagcaactgtgggtttaccatcaccagcgccgactacgacagggtgctggagaagctgaagaagacagcaacaggctggatgaccacaattaacggcaaggagctgaaggtggagggccagattacctactacaacagatacaagagacagaacgtagtcaaggacctgtccgtcgagctggatagactgagcgaagaatctgtgaacaacgacatctcctcctggacaaagggcagaagcggagaagctctgagcctcctgaagaaaagattctcccatagacccgtgcaggagaagttcgtgtgcctgaactgcggcttcgagacacacgcagccgagcaagccgccctgaacatcgccagatcctggctgttcctgcggagccaggagtacaagaaataccagacaaacaagacaaccggcaacaccgataagagagccttcgtcgagacctggcagtccttttaccggaagaagcttaaggaggtgtggaaacctgccgtgcggtctggcggatctggcggaggctccaccagccccaagaaaaagagaaaagtctaagctgccttctgcggggcttgccttctggccatgcccttcttctctcccttgcacctgtacctcttggtctttgaataaagcctgagtaggaaggctagcaaaaaaaaaaaaaaaaaaaaaaaaaaaaaaaaaaaaaaaaaaaaaaaaaaaaaaaaaaaaaaaaaaaaaaaaaaaaaaaa

SEQ ID NO: 13252 - RNA, 5785 nt, synthetic construct
  source 1..5785: mol_type = other RNA
aggaaataagagagaaaagaagagtaagaagaaatataagagccaccatggcccctaagaagaagcgtaaagtgagccggatggaacgcctcgtctacgaggtgcggcagaagtgcagaaacatcgaggacatctgcatctcctgcggatctctgaacgtgaccctggagcacccactgttcatcggcggcatgtgccagaactgtaaaaactgttttctggagtgtgcctatcaatacgacgatgacggctaccagagctactgcaccatctgttgcggcggaagagaggtgctgatgtgtggaaataacaactgctgccggtgcttctgcgtggaatgcgtggacctgctggtgggccccggcgccgcccaggccgctattaaggaagatccttggaactgctacatgtgcggccacaagggcacatacggcctgctgagacggagagaggactggcctagcagactgcagatgttcttcgccaataaccacgaccaggagttcgacccccctaaggtgtaccctcccgtccccgccgagaagagaaagcccatccgggtcctgagcctgttcgatggcatcgccaccggtctgctggtgctgaaggacctgggcatccaggtggataggtacattgcctccgaggtgtgcgaggactccatcaccgtgggaatggtgcgtcatcagggcaagatcatgtacgtgggcgacgtgcggagcgtgacacagaagcatatccaggagtggggccctttcgacctggtgatcggcggcagcccttgcaatgacctgagcatcgtgaacccagcccggaagggcctgtacgagggaaccggcagactgttcttcgagttttacagactgctgcacgacgcccggcctaaggaaggcgacgaccggcccttcttttggctgttcgagaatgtggtggccatgggagtcagcgacaagcgggatattagccggttcctggagagcaaccccgtgatgatcgatgccaaggaagtgagcgccgcccaccgggccagatacttctggggcaatctgcctggcatgaacagacccctggccagcaccgtgaacgacaagctggagctgcaggagtgcctggagcacggccggatcgccaagttcagcaaggtgagaaccatcaccacccgaagcaacagcatcaaacaaggcaaggaccagcactttcctgtgttcatgaacgagaaggaggacatcctgtggtgtaccgagatggagagagtgttcgggttcccagtccactacacagatgtcagcaacatgtctagactggccagacagagactgctgggaagaagctggtccgtccctgtgatcagacacctgttcgcccctctgaaggagtacttcgcctgcgtgagcagcggcaacagcaacgccaacagccggggccccagcttctctagcggcctggtgccactgtccctgagagggagccacatgggccccatggagatctacaaaaccgtgagcgcctggaagcggcagcctgtgcgcgtgctgagcctgtttcggaatatcgataaagtcctgaaaagcctgggattcctggagagcggctctggctccggcggtggcaccctgaagtacgtggaggatgtgacaaacgtggtcagacgggatgtggagaagtggggccccttcgatctggtgtacggcagcacccaacccctgggcagctcttgtgaccggtgccctggctggtacatgtttcagttccaccggatcctgcagtacgccctgccgagacaggagtcccagcggccattcttttggattttcatggacaacttgctgctgaccgaggatgaccaggaaactaccactcggttcctgcagaccgaagccgtgaccctgcaggacgtgagaggccgggactaccagaacgccatgcgggtgtggtccaacatccctggactgaaaagcaagcacgcacctctgacccctaaagaagaggagtacctgcaggcccaggtgcggagcagaagcaagctggacgcccctaaggtggatctgctggtgaagaattgcctcctgcccctgagagagtacttcaagtatttcagccagaatagtctgcccctgggaggcagcggcggcggcgacatgggcctggtgagcttcgaggacgtggccgtggacttcacctggcaggagtggcaggagctggacgccgcccagaggaccctgtacagggacgtgatgctggagaactacaggagcctggtgtggctgggccactgcctggccaagcccgagctgatcagcaagctggaggagggcttcgagccctggggcgtggccgaggccaccgagcagtgcctgccctgcgccgaggaccagaccggcggcccaagcagcggcgcccctcctcccagcggcggcagcccagccggctccccaacctctaccgaggagggcacctctgagtccgccacccccgagagcggccctggcacctccaccgagcccagcgagggcagcgcacccggcagccctgccggcagccccacctccacagaggagggaaccagcaccgagcccagcgaaggcagcgccccaggcaccagcaccgagcctagtgagcaggagattaaacggatcaacaagatcagaagaagacttgtgaaagacagcaacaccaagaaggccggcaagacaggccccatgaaaaccctgctggttagagtgatgacacccgatctgagagagcggctggaaaacctgagaaagaagcctgaaaatatcccccagcccatcagcaatacatctagagccaacctgaataagctgctgaccgattacaccgaaatgaagaaggcgatcctgcatgtgtactgggaagagttccagaaggaccctgtgggcctgatgagccgggtggcccagcctgccagcaagaagatcgatcagaacaagctgaaacctgagatggacgagaagggcaacctgaccaccgccggctttgcctgctctcagtgtggccagcccctgttcgtgtacaagctggagcaggtgtctgagaagggcaaggcttacaccaactacttcggacggtgcaatgtggccgagcacgaaaagctgatcctgctggcccagctgaagcccgagaaggatagcgacgaagccgtgacatatagcctgggaaagtttgggcagagggccctggatttctacagcattcatgtgaccaaggagtccacccaccccgtgaagcccctggcccagatcgccggaaacagatacgcctccggacctgtgggaaaggccctgagcgacgcatgtatgggcacaatcgcctccttcctgtctaagtaccaggacatcatcatcgaacaccagaaggtggtgaagggcaaccagaagagactggagagcctgcgggagctggccggcaaggaaaacctggaataccctagcgtgaccctgccacctcagcctcacaccaaggagggcgttgatgcctacaacgaagtgatcgcccgggtgcgaatgtgggtgaacctgaacctgtggcagaagctgaagctaagcagagatgatgccaagcctctgctgagactgaagggattcccttcctttcctctggtcgagagacaggccaacgaagtggactggtgggacatggtgtgtaacgtgaagaagctgatcaacgagaaaaaggaggatggcaaggtgttttggcagaatctggctggctacaagagacaggaagccctgagaccatacctgagcagcgaggaagatcggaagaagggaaagaaattcgctcggtaccagctgggcgacctgctgctgcacctggaaaagaagcacggcgaggactggggaaaggtgtacgacgaggcctgggagcggattgacaagaaagtggaaggcctgagcaagcacatcaagctggaagaggaacggagaagcgaggacgcccagagcaaggccgccctgaccgactggctgcgggctaaggccagcttcgtgatcgagggcctgaaggaggccgacaaggacgagttctgcagatgcgagctgaagctgcagaagtggtacggggacctgcggggaaagcccttcgccatcgaagccgagaacagcatcctggacatcagcggcttcagcaagcagtacaactgtgccttcatctggcagaaggacggcgtgaagaagctgaacctgtacctgatcatcaactacttcaagggcggcaagctgcggttcaagaagatcaaacctgaagccttcgaagccaacagattctacaccgtgatcaacaaaaagagcggcgagatcgtgcccatggaggtgaacttcaacttcgacgaccccaacctgatcatcctgcctctggcctttggcaagagacagggcagagaattcatctggaacgacctgctgtccctggaaaccggcagcctgaagctggccaacggaagagtgatcgagaagacactgtacaacagaagaacccggcaggatgagcctgccctgttcgtggccctgaccttcgagcggcgggaggtcctggactcctccaatatcaaaccaatgaacctgatcggcgtggcaagaggcgaaaacatccccgccgtgatcgccctgaccgaccccgagggctgcccactgagccggtttaaggatagcctgggaaacccaacccacatcctgagaatcggcgagagctataaggagaagcagcggaccatccaggccaagaaggaggtggagcagcggagagccggcggctacagccggaagtacgccagcaaagccaagaatctggcagacgatatggtgagaaacaccgctagagatctgctgtactacgccgtgacccaggatgccatgctgatcttcgccaacctgagccggggcttcggccggcagggcaagcggaccttcatggccgagagacagtacacacggatggaggactggctgaccgccaagctggcctacgagggcctgagcaagacctacctgtccaagacactggcccagtacacctccaagacatgcagcaactgtgggtttaccatcaccagcgccgactacgacagggtgctggagaagctgaagaagacagcaacaggctggatgaccacaattaacggcaaggagctgaaggtggagggccagattacctactacaacagatacaagagacagaacgtagtcaaggacctgtccgtcgagctggatagactgagcgaagaatctgtgaacaacgacatctcctcctggacaaagggcagaagcggagaagctctgagcctcctgaagaaaagattctcccatagacccgtgcaggagaagttcgtgtgcctgaactgcggcttcgagacacacgcagccgagcaagccgccctgaacatcgccagatcctggctgttcctgcggagccaggagtacaagaaataccagacaaacaagacaaccggcaacaccgataagagagccttcgtcgagacctggcagtccttttaccggaagaagcttaaggaggtgtggaaacctgccgtgcggtctggcggatctggcggaggctccaccagccccaagaaaaagagaaaagtctaagctgccttctgcggggcttgccttctggccatgcccttcttctctcccttgcacctgtacctcttggtctttgaataaagcctgagtaggaaggctagcaaaaaaaaaaaaaaaaaaaaaaaaaaaaaaaaaaaaaaaaaaaaaaaaaaaaaaaaaaaaaaaaaaaaaaaaaaaaaaaa

SEQ ID NO: 13253 - RNA, 5785 nt, synthetic construct
  source 1..5785: mol_type = other RNA
aggaaataagagagaaaagaagagtaagaagaaatataagagccaccatggcccctaagaagaagcgtaaagtgagccggatggaacgcctcgtctacgaggtgcggcagaagtgcagaaacatcgaggacatctgcatctcctgcggatctctgaacgtgaccctggagcacccactgttcatcggcggcatgtgccagaactgtaaaaactgttttctggagtgtgcctatcaatacgacgatgacggctaccagagctactgcaccatctgttgcggcggaagagaggtgctgatgtgtggaaataacaactgctgccggtgcttctgcgtggaatgcgtggacctgctggtgggccccggcgccgcccaggccgctattaaggaagatccttggaactgctacatgtgcggccacaagggcacatacggcctgctgagacggagagaggactggcctagcagactgcagatgttcttcgccaataaccacgaccaggagttcgacccccctaaggtgtaccctcccgtccccgccgagaagagaaagcccatccgggtcctgagcctgttcgatggcatcgccaccggtctgctggtgctgaaggacctgggcatccaggtggataggtacattgcctccgaggtgtgcgaggactccatcaccgtgggaatggtgcgtcatcagggcaagatcatgtacgtgggcgacgtgcggagcgtgacacagaagcatatccaggagtggggccctttcgacctggtgatcggcggcagcccttgcaatgacctgagcatcgtgaacccagcccggaagggcctgtacgagggaaccggcagactgttcttcgagttttacagactgctgcacgacgcccggcctaaggaaggcgacgaccggcccttcttttggctgttcgagaatgtggtggccatgggagtcagcgacaagcgggatattagccggttcctggagagcaaccccgtgatgatcgatgccaaggaagtgagcgccgcccaccgggccagatacttctggggcaatctgcctggcatgaacagacccctggccagcaccgtgaacgacaagctggagctgcaggagtgcctggagcacggccggatcgccaagttcagcaaggtgagaaccatcaccacccgaagcaacagcatcaaacaaggcaaggaccagcactttcctgtgttcatgaacgagaaggaggacatcctgtggtgtaccgagatggagagagtgttcgggttcccagtccactacacagatgtcagcaacatgtctagactggccagacagagactgctgggaagaagctggtccgtccctgtgatcagacacctgttcgcccctctgaaggagtacttcgcctgcgtgagcagcggcaacagcaacgccaacagccggggccccagcttctctagcggcctggtgccactgtccctgagagggagccacatgggccccatggagatctacaaaaccgtgagcgcctggaagcggcagcctgtgcgcgtgctgagcctgtttcggaatatcgataaagtcctgaaaagcctgggattcctggagagcggctctggctccggcggtggcaccctgaagtacgtggaggatgtgacaaacgtggtcagacgggatgtggagaagtggggccccttcgatctggtgtacggcagcacccaacccctgggcagctcttgtgaccggtgccctggctggtacatgtttcagttccaccggatcctgcagtacgccctgccgagacaggagtcccagcggccattcttttggattttcatggacaacttgctgctgaccgaggatgaccaggaaactaccactcggttcctgcagaccgaagccgtgaccctgcaggacgtgagaggccgggactaccagaacgccatgcgggtgtggtccaacatccctggactgaaaagcaagcacgcacctctgacccctaaagaagaggagtacctgcaggcccaggtgcggagcagaagcaagctggacgcccctaaggtggatctgctggtgaagaattgcctcctgcccctgagagagtacttcaagtatttcagccagaatagtctgcccctgggaggcagcggcggcggcctgcagggccagctgaccttcagggacgtggccatcgagttcagcgaggaggagtggaggtgcctgacccacacccagaggcagctgtacagggacatgatgctggagaactacaggcacctgctgttcctgggcctgatcgtgagcaagcccgacctggtgagcttcctggagcagaagaaggacccctgggacgtgaagaggaagaagaccgtggtgttcgaccccggcaggtgggagtggggcggcccaagcagcggcgcccctcctcccagcggcggcagcccagccggctccccaacctctaccgaggagggcacctctgagtccgccacccccgagagcggccctggcacctccaccgagcccagcgagggcagcgcacccggcagccctgccggcagccccacctccacagaggagggaaccagcaccgagcccagcgaaggcagcgccccaggcaccagcaccgagcctagtgagcaggagattaaacggatcaacaagatcagaagaagacttgtgaaagacagcaacaccaagaaggccggcaagacaggccccatgaaaaccctgctggttagagtgatgacacccgatctgagagagcggctggaaaacctgagaaagaagcctgaaaatatcccccagcccatcagcaatacatctagagccaacctgaataagctgctgaccgattacaccgaaatgaagaaggcgatcctgcatgtgtactgggaagagttccagaaggaccctgtgggcctgatgagccgggtggcccagcctgccagcaagaagatcgatcagaacaagctgaaacctgagatggacgagaagggcaacctgaccaccgccggctttgcctgctctcagtgtggccagcccctgttcgtgtacaagctggagcaggtgtctgagaagggcaaggcttacaccaactacttcggacggtgcaatgtggccgagcacgaaaagctgatcctgctggcccagctgaagcccgagaaggatagcgacgaagccgtgacatatagcctgggaaagtttgggcagagggccctggatttctacagcattcatgtgaccaaggagtccacccaccccgtgaagcccctggcccagatcgccggaaacagatacgcctccggacctgtgggaaaggccctgagcgacgcatgtatgggcacaatcgcctccttcctgtctaagtaccaggacatcatcatcgaacaccagaaggtggtgaagggcaaccagaagagactggagagcctgcgggagctggccggcaaggaaaacctggaataccctagcgtgaccctgccacctcagcctcacaccaaggagggcgttgatgcctacaacgaagtgatcgcccgggtgcgaatgtgggtgaacctgaacctgtggcagaagctgaagctaagcagagatgatgccaagcctctgctgagactgaagggattcccttcctttcctctggtcgagagacaggccaacgaagtggactggtgggacatggtgtgtaacgtgaagaagctgatcaacgagaaaaaggaggatggcaaggtgttttggcagaatctggctggctacaagagacaggaagccctgagaccatacctgagcagcgaggaagatcggaagaagggaaagaaattcgctcggtaccagctgggcgacctgctgctgcacctggaaaagaagcacggcgaggactggggaaaggtgtacgacgaggcctgggagcggattgacaagaaagtggaaggcctgagcaagcacatcaagctggaagaggaacggagaagcgaggacgcccagagcaaggccgccctgaccgactggctgcgggctaaggccagcttcgtgatcgagggcctgaaggaggccgacaaggacgagttctgcagatgcgagctgaagctgcagaagtggtacggggacctgcggggaaagcccttcgccatcgaagccgagaacagcatcctggacatcagcggcttcagcaagcagtacaactgtgccttcatctggcagaaggacggcgtgaagaagctgaacctgtacctgatcatcaactacttcaagggcggcaagctgcggttcaagaagatcaaacctgaagccttcgaagccaacagattctacaccgtgatcaacaaaaagagcggcgagatcgtgcccatggaggtgaacttcaacttcgacgaccccaacctgatcatcctgcctctggcctttggcaagagacagggcagagaattcatctggaacgacctgctgtccctggaaaccggcagcctgaagctggccaacggaagagtgatcgagaagacactgtacaacagaagaacccggcaggatgagcctgccctgttcgtggccctgaccttcgagcggcgggaggtcctggactcctccaatatcaaaccaatgaacctgatcggcgtggcaagaggcgaaaacatccccgccgtgatcgccctgaccgaccccgagggctgcccactgagccggtttaaggatagcctgggaaacccaacccacatcctgagaatcggcgagagctataaggagaagcagcggaccatccaggccaagaaggaggtggagcagcggagagccggcggctacagccggaagtacgccagcaaagccaagaatctggcagacgatatggtgagaaacaccgctagagatctgctgtactacgccgtgacccaggatgccatgctgatcttcgccaacctgagccggggcttcggccggcagggcaagcggaccttcatggccgagagacagtacacacggatggaggactggctgaccgccaagctggcctacgagggcctgagcaagacctacctgtccaagacactggcccagtacacctccaagacatgcagcaactgtgggtttaccatcaccagcgccgactacgacagggtgctggagaagctgaagaagacagcaacaggctggatgaccacaattaacggcaaggagctgaaggtggagggccagattacctactacaacagatacaagagacagaacgtagtcaaggacctgtccgtcgagctggatagactgagcgaagaatctgtgaacaacgacatctcctcctggacaaagggcagaagcggagaagctctgagcctcctgaagaaaagattctcccatagacccgtgcaggagaagttcgtgtgcctgaactgcggcttcgagacacacgcagccgagcaagccgccctgaacatcgccagatcctggctgttcctgcggagccaggagtacaagaaataccagacaaacaagacaaccggcaacaccgataagagagccttcgtcgagacctggcagtccttttaccggaagaagcttaaggaggtgtggaaacctgccgtgcggtctggcggatctggcggaggctccaccagccccaagaaaaagagaaaagtctaagctgccttctgcggggcttgccttctggccatgcccttcttctctcccttgcacctgtacctcttggtctttgaataaagcctgagtaggaaggctagcaaaaaaaaaaaaaaaaaaaaaaaaaaaaaaaaaaaaaaaaaaaaaaaaaaaaaaaaaaaaaaaaaaaaaaaaaaaaaaaa

SEQ ID NO: 13254 - RNA, 5785 nt, synthetic construct
  source 1..5785: mol_type = other RNA
aggaaataagagagaaaagaagagtaagaagaaatataagagccaccatggcccctaagaagaagcgtaaagtgagccggatggaacgcctcgtctacgaggtgcggcagaagtgcagaaacatcgaggacatctgcatctcctgcggatctctgaacgtgaccctggagcacccactgttcatcggcggcatgtgccagaactgtaaaaactgttttctggagtgtgcctatcaatacgacgatgacggctaccagagctactgcaccatctgttgcggcggaagagaggtgctgatgtgtggaaataacaactgctgccggtgcttctgcgtggaatgcgtggacctgctggtgggccccggcgccgcccaggccgctattaaggaagatccttggaactgctacatgtgcggccacaagggcacatacggcctgctgagacggagagaggactggcctagcagactgcagatgttcttcgccaataaccacgaccaggagttcgacccccctaaggtgtaccctcccgtccccgccgagaagagaaagcccatccgggtcctgagcctgttcgatggcatcgccaccggtctgctggtgctgaaggacctgggcatccaggtggataggtacattgcctccgaggtgtgcgaggactccatcaccgtgggaatggtgcgtcatcagggcaagatcatgtacgtgggcgacgtgcggagcgtgacacagaagcatatccaggagtggggccctttcgacctggtgatcggcggcagcccttgcaatgacctgagcatcgtgaacccagcccggaagggcctgtacgagggaaccggcagactgttcttcgagttttacagactgctgcacgacgcccggcctaaggaaggcgacgaccggcccttcttttggctgttcgagaatgtggtggccatgggagtcagcgacaagcgggatattagccggttcctggagagcaaccccgtgatgatcgatgccaaggaagtgagcgccgcccaccgggccagatacttctggggcaatctgcctggcatgaacagacccctggccagcaccgtgaacgacaagctggagctgcaggagtgcctggagcacggccggatcgccaagttcagcaaggtgagaaccatcaccacccgaagcaacagcatcaaacaaggcaaggaccagcactttcctgtgttcatgaacgagaaggaggacatcctgtggtgtaccgagatggagagagtgttcgggttcccagtccactacacagatgtcagcaacatgtctagactggccagacagagactgctgggaagaagctggtccgtccctgtgatcagacacctgttcgcccctctgaaggagtacttcgcctgcgtgagcagcggcaacagcaacgccaacagccggggccccagcttctctagcggcctggtgccactgtccctgagagggagccacatgggccccatggagatctacaaaaccgtgagcgcctggaagcggcagcctgtgcgcgtgctgagcctgtttcggaatatcgataaagtcctgaaaagcctgggattcctggagagcggctctggctccggcggtggcaccctgaagtacgtggaggatgtgacaaacgtggtcagacgggatgtggagaagtggggccccttcgatctggtgtacggcagcacccaacccctgggcagctcttgtgaccggtgccctggctggtacatgtttcagttccaccggatcctgcagtacgccctgccgagacaggagtcccagcggccattcttttggattttcatggacaacttgctgctgaccgaggatgaccaggaaactaccactcggttcctgcagaccgaagccgtgaccctgcaggacgtgagaggccgggactaccagaacgccatgcgggtgtggtccaacatccctggactgaaaagcaagcacgcacctctgacccctaaagaagaggagtacctgcaggcccaggtgcggagcagaagcaagctggacgcccctaaggtggatctgctggtgaagaattgcctcctgcccctgagagagtacttcaagtatttcagccagaatagtctgcccctgggaggcagcggcggcggcagccaggagcccgtgaccttcgccgacgtggccgtggtgttcacccccgaggagtgggtgttcctggacagcacccagaggagcctgtacagggacgtgatgctggagaactacaggaacctggccagcgtggccgaccagctgtgcaagcccaacgccagcagctacctggagcagaggggcgagcagtggaccaccgacaggggcatcctggccgacacctgcgccgagccccagctgcagggcggcccaagcagcggcgcccctcctcccagcggcggcagcccagccggctccccaacctctaccgaggagggcacctctgagtccgccacccccgagagcggccctggcacctccaccgagcccagcgagggcagcgcacccggcagccctgccggcagccccacctccacagaggagggaaccagcaccgagcccagcgaaggcagcgccccaggcaccagcaccgagcctagtgagcaggagattaaacggatcaacaagatcagaagaagacttgtgaaagacagcaacaccaagaaggccggcaagacaggccccatgaaaaccctgctggttagagtgatgacacccgatctgagagagcggctggaaaacctgagaaagaagcctgaaaatatcccccagcccatcagcaatacatctagagccaacctgaataagctgctgaccgattacaccgaaatgaagaaggcgatcctgcatgtgtactgggaagagttccagaaggaccctgtgggcctgatgagccgggtggcccagcctgccagcaagaagatcgatcagaacaagctgaaacctgagatggacgagaagggcaacctgaccaccgccggctttgcctgctctcagtgtggccagcccctgttcgtgtacaagctggagcaggtgtctgagaagggcaaggcttacaccaactacttcggacggtgcaatgtggccgagcacgaaaagctgatcctgctggcccagctgaagcccgagaaggatagcgacgaagccgtgacatatagcctgggaaagtttgggcagagggccctggatttctacagcattcatgtgaccaaggagtccacccaccccgtgaagcccctggcccagatcgccggaaacagatacgcctccggacctgtgggaaaggccctgagcgacgcatgtatgggcacaatcgcctccttcctgtctaagtaccaggacatcatcatcgaacaccagaaggtggtgaagggcaaccagaagagactggagagcctgcgggagctggccggcaaggaaaacctggaataccctagcgtgaccctgccacctcagcctcacaccaaggagggcgttgatgcctacaacgaagtgatcgcccgggtgcgaatgtgggtgaacctgaacctgtggcagaagctgaagctaagcagagatgatgccaagcctctgctgagactgaagggattcccttcctttcctctggtcgagagacaggccaacgaagtggactggtgggacatggtgtgtaacgtgaagaagctgatcaacgagaaaaaggaggatggcaaggtgttttggcagaatctggctggctacaagagacaggaagccctgagaccatacctgagcagcgaggaagatcggaagaagggaaagaaattcgctcggtaccagctgggcgacctgctgctgcacctggaaaagaagcacggcgaggactggggaaaggtgtacgacgaggcctgggagcggattgacaagaaagtggaaggcctgagcaagcacatcaagctggaagaggaacggagaagcgaggacgcccagagcaaggccgccctgaccgactggctgcgggctaaggccagcttcgtgatcgagggcctgaaggaggccgacaaggacgagttctgcagatgcgagctgaagctgcagaagtggtacggggacctgcggggaaagcccttcgccatcgaagccgagaacagcatcctggacatcagcggcttcagcaagcagtacaactgtgccttcatctggcagaaggacggcgtgaagaagctgaacctgtacctgatcatcaactacttcaagggcggcaagctgcggttcaagaagatcaaacctgaagccttcgaagccaacagattctacaccgtgatcaacaaaaagagcggcgagatcgtgcccatggaggtgaacttcaacttcgacgaccccaacctgatcatcctgcctctggcctttggcaagagacagggcagagaattcatctggaacgacctgctgtccctggaaaccggcagcctgaagctggccaacggaagagtgatcgagaagacactgtacaacagaagaacccggcaggatgagcctgccctgttcgtggccctgaccttcgagcggcgggaggtcctggactcctccaatatcaaaccaatgaacctgatcggcgtggcaagaggcgaaaacatccccgccgtgatcgccctgaccgaccccgagggctgcccactgagccggtttaaggatagcctgggaaacccaacccacatcctgagaatcggcgagagctataaggagaagcagcggaccatccaggccaagaaggaggtggagcagcggagagccggcggctacagccggaagtacgccagcaaagccaagaatctggcagacgatatggtgagaaacaccgctagagatctgctgtactacgccgtgacccaggatgccatgctgatcttcgccaacctgagccggggcttcggccggcagggcaagcggaccttcatggccgagagacagtacacacggatggaggactggctgaccgccaagctggcctacgagggcctgagcaagacctacctgtccaagacactggcccagtacacctccaagacatgcagcaactgtgggtttaccatcaccagcgccgactacgacagggtgctggagaagctgaagaagacagcaacaggctggatgaccacaattaacggcaaggagctgaaggtggagggccagattacctactacaacagatacaagagacagaacgtagtcaaggacctgtccgtcgagctggatagactgagcgaagaatctgtgaacaacgacatctcctcctggacaaagggcagaagcggagaagctctgagcctcctgaagaaaagattctcccatagacccgtgcaggagaagttcgtgtgcctgaactgcggcttcgagacacacgcagccgagcaagccgccctgaacatcgccagatcctggctgttcctgcggagccaggagtacaagaaataccagacaaacaagacaaccggcaacaccgataagagagccttcgtcgagacctggcagtccttttaccggaagaagcttaaggaggtgtggaaacctgccgtgcggtctggcggatctggcggaggctccaccagccccaagaaaaagagaaaagtctaagctgccttctgcggggcttgccttctggccatgcccttcttctctcccttgcacctgtacctcttggtctttgaataaagcctgagtaggaaggctagcaaaaaaaaaaaaaaaaaaaaaaaaaaaaaaaaaaaaaaaaaaaaaaaaaaaaaaaaaaaaaaaaaaaaaaaaaaaaaaaa

SEQ ID NO: 13255 - RNA, 5785 nt, synthetic construct
  source 1..5785: mol_type = other RNA
aggaaataagagagaaaagaagagtaagaagaaatataagagccaccatggcccctaagaagaagcgtaaagtgagccggatggaacgcctcgtctacgaggtgcggcagaagtgcagaaacatcgaggacatctgcatctcctgcggatctctgaacgtgaccctggagcacccactgttcatcggcggcatgtgccagaactgtaaaaactgttttctggagtgtgcctatcaatacgacgatgacggctaccagagctactgcaccatctgttgcggcggaagagaggtgctgatgtgtggaaataacaactgctgccggtgcttctgcgtggaatgcgtggacctgctggtgggccccggcgccgcccaggccgctattaaggaagatccttggaactgctacatgtgcggccacaagggcacatacggcctgctgagacggagagaggactggcctagcagactgcagatgttcttcgccaataaccacgaccaggagttcgacccccctaaggtgtaccctcccgtccccgccgagaagagaaagcccatccgggtcctgagcctgttcgatggcatcgccaccggtctgctggtgctgaaggacctgggcatccaggtggataggtacattgcctccgaggtgtgcgaggactccatcaccgtgggaatggtgcgtcatcagggcaagatcatgtacgtgggcgacgtgcggagcgtgacacagaagcatatccaggagtggggccctttcgacctggtgatcggcggcagcccttgcaatgacctgagcatcgtgaacccagcccggaagggcctgtacgagggaaccggcagactgttcttcgagttttacagactgctgcacgacgcccggcctaaggaaggcgacgaccggcccttcttttggctgttcgagaatgtggtggccatgggagtcagcgacaagcgggatattagccggttcctggagagcaaccccgtgatgatcgatgccaaggaagtgagcgccgcccaccgggccagatacttctggggcaatctgcctggcatgaacagacccctggccagcaccgtgaacgacaagctggagctgcaggagtgcctggagcacggccggatcgccaagttcagcaaggtgagaaccatcaccacccgaagcaacagcatcaaacaaggcaaggaccagcactttcctgtgttcatgaacgagaaggaggacatcctgtggtgtaccgagatggagagagtgttcgggttcccagtccactacacagatgtcagcaacatgtctagactggccagacagagactgctgggaagaagctggtccgtccctgtgatcagacacctgttcgcccctctgaaggagtacttcgcctgcgtgagcagcggcaacagcaacgccaacagccggggccccagcttctctagcggcctggtgccactgtccctgagagggagccacatgggccccatggagatctacaaaaccgtgagcgcctggaagcggcagcctgtgcgcgtgctgagcctgtttcggaatatcgataaagtcctgaaaagcctgggattcctggagagcggctctggctccggcggtggcaccctgaagtacgtggaggatgtgacaaacgtggtcagacgggatgtggagaagtggggccccttcgatctggtgtacggcagcacccaacccctgggcagctcttgtgaccggtgccctggctggtacatgtttcagttccaccggatcctgcagtacgccctgccgagacaggagtcccagcggccattcttttggattttcatggacaacttgctgctgaccgaggatgaccaggaaactaccactcggttcctgcagaccgaagccgtgaccctgcaggacgtgagaggccgggactaccagaacgccatgcgggtgtggtccaacatccctggactgaaaagcaagcacgcacctctgacccctaaagaagaggagtacctgcaggcccaggtgcggagcagaagcaagctggacgcccctaaggtggatctgctggtgaagaattgcctcctgcccctgagagagtacttcaagtatttcagccagaatagtctgcccctgggaggcagcggcggcggcgacgtggtgacctacgaggacgtgcacgtgaacttcacccaggaggagtgggccctgctggaccccagccagaagaggctgtacaaggtggtgatgctggagacctacaagaacctgagcgccatcggctacatctgggaggaccacaccatcgagcagcacttccagagcagcaggagccacggcaggcacaagaggcacaggaccggcgagcagcccagcgagctgatccagcacggcaagggcggcccaagcagcggcgcccctcctcccagcggcggcagcccagccggctccccaacctctaccgaggagggcacctctgagtccgccacccccgagagcggccctggcacctccaccgagcccagcgagggcagcgcacccggcagccctgccggcagccccacctccacagaggagggaaccagcaccgagcccagcgaaggcagcgccccaggcaccagcaccgagcctagtgagcaggagattaaacggatcaacaagatcagaagaagacttgtgaaagacagcaacaccaagaaggccggcaagacaggccccatgaaaaccctgctggttagagtgatgacacccgatctgagagagcggctggaaaacctgagaaagaagcctgaaaatatcccccagcccatcagcaatacatctagagccaacctgaataagctgctgaccgattacaccgaaatgaagaaggcgatcctgcatgtgtactgggaagagttccagaaggaccctgtgggcctgatgagccgggtggcccagcctgccagcaagaagatcgatcagaacaagctgaaacctgagatggacgagaagggcaacctgaccaccgccggctttgcctgctctcagtgtggccagcccctgttcgtgtacaagctggagcaggtgtctgagaagggcaaggcttacaccaactacttcggacggtgcaatgtggccgagcacgaaaagctgatcctgctggcccagctgaagcccgagaaggatagcgacgaagccgtgacatatagcctgggaaagtttgggcagagggccctggatttctacagcattcatgtgaccaaggagtccacccaccccgtgaagcccctggcccagatcgccggaaacagatacgcctccggacctgtgggaaaggccctgagcgacgcatgtatgggcacaatcgcctccttcctgtctaagtaccaggacatcatcatcgaacaccagaaggtggtgaagggcaaccagaagagactggagagcctgcgggagctggccggcaaggaaaacctggaataccctagcgtgaccctgccacctcagcctcacaccaaggagggcgttgatgcctacaacgaagtgatcgcccgggtgcgaatgtgggtgaacctgaacctgtggcagaagctgaagctaagcagagatgatgccaagcctctgctgagactgaagggattcccttcctttcctctggtcgagagacaggccaacgaagtggactggtgggacatggtgtgtaacgtgaagaagctgatcaacgagaaaaaggaggatggcaaggtgttttggcagaatctggctggctacaagagacaggaagccctgagaccatacctgagcagcgaggaagatcggaagaagggaaagaaattcgctcggtaccagctgggcgacctgctgctgcacctggaaaagaagcacggcgaggactggggaaaggtgtacgacgaggcctgggagcggattgacaagaaagtggaaggcctgagcaagcacatcaagctggaagaggaacggagaagcgaggacgcccagagcaaggccgccctgaccgactggctgcgggctaaggccagcttcgtgatcgagggcctgaaggaggccgacaaggacgagttctgcagatgcgagctgaagctgcagaagtggtacggggacctgcggggaaagcccttcgccatcgaagccgagaacagcatcctggacatcagcggcttcagcaagcagtacaactgtgccttcatctggcagaaggacggcgtgaagaagctgaacctgtacctgatcatcaactacttcaagggcggcaagctgcggttcaagaagatcaaacctgaagccttcgaagccaacagattctacaccgtgatcaacaaaaagagcggcgagatcgtgcccatggaggtgaacttcaacttcgacgaccccaacctgatcatcctgcctctggcctttggcaagagacagggcagagaattcatctggaacgacctgctgtccctggaaaccggcagcctgaagctggccaacggaagagtgatcgagaagacactgtacaacagaagaacccggcaggatgagcctgccctgttcgtggccctgaccttcgagcggcgggaggtcctggactcctccaatatcaaaccaatgaacctgatcggcgtggcaagaggcgaaaacatccccgccgtgatcgccctgaccgaccccgagggctgcccactgagccggtttaaggatagcctgggaaacccaacccacatcctgagaatcggcgagagctataaggagaagcagcggaccatccaggccaagaaggaggtggagcagcggagagccggcggctacagccggaagtacgccagcaaagccaagaatctggcagacgatatggtgagaaacaccgctagagatctgctgtactacgccgtgacccaggatgccatgctgatcttcgccaacctgagccggggcttcggccggcagggcaagcggaccttcatggccgagagacagtacacacggatggaggactggctgaccgccaagctggcctacgagggcctgagcaagacctacctgtccaagacactggcccagtacacctccaagacatgcagcaactgtgggtttaccatcaccagcgccgactacgacagggtgctggagaagctgaagaagacagcaacaggctggatgaccacaattaacggcaaggagctgaaggtggagggccagattacctactacaacagatacaagagacagaacgtagtcaaggacctgtccgtcgagctggatagactgagcgaagaatctgtgaacaacgacatctcctcctggacaaagggcagaagcggagaagctctgagcctcctgaagaaaagattctcccatagacccgtgcaggagaagttcgtgtgcctgaactgcggcttcgagacacacgcagccgagcaagccgccctgaacatcgccagatcctggctgttcctgcggagccaggagtacaagaaataccagacaaacaagacaaccggcaacaccgataagagagccttcgtcgagacctggcagtccttttaccggaagaagcttaaggaggtgtggaaacctgccgtgcggtctggcggatctggcggaggctccaccagccccaagaaaaagagaaaagtctaagctgccttctgcggggcttgccttctggccatgcccttcttctctcccttgcacctgtacctcttggtctttgaataaagcctgagtaggaaggctagcaaaaaaaaaaaaaaaaaaaaaaaaaaaaaaaaaaaaaaaaaaaaaaaaaaaaaaaaaaaaaaaaaaaaaaaaaaaaaaaa

SEQ ID NO: 13256 - RNA, 5785 nt, synthetic construct
  source 1..5785: mol_type = other RNA
aggaaataagagagaaaagaagagtaagaagaaatataagagccaccatggcccctaagaagaagcgtaaagtgagccggatggaacgcctcgtctacgaggtgcggcagaagtgcagaaacatcgaggacatctgcatctcctgcggatctctgaacgtgaccctggagcacccactgttcatcggcggcatgtgccagaactgtaaaaactgttttctggagtgtgcctatcaatacgacgatgacggctaccagagctactgcaccatctgttgcggcggaagagaggtgctgatgtgtggaaataacaactgctgccggtgcttctgcgtggaatgcgtggacctgctggtgggccccggcgccgcccaggccgctattaaggaagatccttggaactgctacatgtgcggccacaagggcacatacggcctgctgagacggagagaggactggcctagcagactgcagatgttcttcgccaataaccacgaccaggagttcgacccccctaaggtgtaccctcccgtccccgccgagaagagaaagcccatccgggtcctgagcctgttcgatggcatcgccaccggtctgctggtgctgaaggacctgggcatccaggtggataggtacattgcctccgaggtgtgcgaggactccatcaccgtgggaatggtgcgtcatcagggcaagatcatgtacgtgggcgacgtgcggagcgtgacacagaagcatatccaggagtggggccctttcgacctggtgatcggcggcagcccttgcaatgacctgagcatcgtgaacccagcccggaagggcctgtacgagggaaccggcagactgttcttcgagttttacagactgctgcacgacgcccggcctaaggaaggcgacgaccggcccttcttttggctgttcgagaatgtggtggccatgggagtcagcgacaagcgggatattagccggttcctggagagcaaccccgtgatgatcgatgccaaggaagtgagcgccgcccaccgggccagatacttctggggcaatctgcctggcatgaacagacccctggccagcaccgtgaacgacaagctggagctgcaggagtgcctggagcacggccggatcgccaagttcagcaaggtgagaaccatcaccacccgaagcaacagcatcaaacaaggcaaggaccagcactttcctgtgttcatgaacgagaaggaggacatcctgtggtgtaccgagatggagagagtgttcgggttcccagtccactacacagatgtcagcaacatgtctagactggccagacagagactgctgggaagaagctggtccgtccctgtgatcagacacctgttcgcccctctgaaggagtacttcgcctgcgtgagcagcggcaacagcaacgccaacagccggggccccagcttctctagcggcctggtgccactgtccctgagagggagccacatgggccccatggagatctacaaaaccgtgagcgcctggaagcggcagcctgtgcgcgtgctgagcctgtttcggaatatcgataaagtcctgaaaagcctgggattcctggagagcggctctggctccggcggtggcaccctgaagtacgtggaggatgtgacaaacgtggtcagacgggatgtggagaagtggggccccttcgatctggtgtacggcagcacccaacccctgggcagctcttgtgaccggtgccctggctggtacatgtttcagttccaccggatcctgcagtacgccctgccgagacaggagtcccagcggccattcttttggattttcatggacaacttgctgctgaccgaggatgaccaggaaactaccactcggttcctgcagaccgaagccgtgaccctgcaggacgtgagaggccgggactaccagaacgccatgcgggtgtggtccaacatccctggactgaaaagcaagcacgcacctctgacccctaaagaagaggagtacctgcaggcccaggtgcggagcagaagcaagctggacgcccctaaggtggatctgctggtgaagaattgcctcctgcccctgagagagtacttcaagtatttcagccagaatagtctgcccctgggaggcagcggcggcggcatggacgccgtgacctacgaggacgtgcacgtgaacttcagcagggaggagtgggtgctgctggaccccagccagaagagcctgtacaaggacgtgatgctggagacctactggaacctgacctgcatcggctacaagtggaaggaccacgacaacgaggagtactgccagaacagcggcaggcacggcaggtgcatcaactgccccagcgcctacggcaagaagcagtgcaccaacctgttcggcggcccaagcagcggcgcccctcctcccagcggcggcagcccagccggctccccaacctctaccgaggagggcacctctgagtccgccacccccgagagcggccctggcacctccaccgagcccagcgagggcagcgcacccggcagccctgccggcagccccacctccacagaggagggaaccagcaccgagcccagcgaaggcagcgccccaggcaccagcaccgagcctagtgagcaggagattaaacggatcaacaagatcagaagaagacttgtgaaagacagcaacaccaagaaggccggcaagacaggccccatgaaaaccctgctggttagagtgatgacacccgatctgagagagcggctggaaaacctgagaaagaagcctgaaaatatcccccagcccatcagcaatacatctagagccaacctgaataagctgctgaccgattacaccgaaatgaagaaggcgatcctgcatgtgtactgggaagagttccagaaggaccctgtgggcctgatgagccgggtggcccagcctgccagcaagaagatcgatcagaacaagctgaaacctgagatggacgagaagggcaacctgaccaccgccggctttgcctgctctcagtgtggccagcccctgttcgtgtacaagctggagcaggtgtctgagaagggcaaggcttacaccaactacttcggacggtgcaatgtggccgagcacgaaaagctgatcctgctggcccagctgaagcccgagaaggatagcgacgaagccgtgacatatagcctgggaaagtttgggcagagggccctggatttctacagcattcatgtgaccaaggagtccacccaccccgtgaagcccctggcccagatcgccggaaacagatacgcctccggacctgtgggaaaggccctgagcgacgcatgtatgggcacaatcgcctccttcctgtctaagtaccaggacatcatcatcgaacaccagaaggtggtgaagggcaaccagaagagactggagagcctgcgggagctggccggcaaggaaaacctggaataccctagcgtgaccctgccacctcagcctcacaccaaggagggcgttgatgcctacaacgaagtgatcgcccgggtgcgaatgtgggtgaacctgaacctgtggcagaagctgaagctaagcagagatgatgccaagcctctgctgagactgaagggattcccttcctttcctctggtcgagagacaggccaacgaagtggactggtgggacatggtgtgtaacgtgaagaagctgatcaacgagaaaaaggaggatggcaaggtgttttggcagaatctggctggctacaagagacaggaagccctgagaccatacctgagcagcgaggaagatcggaagaagggaaagaaattcgctcggtaccagctgggcgacctgctgctgcacctggaaaagaagcacggcgaggactggggaaaggtgtacgacgaggcctgggagcggattgacaagaaagtggaaggcctgagcaagcacatcaagctggaagaggaacggagaagcgaggacgcccagagcaaggccgccctgaccgactggctgcgggctaaggccagcttcgtgatcgagggcctgaaggaggccgacaaggacgagttctgcagatgcgagctgaagctgcagaagtggtacggggacctgcggggaaagcccttcgccatcgaagccgagaacagcatcctggacatcagcggcttcagcaagcagtacaactgtgccttcatctggcagaaggacggcgtgaagaagctgaacctgtacctgatcatcaactacttcaagggcggcaagctgcggttcaagaagatcaaacctgaagccttcgaagccaacagattctacaccgtgatcaacaaaaagagcggcgagatcgtgcccatggaggtgaacttcaacttcgacgaccccaacctgatcatcctgcctctggcctttggcaagagacagggcagagaattcatctggaacgacctgctgtccctggaaaccggcagcctgaagctggccaacggaagagtgatcgagaagacactgtacaacagaagaacccggcaggatgagcctgccctgttcgtggccctgaccttcgagcggcgggaggtcctggactcctccaatatcaaaccaatgaacctgatcggcgtggcaagaggcgaaaacatccccgccgtgatcgccctgaccgaccccgagggctgcccactgagccggtttaaggatagcctgggaaacccaacccacatcctgagaatcggcgagagctataaggagaagcagcggaccatccaggccaagaaggaggtggagcagcggagagccggcggctacagccggaagtacgccagcaaagccaagaatctggcagacgatatggtgagaaacaccgctagagatctgctgtactacgccgtgacccaggatgccatgctgatcttcgccaacctgagccggggcttcggccggcagggcaagcggaccttcatggccgagagacagtacacacggatggaggactggctgaccgccaagctggcctacgagggcctgagcaagacctacctgtccaagacactggcccagtacacctccaagacatgcagcaactgtgggtttaccatcaccagcgccgactacgacagggtgctggagaagctgaagaagacagcaacaggctggatgaccacaattaacggcaaggagctgaaggtggagggccagattacctactacaacagatacaagagacagaacgtagtcaaggacctgtccgtcgagctggatagactgagcgaagaatctgtgaacaacgacatctcctcctggacaaagggcagaagcggagaagctctgagcctcctgaagaaaagattctcccatagacccgtgcaggagaagttcgtgtgcctgaactgcggcttcgagacacacgcagccgagcaagccgccctgaacatcgccagatcctggctgttcctgcggagccaggagtacaagaaataccagacaaacaagacaaccggcaacaccgataagagagccttcgtcgagacctggcagtccttttaccggaagaagcttaaggaggtgtggaaacctgccgtgcggtctggcggatctggcggaggctccaccagccccaagaaaaagagaaaagtctaagctgccttctgcggggcttgccttctggccatgcccttcttctctcccttgcacctgtacctcttggtctttgaataaagcctgagtaggaaggctagcaaaaaaaaaaaaaaaaaaaaaaaaaaaaaaaaaaaaaaaaaaaaaaaaaaaaaaaaaaaaaaaaaaaaaaaaaaaaaaaa

SEQ ID NO: 13257 - RNA, 5785 nt, synthetic construct
  source 1..5785: mol_type = other RNA
aggaaataagagagaaaagaagagtaagaagaaatataagagccaccatggcccctaagaagaagcgtaaagtgagccggatggaacgcctcgtctacgaggtgcggcagaagtgcagaaacatcgaggacatctgcatctcctgcggatctctgaacgtgaccctggagcacccactgttcatcggcggcatgtgccagaactgtaaaaactgttttctggagtgtgcctatcaatacgacgatgacggctaccagagctactgcaccatctgttgcggcggaagagaggtgctgatgtgtggaaataacaactgctgccggtgcttctgcgtggaatgcgtggacctgctggtgggccccggcgccgcccaggccgctattaaggaagatccttggaactgctacatgtgcggccacaagggcacatacggcctgctgagacggagagaggactggcctagcagactgcagatgttcttcgccaataaccacgaccaggagttcgacccccctaaggtgtaccctcccgtccccgccgagaagagaaagcccatccgggtcctgagcctgttcgatggcatcgccaccggtctgctggtgctgaaggacctgggcatccaggtggataggtacattgcctccgaggtgtgcgaggactccatcaccgtgggaatggtgcgtcatcagggcaagatcatgtacgtgggcgacgtgcggagcgtgacacagaagcatatccaggagtggggccctttcgacctggtgatcggcggcagcccttgcaatgacctgagcatcgtgaacccagcccggaagggcctgtacgagggaaccggcagactgttcttcgagttttacagactgctgcacgacgcccggcctaaggaaggcgacgaccggcccttcttttggctgttcgagaatgtggtggccatgggagtcagcgacaagcgggatattagccggttcctggagagcaaccccgtgatgatcgatgccaaggaagtgagcgccgcccaccgggccagatacttctggggcaatctgcctggcatgaacagacccctggccagcaccgtgaacgacaagctggagctgcaggagtgcctggagcacggccggatcgccaagttcagcaaggtgagaaccatcaccacccgaagcaacagcatcaaacaaggcaaggaccagcactttcctgtgttcatgaacgagaaggaggacatcctgtggtgtaccgagatggagagagtgttcgggttcccagtccactacacagatgtcagcaacatgtctagactggccagacagagactgctgggaagaagctggtccgtccctgtgatcagacacctgttcgcccctctgaaggagtacttcgcctgcgtgagcagcggcaacagcaacgccaacagccggggccccagcttctctagcggcctggtgccactgtccctgagagggagccacatgggccccatggagatctacaaaaccgtgagcgcctggaagcggcagcctgtgcgcgtgctgagcctgtttcggaatatcgataaagtcctgaaaagcctgggattcctggagagcggctctggctccggcggtggcaccctgaagtacgtggaggatgtgacaaacgtggtcagacgggatgtggagaagtggggccccttcgatctggtgtacggcagcacccaacccctgggcagctcttgtgaccggtgccctggctggtacatgtttcagttccaccggatcctgcagtacgccctgccgagacaggagtcccagcggccattcttttggattttcatggacaacttgctgctgaccgaggatgaccaggaaactaccactcggttcctgcagaccgaagccgtgaccctgcaggacgtgagaggccgggactaccagaacgccatgcgggtgtggtccaacatccctggactgaaaagcaagcacgcacctctgacccctaaagaagaggagtacctgcaggcccaggtgcggagcagaagcaagctggacgcccctaaggtggatctgctggtgaagaattgcctcctgcccctgagagagtacttcaagtatttcagccagaatagtctgcccctgggaggcagcggcggcggcggcagccagggcaacctgccccaggccgagatcaccctgatgaaccaggcccaggagagcgtgaccttcgaggacgtggccgtgaacttcaccaacagggagtggcagtgcctgacctacgcccagaggcacctgtacaaggacgtgatgctggagaactacggcaacatggtgagcctgggcttccccttccccaagccccccctgatcagccacctggagagggaggtggacccctgcgtgggcggcccaagcagcggcgcccctcctcccagcggcggcagcccagccggctccccaacctctaccgaggagggcacctctgagtccgccacccccgagagcggccctggcacctccaccgagcccagcgagggcagcgcacccggcagccctgccggcagccccacctccacagaggagggaaccagcaccgagcccagcgaaggcagcgccccaggcaccagcaccgagcctagtgagcaggagattaaacggatcaacaagatcagaagaagacttgtgaaagacagcaacaccaagaaggccggcaagacaggccccatgaaaaccctgctggttagagtgatgacacccgatctgagagagcggctggaaaacctgagaaagaagcctgaaaatatcccccagcccatcagcaatacatctagagccaacctgaataagctgctgaccgattacaccgaaatgaagaaggcgatcctgcatgtgtactgggaagagttccagaaggaccctgtgggcctgatgagccgggtggcccagcctgccagcaagaagatcgatcagaacaagctgaaacctgagatggacgagaagggcaacctgaccaccgccggctttgcctgctctcagtgtggccagcccctgttcgtgtacaagctggagcaggtgtctgagaagggcaaggcttacaccaactacttcggacggtgcaatgtggccgagcacgaaaagctgatcctgctggcccagctgaagcccgagaaggatagcgacgaagccgtgacatatagcctgggaaagtttgggcagagggccctggatttctacagcattcatgtgaccaaggagtccacccaccccgtgaagcccctggcccagatcgccggaaacagatacgcctccggacctgtgggaaaggccctgagcgacgcatgtatgggcacaatcgcctccttcctgtctaagtaccaggacatcatcatcgaacaccagaaggtggtgaagggcaaccagaagagactggagagcctgcgggagctggccggcaaggaaaacctggaataccctagcgtgaccctgccacctcagcctcacaccaaggagggcgttgatgcctacaacgaagtgatcgcccgggtgcgaatgtgggtgaacctgaacctgtggcagaagctgaagctaagcagagatgatgccaagcctctgctgagactgaagggattcccttcctttcctctggtcgagagacaggccaacgaagtggactggtgggacatggtgtgtaacgtgaagaagctgatcaacgagaaaaaggaggatggcaaggtgttttggcagaatctggctggctacaagagacaggaagccctgagaccatacctgagcagcgaggaagatcggaagaagggaaagaaattcgctcggtaccagctgggcgacctgctgctgcacctggaaaagaagcacggcgaggactggggaaaggtgtacgacgaggcctgggagcggattgacaagaaagtggaaggcctgagcaagcacatcaagctggaagaggaacggagaagcgaggacgcccagagcaaggccgccctgaccgactggctgcgggctaaggccagcttcgtgatcgagggcctgaaggaggccgacaaggacgagttctgcagatgcgagctgaagctgcagaagtggtacggggacctgcggggaaagcccttcgccatcgaagccgagaacagcatcctggacatcagcggcttcagcaagcagtacaactgtgccttcatctggcagaaggacggcgtgaagaagctgaacctgtacctgatcatcaactacttcaagggcggcaagctgcggttcaagaagatcaaacctgaagccttcgaagccaacagattctacaccgtgatcaacaaaaagagcggcgagatcgtgcccatggaggtgaacttcaacttcgacgaccccaacctgatcatcctgcctctggcctttggcaagagacagggcagagaattcatctggaacgacctgctgtccctggaaaccggcagcctgaagctggccaacggaagagtgatcgagaagacactgtacaacagaagaacccggcaggatgagcctgccctgttcgtggccctgaccttcgagcggcgggaggtcctggactcctccaatatcaaaccaatgaacctgatcggcgtggcaagaggcgaaaacatccccgccgtgatcgccctgaccgaccccgagggctgcccactgagccggtttaaggatagcctgggaaacccaacccacatcctgagaatcggcgagagctataaggagaagcagcggaccatccaggccaagaaggaggtggagcagcggagagccggcggctacagccggaagtacgccagcaaagccaagaatctggcagacgatatggtgagaaacaccgctagagatctgctgtactacgccgtgacccaggatgccatgctgatcttcgccaacctgagccggggcttcggccggcagggcaagcggaccttcatggccgagagacagtacacacggatggaggactggctgaccgccaagctggcctacgagggcctgagcaagacctacctgtccaagacactggcccagtacacctccaagacatgcagcaactgtgggtttaccatcaccagcgccgactacgacagggtgctggagaagctgaagaagacagcaacaggctggatgaccacaattaacggcaaggagctgaaggtggagggccagattacctactacaacagatacaagagacagaacgtagtcaaggacctgtccgtcgagctggatagactgagcgaagaatctgtgaacaacgacatctcctcctggacaaagggcagaagcggagaagctctgagcctcctgaagaaaagattctcccatagacccgtgcaggagaagttcgtgtgcctgaactgcggcttcgagacacacgcagccgagcaagccgccctgaacatcgccagatcctggctgttcctgcggagccaggagtacaagaaataccagacaaacaagacaaccggcaacaccgataagagagccttcgtcgagacctggcagtccttttaccggaagaagcttaaggaggtgtggaaacctgccgtgcggtctggcggatctggcggaggctccaccagccccaagaaaaagagaaaagtctaagctgccttctgcggggcttgccttctggccatgcccttcttctctcccttgcacctgtacctcttggtctttgaataaagcctgagtaggaaggctagcaaaaaaaaaaaaaaaaaaaaaaaaaaaaaaaaaaaaaaaaaaaaaaaaaaaaaaaaaaaaaaaaaaaaaaaaaaaaaaaa

SEQ ID NO: 13258 - RNA, 5785 nt, synthetic construct
  source 1..5785: mol_type = other RNA
aggaaataagagagaaaagaagagtaagaagaaatataagagccaccatggcccctaagaagaagcgtaaagtgagccggatggaacgcctcgtctacgaggtgcggcagaagtgcagaaacatcgaggacatctgcatctcctgcggatctctgaacgtgaccctggagcacccactgttcatcggcggcatgtgccagaactgtaaaaactgttttctggagtgtgcctatcaatacgacgatgacggctaccagagctactgcaccatctgttgcggcggaagagaggtgctgatgtgtggaaataacaactgctgccggtgcttctgcgtggaatgcgtggacctgctggtgggccccggcgccgcccaggccgctattaaggaagatccttggaactgctacatgtgcggccacaagggcacatacggcctgctgagacggagagaggactggcctagcagactgcagatgttcttcgccaataaccacgaccaggagttcgacccccctaaggtgtaccctcccgtccccgccgagaagagaaagcccatccgggtcctgagcctgttcgatggcatcgccaccggtctgctggtgctgaaggacctgggcatccaggtggataggtacattgcctccgaggtgtgcgaggactccatcaccgtgggaatggtgcgtcatcagggcaagatcatgtacgtgggcgacgtgcggagcgtgacacagaagcatatccaggagtggggccctttcgacctggtgatcggcggcagcccttgcaatgacctgagcatcgtgaacccagcccggaagggcctgtacgagggaaccggcagactgttcttcgagttttacagactgctgcacgacgcccggcctaaggaaggcgacgaccggcccttcttttggctgttcgagaatgtggtggccatgggagtcagcgacaagcgggatattagccggttcctggagagcaaccccgtgatgatcgatgccaaggaagtgagcgccgcccaccgggccagatacttctggggcaatctgcctggcatgaacagacccctggccagcaccgtgaacgacaagctggagctgcaggagtgcctggagcacggccggatcgccaagttcagcaaggtgagaaccatcaccacccgaagcaacagcatcaaacaaggcaaggaccagcactttcctgtgttcatgaacgagaaggaggacatcctgtggtgtaccgagatggagagagtgttcgggttcccagtccactacacagatgtcagcaacatgtctagactggccagacagagactgctgggaagaagctggtccgtccctgtgatcagacacctgttcgcccctctgaaggagtacttcgcctgcgtgagcagcggcaacagcaacgccaacagccggggccccagcttctctagcggcctggtgccactgtccctgagagggagccacatgggccccatggagatctacaaaaccgtgagcgcctggaagcggcagcctgtgcgcgtgctgagcctgtttcggaatatcgataaagtcctgaaaagcctgggattcctggagagcggctctggctccggcggtggcaccctgaagtacgtggaggatgtgacaaacgtggtcagacgggatgtggagaagtggggccccttcgatctggtgtacggcagcacccaacccctgggcagctcttgtgaccggtgccctggctggtacatgtttcagttccaccggatcctgcagtacgccctgccgagacaggagtcccagcggccattcttttggattttcatggacaacttgctgctgaccgaggatgaccaggaaactaccactcggttcctgcagaccgaagccgtgaccctgcaggacgtgagaggccgggactaccagaacgccatgcgggtgtggtccaacatccctggactgaaaagcaagcacgcacctctgacccctaaagaagaggagtacctgcaggcccaggtgcggagcagaagcaagctggacgcccctaaggtggatctgctggtgaagaattgcctcctgcccctgagagagtacttcaagtatttcagccagaatagtctgcccctgggaggcagcggcggcggccaggtgcccgtgaccttcgaggacctggccgtgaggttcagcgccgaggagtggcacctgctggaggagtggcagagggagttccacagggacgtgatgagggagaactacgagatgctggtgagcctgggcaccgcccagctgctgcccctgagcgccttcctgagcctgaccgagccccaggaggacatgggcgacaacggctgcagcgacggcgagtgggagaggcccggcggcggcctgggcggcccaagcagcggcgcccctcctcccagcggcggcagcccagccggctccccaacctctaccgaggagggcacctctgagtccgccacccccgagagcggccctggcacctccaccgagcccagcgagggcagcgcacccggcagccctgccggcagccccacctccacagaggagggaaccagcaccgagcccagcgaaggcagcgccccaggcaccagcaccgagcctagtgagcaggagattaaacggatcaacaagatcagaagaagacttgtgaaagacagcaacaccaagaaggccggcaagacaggccccatgaaaaccctgctggttagagtgatgacacccgatctgagagagcggctggaaaacctgagaaagaagcctgaaaatatcccccagcccatcagcaatacatctagagccaacctgaataagctgctgaccgattacaccgaaatgaagaaggcgatcctgcatgtgtactgggaagagttccagaaggaccctgtgggcctgatgagccgggtggcccagcctgccagcaagaagatcgatcagaacaagctgaaacctgagatggacgagaagggcaacctgaccaccgccggctttgcctgctctcagtgtggccagcccctgttcgtgtacaagctggagcaggtgtctgagaagggcaaggcttacaccaactacttcggacggtgcaatgtggccgagcacgaaaagctgatcctgctggcccagctgaagcccgagaaggatagcgacgaagccgtgacatatagcctgggaaagtttgggcagagggccctggatttctacagcattcatgtgaccaaggagtccacccaccccgtgaagcccctggcccagatcgccggaaacagatacgcctccggacctgtgggaaaggccctgagcgacgcatgtatgggcacaatcgcctccttcctgtctaagtaccaggacatcatcatcgaacaccagaaggtggtgaagggcaaccagaagagactggagagcctgcgggagctggccggcaaggaaaacctggaataccctagcgtgaccctgccacctcagcctcacaccaaggagggcgttgatgcctacaacgaagtgatcgcccgggtgcgaatgtgggtgaacctgaacctgtggcagaagctgaagctaagcagagatgatgccaagcctctgctgagactgaagggattcccttcctttcctctggtcgagagacaggccaacgaagtggactggtgggacatggtgtgtaacgtgaagaagctgatcaacgagaaaaaggaggatggcaaggtgttttggcagaatctggctggctacaagagacaggaagccctgagaccatacctgagcagcgaggaagatcggaagaagggaaagaaattcgctcggtaccagctgggcgacctgctgctgcacctggaaaagaagcacggcgaggactggggaaaggtgtacgacgaggcctgggagcggattgacaagaaagtggaaggcctgagcaagcacatcaagctggaagaggaacggagaagcgaggacgcccagagcaaggccgccctgaccgactggctgcgggctaaggccagcttcgtgatcgagggcctgaaggaggccgacaaggacgagttctgcagatgcgagctgaagctgcagaagtggtacggggacctgcggggaaagcccttcgccatcgaagccgagaacagcatcctggacatcagcggcttcagcaagcagtacaactgtgccttcatctggcagaaggacggcgtgaagaagctgaacctgtacctgatcatcaactacttcaagggcggcaagctgcggttcaagaagatcaaacctgaagccttcgaagccaacagattctacaccgtgatcaacaaaaagagcggcgagatcgtgcccatggaggtgaacttcaacttcgacgaccccaacctgatcatcctgcctctggcctttggcaagagacagggcagagaattcatctggaacgacctgctgtccctggaaaccggcagcctgaagctggccaacggaagagtgatcgagaagacactgtacaacagaagaacccggcaggatgagcctgccctgttcgtggccctgaccttcgagcggcgggaggtcctggactcctccaatatcaaaccaatgaacctgatcggcgtggcaagaggcgaaaacatccccgccgtgatcgccctgaccgaccccgagggctgcccactgagccggtttaaggatagcctgggaaacccaacccacatcctgagaatcggcgagagctataaggagaagcagcggaccatccaggccaagaaggaggtggagcagcggagagccggcggctacagccggaagtacgccagcaaagccaagaatctggcagacgatatggtgagaaacaccgctagagatctgctgtactacgccgtgacccaggatgccatgctgatcttcgccaacctgagccggggcttcggccggcagggcaagcggaccttcatggccgagagacagtacacacggatggaggactggctgaccgccaagctggcctacgagggcctgagcaagacctacctgtccaagacactggcccagtacacctccaagacatgcagcaactgtgggtttaccatcaccagcgccgactacgacagggtgctggagaagctgaagaagacagcaacaggctggatgaccacaattaacggcaaggagctgaaggtggagggccagattacctactacaacagatacaagagacagaacgtagtcaaggacctgtccgtcgagctggatagactgagcgaagaatctgtgaacaacgacatctcctcctggacaaagggcagaagcggagaagctctgagcctcctgaagaaaagattctcccatagacccgtgcaggagaagttcgtgtgcctgaactgcggcttcgagacacacgcagccgagcaagccgccctgaacatcgccagatcctggctgttcctgcggagccaggagtacaagaaataccagacaaacaagacaaccggcaacaccgataagagagccttcgtcgagacctggcagtccttttaccggaagaagcttaaggaggtgtggaaacctgccgtgcggtctggcggatctggcggaggctccaccagccccaagaaaaagagaaaagtctaagctgccttctgcggggcttgccttctggccatgcccttcttctctcccttgcacctgtacctcttggtctttgaataaagcctgagtaggaaggctagcaaaaaaaaaaaaaaaaaaaaaaaaaaaaaaaaaaaaaaaaaaaaaaaaaaaaaaaaaaaaaaaaaaaaaaaaaaaaaaaa

SEQ ID NO: 13259 - RNA, 5785 nt, synthetic construct
  source 1..5785: mol_type = other RNA
aggaaataagagagaaaagaagagtaagaagaaatataagagccaccatggcccctaagaagaagcgtaaagtgagccggatggaacgcctcgtctacgaggtgcggcagaagtgcagaaacatcgaggacatctgcatctcctgcggatctctgaacgtgaccctggagcacccactgttcatcggcggcatgtgccagaactgtaaaaactgttttctggagtgtgcctatcaatacgacgatgacggctaccagagctactgcaccatctgttgcggcggaagagaggtgctgatgtgtggaaataacaactgctgccggtgcttctgcgtggaatgcgtggacctgctggtgggccccggcgccgcccaggccgctattaaggaagatccttggaactgctacatgtgcggccacaagggcacatacggcctgctgagacggagagaggactggcctagcagactgcagatgttcttcgccaataaccacgaccaggagttcgacccccctaaggtgtaccctcccgtccccgccgagaagagaaagcccatccgggtcctgagcctgttcgatggcatcgccaccggtctgctggtgctgaaggacctgggcatccaggtggataggtacattgcctccgaggtgtgcgaggactccatcaccgtgggaatggtgcgtcatcagggcaagatcatgtacgtgggcgacgtgcggagcgtgacacagaagcatatccaggagtggggccctttcgacctggtgatcggcggcagcccttgcaatgacctgagcatcgtgaacccagcccggaagggcctgtacgagggaaccggcagactgttcttcgagttttacagactgctgcacgacgcccggcctaaggaaggcgacgaccggcccttcttttggctgttcgagaatgtggtggccatgggagtcagcgacaagcgggatattagccggttcctggagagcaaccccgtgatgatcgatgccaaggaagtgagcgccgcccaccgggccagatacttctggggcaatctgcctggcatgaacagacccctggccagcaccgtgaacgacaagctggagctgcaggagtgcctggagcacggccggatcgccaagttcagcaaggtgagaaccatcaccacccgaagcaacagcatcaaacaaggcaaggaccagcactttcctgtgttcatgaacgagaaggaggacatcctgtggtgtaccgagatggagagagtgttcgggttcccagtccactacacagatgtcagcaacatgtctagactggccagacagagactgctgggaagaagctggtccgtccctgtgatcagacacctgttcgcccctctgaaggagtacttcgcctgcgtgagcagcggcaacagcaacgccaacagccggggccccagcttctctagcggcctggtgccactgtccctgagagggagccacatgggccccatggagatctacaaaaccgtgagcgcctggaagcggcagcctgtgcgcgtgctgagcctgtttcggaatatcgataaagtcctgaaaagcctgggattcctggagagcggctctggctccggcggtggcaccctgaagtacgtggaggatgtgacaaacgtggtcagacgggatgtggagaagtggggccccttcgatctggtgtacggcagcacccaacccctgggcagctcttgtgaccggtgccctggctggtacatgtttcagttccaccggatcctgcagtacgccctgccgagacaggagtcccagcggccattcttttggattttcatggacaacttgctgctgaccgaggatgaccaggaaactaccactcggttcctgcagaccgaagccgtgaccctgcaggacgtgagaggccgggactaccagaacgccatgcgggtgtggtccaacatccctggactgaaaagcaagcacgcacctctgacccctaaagaagaggagtacctgcaggcccaggtgcggagcagaagcaagctggacgcccctaaggtggatctgctggtgaagaattgcctcctgcccctgagagagtacttcaagtatttcagccagaatagtctgcccctgggaggcagcggcggcggcctgcaggaggccgtgaccttcaaggacgtggccgtggtgttcaccgaggaggagctgggcctgctggacagcacccagaggaccctgtacagggacgtgatgctggagaacttcaggaacctggtgagcctgggccaccagagcttcaagcccgacgtgatcagccagctggagagggaggagaagctgtggctgaagaagctgcagacccagaggggcaggaggagcggcggcaggagccagggcggcccaagcagcggcgcccctcctcccagcggcggcagcccagccggctccccaacctctaccgaggagggcacctctgagtccgccacccccgagagcggccctggcacctccaccgagcccagcgagggcagcgcacccggcagccctgccggcagccccacctccacagaggagggaaccagcaccgagcccagcgaaggcagcgccccaggcaccagcaccgagcctagtgagcaggagattaaacggatcaacaagatcagaagaagacttgtgaaagacagcaacaccaagaaggccggcaagacaggccccatgaaaaccctgctggttagagtgatgacacccgatctgagagagcggctggaaaacctgagaaagaagcctgaaaatatcccccagcccatcagcaatacatctagagccaacctgaataagctgctgaccgattacaccgaaatgaagaaggcgatcctgcatgtgtactgggaagagttccagaaggaccctgtgggcctgatgagccgggtggcccagcctgccagcaagaagatcgatcagaacaagctgaaacctgagatggacgagaagggcaacctgaccaccgccggctttgcctgctctcagtgtggccagcccctgttcgtgtacaagctggagcaggtgtctgagaagggcaaggcttacaccaactacttcggacggtgcaatgtggccgagcacgaaaagctgatcctgctggcccagctgaagcccgagaaggatagcgacgaagccgtgacatatagcctgggaaagtttgggcagagggccctggatttctacagcattcatgtgaccaaggagtccacccaccccgtgaagcccctggcccagatcgccggaaacagatacgcctccggacctgtgggaaaggccctgagcgacgcatgtatgggcacaatcgcctccttcctgtctaagtaccaggacatcatcatcgaacaccagaaggtggtgaagggcaaccagaagagactggagagcctgcgggagctggccggcaaggaaaacctggaataccctagcgtgaccctgccacctcagcctcacaccaaggagggcgttgatgcctacaacgaagtgatcgcccgggtgcgaatgtgggtgaacctgaacctgtggcagaagctgaagctaagcagagatgatgccaagcctctgctgagactgaagggattcccttcctttcctctggtcgagagacaggccaacgaagtggactggtgggacatggtgtgtaacgtgaagaagctgatcaacgagaaaaaggaggatggcaaggtgttttggcagaatctggctggctacaagagacaggaagccctgagaccatacctgagcagcgaggaagatcggaagaagggaaagaaattcgctcggtaccagctgggcgacctgctgctgcacctggaaaagaagcacggcgaggactggggaaaggtgtacgacgaggcctgggagcggattgacaagaaagtggaaggcctgagcaagcacatcaagctggaagaggaacggagaagcgaggacgcccagagcaaggccgccctgaccgactggctgcgggctaaggccagcttcgtgatcgagggcctgaaggaggccgacaaggacgagttctgcagatgcgagctgaagctgcagaagtggtacggggacctgcggggaaagcccttcgccatcgaagccgagaacagcatcctggacatcagcggcttcagcaagcagtacaactgtgccttcatctggcagaaggacggcgtgaagaagctgaacctgtacctgatcatcaactacttcaagggcggcaagctgcggttcaagaagatcaaacctgaagccttcgaagccaacagattctacaccgtgatcaacaaaaagagcggcgagatcgtgcccatggaggtgaacttcaacttcgacgaccccaacctgatcatcctgcctctggcctttggcaagagacagggcagagaattcatctggaacgacctgctgtccctggaaaccggcagcctgaagctggccaacggaagagtgatcgagaagacactgtacaacagaagaacccggcaggatgagcctgccctgttcgtggccctgaccttcgagcggcgggaggtcctggactcctccaatatcaaaccaatgaacctgatcggcgtggcaagaggcgaaaacatccccgccgtgatcgccctgaccgaccccgagggctgcccactgagccggtttaaggatagcctgggaaacccaacccacatcctgagaatcggcgagagctataaggagaagcagcggaccatccaggccaagaaggaggtggagcagcggagagccggcggctacagccggaagtacgccagcaaagccaagaatctggcagacgatatggtgagaaacaccgctagagatctgctgtactacgccgtgacccaggatgccatgctgatcttcgccaacctgagccggggcttcggccggcagggcaagcggaccttcatggccgagagacagtacacacggatggaggactggctgaccgccaagctggcctacgagggcctgagcaagacctacctgtccaagacactggcccagtacacctccaagacatgcagcaactgtgggtttaccatcaccagcgccgactacgacagggtgctggagaagctgaagaagacagcaacaggctggatgaccacaattaacggcaaggagctgaaggtggagggccagattacctactacaacagatacaagagacagaacgtagtcaaggacctgtccgtcgagctggatagactgagcgaagaatctgtgaacaacgacatctcctcctggacaaagggcagaagcggagaagctctgagcctcctgaagaaaagattctcccatagacccgtgcaggagaagttcgtgtgcctgaactgcggcttcgagacacacgcagccgagcaagccgccctgaacatcgccagatcctggctgttcctgcggagccaggagtacaagaaataccagacaaacaagacaaccggcaacaccgataagagagccttcgtcgagacctggcagtccttttaccggaagaagcttaaggaggtgtggaaacctgccgtgcggtctggcggatctggcggaggctccaccagccccaagaaaaagagaaaagtctaagctgccttctgcggggcttgccttctggccatgcccttcttctctcccttgcacctgtacctcttggtctttgaataaagcctgagtaggaaggctagcaaaaaaaaaaaaaaaaaaaaaaaaaaaaaaaaaaaaaaaaaaaaaaaaaaaaaaaaaaaaaaaaaaaaaaaaaaaaaaaa

SEQ ID NO: 13260 - RNA, 5818 nt, synthetic construct
  source 1..5818: mol_type = other RNA
aggaaataagagagaaaagaagagtaagaagaaatataagagccaccatggcccctaagaagaagcgtaaagtgagccggatggaacgcctcgtctacgaggtgcggcagaagtgcagaaacatcgaggacatctgcatctcctgcggatctctgaacgtgaccctggagcacccactgttcatcggcggcatgtgccagaactgtaaaaactgttttctggagtgtgcctatcaatacgacgatgacggctaccagagctactgcaccatctgttgcggcggaagagaggtgctgatgtgtggaaataacaactgctgccggtgcttctgcgtggaatgcgtggacctgctggtgggccccggcgccgcccaggccgctattaaggaagatccttggaactgctacatgtgcggccacaagggcacatacggcctgctgagacggagagaggactggcctagcagactgcagatgttcttcgccaataaccacgaccaggagttcgacccccctaaggtgtaccctcccgtccccgccgagaagagaaagcccatccgggtcctgagcctgttcgatggcatcgccaccggtctgctggtgctgaaggacctgggcatccaggtggataggtacattgcctccgaggtgtgcgaggactccatcaccgtgggaatggtgcgtcatcagggcaagatcatgtacgtgggcgacgtgcggagcgtgacacagaagcatatccaggagtggggccctttcgacctggtgatcggcggcagcccttgcaatgacctgagcatcgtgaacccagcccggaagggcctgtacgagggaaccggcagactgttcttcgagttttacagactgctgcacgacgcccggcctaaggaaggcgacgaccggcccttcttttggctgttcgagaatgtggtggccatgggagtcagcgacaagcgggatattagccggttcctggagagcaaccccgtgatgatcgatgccaaggaagtgagcgccgcccaccgggccagatacttctggggcaatctgcctggcatgaacagacccctggccagcaccgtgaacgacaagctggagctgcaggagtgcctggagcacggccggatcgccaagttcagcaaggtgagaaccatcaccacccgaagcaacagcatcaaacaaggcaaggaccagcactttcctgtgttcatgaacgagaaggaggacatcctgtggtgtaccgagatggagagagtgttcgggttcccagtccactacacagatgtcagcaacatgtctagactggccagacagagactgctgggaagaagctggtccgtccctgtgatcagacacctgttcgcccctctgaaggagtacttcgcctgcgtgagcagcggcaacagcaacgccaacagccggggccccagcttctctagcggcctggtgccactgtccctgagagggagccacatgggccccatggagatctacaaaaccgtgagcgcctggaagcggcagcctgtgcgcgtgctgagcctgtttcggaatatcgataaagtcctgaaaagcctgggattcctggagagcggctctggctccggcggtggcaccctgaagtacgtggaggatgtgacaaacgtggtcagacgggatgtggagaagtggggccccttcgatctggtgtacggcagcacccaacccctgggcagctcttgtgaccggtgccctggctggtacatgtttcagttccaccggatcctgcagtacgccctgccgagacaggagtcccagcggccattcttttggattttcatggacaacttgctgctgaccgaggatgaccaggaaactaccactcggttcctgcagaccgaagccgtgaccctgcaggacgtgagaggccgggactaccagaacgccatgcgggtgtggtccaacatccctggactgaaaagcaagcacgcacctctgacccctaaagaagaggagtacctgcaggcccaggtgcggagcagaagcaagctggacgcccctaaggtggatctgctggtgaagaattgcctcctgcccctgagagagtacttcaagtatttcagccagaatagtctgcccctgggaggcagcggcggcggcgtggtgttcgaggacgtggccgtgtacttcagccaggaggagtggggcctgctggacgaggcccagaggcacctgtaccacgccgtgatgaccgagaacttcgccctggtgaccagcctgggctgctggcacggcgcccaggacgaggaggcccccagcgagcagagcatcagcgtgggcatgagcgaggtgggcacccccaagcccgaccccagcaccaagaagggccagccctacgagatgtgcgagcccctgagcaaggacctgctgcacctgggcggcccaagcagcggcgcccctcctcccagcggcggcagcccagccggctccccaacctctaccgaggagggcacctctgagtccgccacccccgagagcggccctggcacctccaccgagcccagcgagggcagcgcacccggcagccctgccggcagccccacctccacagaggagggaaccagcaccgagcccagcgaaggcagcgccccaggcaccagcaccgagcctagtgagcaggagattaaacggatcaacaagatcagaagaagacttgtgaaagacagcaacaccaagaaggccggcaagacaggccccatgaaaaccctgctggttagagtgatgacacccgatctgagagagcggctggaaaacctgagaaagaagcctgaaaatatcccccagcccatcagcaatacatctagagccaacctgaataagctgctgaccgattacaccgaaatgaagaaggcgatcctgcatgtgtactgggaagagttccagaaggaccctgtgggcctgatgagccgggtggcccagcctgccagcaagaagatcgatcagaacaagctgaaacctgagatggacgagaagggcaacctgaccaccgccggctttgcctgctctcagtgtggccagcccctgttcgtgtacaagctggagcaggtgtctgagaagggcaaggcttacaccaactacttcggacggtgcaatgtggccgagcacgaaaagctgatcctgctggcccagctgaagcccgagaaggatagcgacgaagccgtgacatatagcctgggaaagtttgggcagagggccctggatttctacagcattcatgtgaccaaggagtccacccaccccgtgaagcccctggcccagatcgccggaaacagatacgcctccggacctgtgggaaaggccctgagcgacgcatgtatgggcacaatcgcctccttcctgtctaagtaccaggacatcatcatcgaacaccagaaggtggtgaagggcaaccagaagagactggagagcctgcgggagctggccggcaaggaaaacctggaataccctagcgtgaccctgccacctcagcctcacaccaaggagggcgttgatgcctacaacgaagtgatcgcccgggtgcgaatgtgggtgaacctgaacctgtggcagaagctgaagctaagcagagatgatgccaagcctctgctgagactgaagggattcccttcctttcctctggtcgagagacaggccaacgaagtggactggtgggacatggtgtgtaacgtgaagaagctgatcaacgagaaaaaggaggatggcaaggtgttttggcagaatctggctggctacaagagacaggaagccctgagaccatacctgagcagcgaggaagatcggaagaagggaaagaaattcgctcggtaccagctgggcgacctgctgctgcacctggaaaagaagcacggcgaggactggggaaaggtgtacgacgaggcctgggagcggattgacaagaaagtggaaggcctgagcaagcacatcaagctggaagaggaacggagaagcgaggacgcccagagcaaggccgccctgaccgactggctgcgggctaaggccagcttcgtgatcgagggcctgaaggaggccgacaaggacgagttctgcagatgcgagctgaagctgcagaagtggtacggggacctgcggggaaagcccttcgccatcgaagccgagaacagcatcctggacatcagcggcttcagcaagcagtacaactgtgccttcatctggcagaaggacggcgtgaagaagctgaacctgtacctgatcatcaactacttcaagggcggcaagctgcggttcaagaagatcaaacctgaagccttcgaagccaacagattctacaccgtgatcaacaaaaagagcggcgagatcgtgcccatggaggtgaacttcaacttcgacgaccccaacctgatcatcctgcctctggcctttggcaagagacagggcagagaattcatctggaacgacctgctgtccctggaaaccggcagcctgaagctggccaacggaagagtgatcgagaagacactgtacaacagaagaacccggcaggatgagcctgccctgttcgtggccctgaccttcgagcggcgggaggtcctggactcctccaatatcaaaccaatgaacctgatcggcgtggcaagaggcgaaaacatccccgccgtgatcgccctgaccgaccccgagggctgcccactgagccggtttaaggatagcctgggaaacccaacccacatcctgagaatcggcgagagctataaggagaagcagcggaccatccaggccaagaaggaggtggagcagcggagagccggcggctacagccggaagtacgccagcaaagccaagaatctggcagacgatatggtgagaaacaccgctagagatctgctgtactacgccgtgacccaggatgccatgctgatcttcgccaacctgagccggggcttcggccggcagggcaagcggaccttcatggccgagagacagtacacacggatggaggactggctgaccgccaagctggcctacgagggcctgagcaagacctacctgtccaagacactggcccagtacacctccaagacatgcagcaactgtgggtttaccatcaccagcgccgactacgacagggtgctggagaagctgaagaagacagcaacaggctggatgaccacaattaacggcaaggagctgaaggtggagggccagattacctactacaacagatacaagagacagaacgtagtcaaggacctgtccgtcgagctggatagactgagcgaagaatctgtgaacaacgacatctcctcctggacaaagggcagaagcggagaagctctgagcctcctgaagaaaagattctcccatagacccgtgcaggagaagttcgtgtgcctgaactgcggcttcgagacacacgcagccgagcaagccgccctgaacatcgccagatcctggctgttcctgcggagccaggagtacaagaaataccagacaaacaagacaaccggcaacaccgataagagagccttcgtcgagacctggcagtccttttaccggaagaagcttaaggaggtgtggaaacctgccgtgcggtctggcggatctggcggaggctccaccagccccaagaaaaagagaaaagtctaagctgccttctgcggggcttgccttctggccatgcccttcttctctcccttgcacctgtacctcttggtctttgaataaagcctgagtaggaaggctagcaaaaaaaaaaaaaaaaaaaaaaaaaaaaaaaaaaaaaaaaaaaaaaaaaaaaaaaaaaaaaaaaaaaaaaaaaaaaaaaa

SEQ ID NO: 13261 - RNA, 5785 nt, synthetic construct
  source 1..5785: mol_type = other RNA
aggaaataagagagaaaagaagagtaagaagaaatataagagccaccatggcccctaagaagaagcgtaaagtgagccggatggaacgcctcgtctacgaggtgcggcagaagtgcagaaacatcgaggacatctgcatctcctgcggatctctgaacgtgaccctggagcacccactgttcatcggcggcatgtgccagaactgtaaaaactgttttctggagtgtgcctatcaatacgacgatgacggctaccagagctactgcaccatctgttgcggcggaagagaggtgctgatgtgtggaaataacaactgctgccggtgcttctgcgtggaatgcgtggacctgctggtgggccccggcgccgcccaggccgctattaaggaagatccttggaactgctacatgtgcggccacaagggcacatacggcctgctgagacggagagaggactggcctagcagactgcagatgttcttcgccaataaccacgaccaggagttcgacccccctaaggtgtaccctcccgtccccgccgagaagagaaagcccatccgggtcctgagcctgttcgatggcatcgccaccggtctgctggtgctgaaggacctgggcatccaggtggataggtacattgcctccgaggtgtgcgaggactccatcaccgtgggaatggtgcgtcatcagggcaagatcatgtacgtgggcgacgtgcggagcgtgacacagaagcatatccaggagtggggccctttcgacctggtgatcggcggcagcccttgcaatgacctgagcatcgtgaacccagcccggaagggcctgtacgagggaaccggcagactgttcttcgagttttacagactgctgcacgacgcccggcctaaggaaggcgacgaccggcccttcttttggctgttcgagaatgtggtggccatgggagtcagcgacaagcgggatattagccggttcctggagagcaaccccgtgatgatcgatgccaaggaagtgagcgccgcccaccgggccagatacttctggggcaatctgcctggcatgaacagacccctggccagcaccgtgaacgacaagctggagctgcaggagtgcctggagcacggccggatcgccaagttcagcaaggtgagaaccatcaccacccgaagcaacagcatcaaacaaggcaaggaccagcactttcctgtgttcatgaacgagaaggaggacatcctgtggtgtaccgagatggagagagtgttcgggttcccagtccactacacagatgtcagcaacatgtctagactggccagacagagactgctgggaagaagctggtccgtccctgtgatcagacacctgttcgcccctctgaaggagtacttcgcctgcgtgagcagcggcaacagcaacgccaacagccggggccccagcttctctagcggcctggtgccactgtccctgagagggagccacatgggccccatggagatctacaaaaccgtgagcgcctggaagcggcagcctgtgcgcgtgctgagcctgtttcggaatatcgataaagtcctgaaaagcctgggattcctggagagcggctctggctccggcggtggcaccctgaagtacgtggaggatgtgacaaacgtggtcagacgggatgtggagaagtggggccccttcgatctggtgtacggcagcacccaacccctgggcagctcttgtgaccggtgccctggctggtacatgtttcagttccaccggatcctgcagtacgccctgccgagacaggagtcccagcggccattcttttggattttcatggacaacttgctgctgaccgaggatgaccaggaaactaccactcggttcctgcagaccgaagccgtgaccctgcaggacgtgagaggccgggactaccagaacgccatgcgggtgtggtccaacatccctggactgaaaagcaagcacgcacctctgacccctaaagaagaggagtacctgcaggcccaggtgcggagcagaagcaagctggacgcccctaaggtggatctgctggtgaagaattgcctcctgcccctgagagagtacttcaagtatttcagccagaatagtctgcccctgggaggcagcggcggcggcccccaggagcccgtgaccttcgccgacgtggccgtgctgttcacccccgaggagtggctgttcctggacagcgcccagaagagcctgtacagggacgtgatgctggagaactacaggaacctggccagcgtgggcgaccagctgtgcaagaccaggatgagcagccacctggagcagagggaggagctgtgcgtgaccgagaggggcatcttccccggcgcccacctgggcccccacttccagggcggcccaagcagcggcgcccctcctcccagcggcggcagcccagccggctccccaacctctaccgaggagggcacctctgagtccgccacccccgagagcggccctggcacctccaccgagcccagcgagggcagcgcacccggcagccctgccggcagccccacctccacagaggagggaaccagcaccgagcccagcgaaggcagcgccccaggcaccagcaccgagcctagtgagcaggagattaaacggatcaacaagatcagaagaagacttgtgaaagacagcaacaccaagaaggccggcaagacaggccccatgaaaaccctgctggttagagtgatgacacccgatctgagagagcggctggaaaacctgagaaagaagcctgaaaatatcccccagcccatcagcaatacatctagagccaacctgaataagctgctgaccgattacaccgaaatgaagaaggcgatcctgcatgtgtactgggaagagttccagaaggaccctgtgggcctgatgagccgggtggcccagcctgccagcaagaagatcgatcagaacaagctgaaacctgagatggacgagaagggcaacctgaccaccgccggctttgcctgctctcagtgtggccagcccctgttcgtgtacaagctggagcaggtgtctgagaagggcaaggcttacaccaactacttcggacggtgcaatgtggccgagcacgaaaagctgatcctgctggcccagctgaagcccgagaaggatagcgacgaagccgtgacatatagcctgggaaagtttgggcagagggccctggatttctacagcattcatgtgaccaaggagtccacccaccccgtgaagcccctggcccagatcgccggaaacagatacgcctccggacctgtgggaaaggccctgagcgacgcatgtatgggcacaatcgcctccttcctgtctaagtaccaggacatcatcatcgaacaccagaaggtggtgaagggcaaccagaagagactggagagcctgcgggagctggccggcaaggaaaacctggaataccctagcgtgaccctgccacctcagcctcacaccaaggagggcgttgatgcctacaacgaagtgatcgcccgggtgcgaatgtgggtgaacctgaacctgtggcagaagctgaagctaagcagagatgatgccaagcctctgctgagactgaagggattcccttcctttcctctggtcgagagacaggccaacgaagtggactggtgggacatggtgtgtaacgtgaagaagctgatcaacgagaaaaaggaggatggcaaggtgttttggcagaatctggctggctacaagagacaggaagccctgagaccatacctgagcagcgaggaagatcggaagaagggaaagaaattcgctcggtaccagctgggcgacctgctgctgcacctggaaaagaagcacggcgaggactggggaaaggtgtacgacgaggcctgggagcggattgacaagaaagtggaaggcctgagcaagcacatcaagctggaagaggaacggagaagcgaggacgcccagagcaaggccgccctgaccgactggctgcgggctaaggccagcttcgtgatcgagggcctgaaggaggccgacaaggacgagttctgcagatgcgagctgaagctgcagaagtggtacggggacctgcggggaaagcccttcgccatcgaagccgagaacagcatcctggacatcagcggcttcagcaagcagtacaactgtgccttcatctggcagaaggacggcgtgaagaagctgaacctgtacctgatcatcaactacttcaagggcggcaagctgcggttcaagaagatcaaacctgaagccttcgaagccaacagattctacaccgtgatcaacaaaaagagcggcgagatcgtgcccatggaggtgaacttcaacttcgacgaccccaacctgatcatcctgcctctggcctttggcaagagacagggcagagaattcatctggaacgacctgctgtccctggaaaccggcagcctgaagctggccaacggaagagtgatcgagaagacactgtacaacagaagaacccggcaggatgagcctgccctgttcgtggccctgaccttcgagcggcgggaggtcctggactcctccaatatcaaaccaatgaacctgatcggcgtggcaagaggcgaaaacatccccgccgtgatcgccctgaccgaccccgagggctgcccactgagccggtttaaggatagcctgggaaacccaacccacatcctgagaatcggcgagagctataaggagaagcagcggaccatccaggccaagaaggaggtggagcagcggagagccggcggctacagccggaagtacgccagcaaagccaagaatctggcagacgatatggtgagaaacaccgctagagatctgctgtactacgccgtgacccaggatgccatgctgatcttcgccaacctgagccggggcttcggccggcagggcaagcggaccttcatggccgagagacagtacacacggatggaggactggctgaccgccaagctggcctacgagggcctgagcaagacctacctgtccaagacactggcccagtacacctccaagacatgcagcaactgtgggtttaccatcaccagcgccgactacgacagggtgctggagaagctgaagaagacagcaacaggctggatgaccacaattaacggcaaggagctgaaggtggagggccagattacctactacaacagatacaagagacagaacgtagtcaaggacctgtccgtcgagctggatagactgagcgaagaatctgtgaacaacgacatctcctcctggacaaagggcagaagcggagaagctctgagcctcctgaagaaaagattctcccatagacccgtgcaggagaagttcgtgtgcctgaactgcggcttcgagacacacgcagccgagcaagccgccctgaacatcgccagatcctggctgttcctgcggagccaggagtacaagaaataccagacaaacaagacaaccggcaacaccgataagagagccttcgtcgagacctggcagtccttttaccggaagaagcttaaggaggtgtggaaacctgccgtgcggtctggcggatctggcggaggctccaccagccccaagaaaaagagaaaagtctaagctgccttctgcggggcttgccttctggccatgcccttcttctctcccttgcacctgtacctcttggtctttgaataaagcctgagtaggaaggctagcaaaaaaaaaaaaaaaaaaaaaaaaaaaaaaaaaaaaaaaaaaaaaaaaaaaaaaaaaaaaaaaaaaaaaaaaaaaaaaaa

SEQ ID NO: 13262 - RNA, 5782 nt, synthetic construct
  source 1..5782: mol_type = other RNA
aggaaataagagagaaaagaagagtaagaagaaatataagagccaccatggcccctaagaagaagcgtaaagtgagccggatggaacgcctcgtctacgaggtgcggcagaagtgcagaaacatcgaggacatctgcatctcctgcggatctctgaacgtgaccctggagcacccactgttcatcggcggcatgtgccagaactgtaaaaactgttttctggagtgtgcctatcaatacgacgatgacggctaccagagctactgcaccatctgttgcggcggaagagaggtgctgatgtgtggaaataacaactgctgccggtgcttctgcgtggaatgcgtggacctgctggtgggccccggcgccgcccaggccgctattaaggaagatccttggaactgctacatgtgcggccacaagggcacatacggcctgctgagacggagagaggactggcctagcagactgcagatgttcttcgccaataaccacgaccaggagttcgacccccctaaggtgtaccctcccgtccccgccgagaagagaaagcccatccgggtcctgagcctgttcgatggcatcgccaccggtctgctggtgctgaaggacctgggcatccaggtggataggtacattgcctccgaggtgtgcgaggactccatcaccgtgggaatggtgcgtcatcagggcaagatcatgtacgtgggcgacgtgcggagcgtgacacagaagcatatccaggagtggggccctttcgacctggtgatcggcggcagcccttgcaatgacctgagcatcgtgaacccagcccggaagggcctgtacgagggaaccggcagactgttcttcgagttttacagactgctgcacgacgcccggcctaaggaaggcgacgaccggcccttcttttggctgttcgagaatgtggtggccatgggagtcagcgacaagcgggatattagccggttcctggagagcaaccccgtgatgatcgatgccaaggaagtgagcgccgcccaccgggccagatacttctggggcaatctgcctggcatgaacagacccctggccagcaccgtgaacgacaagctggagctgcaggagtgcctggagcacggccggatcgccaagttcagcaaggtgagaaccatcaccacccgaagcaacagcatcaaacaaggcaaggaccagcactttcctgtgttcatgaacgagaaggaggacatcctgtggtgtaccgagatggagagagtgttcgggttcccagtccactacacagatgtcagcaacatgtctagactggccagacagagactgctgggaagaagctggtccgtccctgtgatcagacacctgttcgcccctctgaaggagtacttcgcctgcgtgagcagcggcaacagcaacgccaacagccggggccccagcttctctagcggcctggtgccactgtccctgagagggagccacatgggccccatggagatctacaaaaccgtgagcgcctggaagcggcagcctgtgcgcgtgctgagcctgtttcggaatatcgataaagtcctgaaaagcctgggattcctggagagcggctctggctccggcggtggcaccctgaagtacgtggaggatgtgacaaacgtggtcagacgggatgtggagaagtggggccccttcgatctggtgtacggcagcacccaacccctgggcagctcttgtgaccggtgccctggctggtacatgtttcagttccaccggatcctgcagtacgccctgccgagacaggagtcccagcggccattcttttggattttcatggacaacttgctgctgaccgaggatgaccaggaaactaccactcggttcctgcagaccgaagccgtgaccctgcaggacgtgagaggccgggactaccagaacgccatgcgggtgtggtccaacatccctggactgaaaagcaagcacgcacctctgacccctaaagaagaggagtacctgcaggcccaggtgcggagcagaagcaagctggacgcccctaaggtggatctgctggtgaagaattgcctcctgcccctgagagagtacttcaagtatttcagccagaatagtctgcccctgggaggcagcggcggcggcagagtgctgaccttcagagacgtggccgtggagttcagccccgaggagtgggagtgcctggacagcgcccagcagagactgtacagagacgtgatgctggagaactacggcaacctgttcagcctgggcctggccatcttcaagcccgacctgatcacctacctggagcagagaaaggagccctggaacgccagaagacagaagaccgtggccaagcaccccgccggcagcctgcacttcggcggcccaagcagcggcgcccctcctcccagcggcggcagcccagccggctccccaacctctaccgaggagggcacctctgagtccgccacccccgagagcggccctggcacctccaccgagcccagcgagggcagcgcacccggcagccctgccggcagccccacctccacagaggagggaaccagcaccgagcccagcgaaggcagcgccccaggcaccagcaccgagcctagtgagcaggagattaaacggatcaacaagatcagaagaagacttgtgaaagacagcaacaccaagaaggccggcaagacaggccccatgaaaaccctgctggttagagtgatgacacccgatctgagagagcggctggaaaacctgagaaagaagcctgaaaatatcccccagcccatcagcaatacatctagagccaacctgaataagctgctgaccgattacaccgaaatgaagaaggcgatcctgcatgtgtactgggaagagttccagaaggaccctgtgggcctgatgagccgggtggcccagcctgccagcaagaagatcgatcagaacaagctgaaacctgagatggacgagaagggcaacctgaccaccgccggctttgcctgctctcagtgtggccagcccctgttcgtgtacaagctggagcaggtgtctgagaagggcaaggcttacaccaactacttcggacggtgcaatgtggccgagcacgaaaagctgatcctgctggcccagctgaagcccgagaaggatagcgacgaagccgtgacatatagcctgggaaagtttgggcagagggccctggatttctacagcattcatgtgaccaaggagtccacccaccccgtgaagcccctggcccagatcgccggaaacagatacgcctccggacctgtgggaaaggccctgagcgacgcatgtatgggcacaatcgcctccttcctgtctaagtaccaggacatcatcatcgaacaccagaaggtggtgaagggcaaccagaagagactggagagcctgcgggagctggccggcaaggaaaacctggaataccctagcgtgaccctgccacctcagcctcacaccaaggagggcgttgatgcctacaacgaagtgatcgcccgggtgcgaatgtgggtgaacctgaacctgtggcagaagctgaagctaagcagagatgatgccaagcctctgctgagactgaagggattcccttcctttcctctggtcgagagacaggccaacgaagtggactggtgggacatggtgtgtaacgtgaagaagctgatcaacgagaaaaaggaggatggcaaggtgttttggcagaatctggctggctacaagagacaggaagccctgagaccatacctgagcagcgaggaagatcggaagaagggaaagaaattcgctcggtaccagctgggcgacctgctgctgcacctggaaaagaagcacggcgaggactggggaaaggtgtacgacgaggcctgggagcggattgacaagaaagtggaaggcctgagcaagcacatcaagctggaagaggaacggagaagcgaggacgcccagagcaaggccgccctgaccgactggctgcgggctaaggccagcttcgtgatcgagggcctgaaggaggccgacaaggacgagttctgcagatgcgagctgaagctgcagaagtggtacggggacctgcggggaaagcccttcgccatcgaagccgagaacagcatcctggacatcagcggcttcagcaagcagtacaactgtgccttcatctggcagaaggacggcgtgaagaagctgaacctgtacctgatcatcaactacttcaagggcggcaagctgcggttcaagaagatcaaacctgaagccttcgaagccaacagattctacaccgtgatcaacaaaaagagcggcgagatcgtgcccatggaggtgaacttcaacttcgacgaccccaacctgatcatcctgcctctggcctttggcaagagacagggcagagaattcatctggaacgacctgctgtccctggaaaccggcagcctgaagctggccaacggaagagtgatcgagaagacactgtacaacagaagaacccggcaggatgagcctgccctgttcgtggccctgaccttcgagcggcgggaggtcctggactcctccaatatcaaaccaatgaacctgatcggcgtggcaagaggcgaaaacatccccgccgtgatcgccctgaccgaccccgagggctgcccactgagccggtttaaggatagcctgggaaacccaacccacatcctgagaatcggcgagagctataaggagaagcagcggaccatccaggccaagaaggaggtggagcagcggagagccggcggctacagccggaagtacgccagcaaagccaagaatctggcagacgatatggtgagaaacaccgctagagatctgctgtactacgccgtgacccaggatgccatgctgatcttcgccaacctgagccggggcttcggccggcagggcaagcggaccttcatggccgagagacagtacacacggatggaggactggctgaccgccaagctggcctacgagggcctgagcaagacctacctgtccaagacactggcccagtacacctccaagacatgcagcaactgtgggtttaccatcaccagcgccgactacgacagggtgctggagaagctgaagaagacagcaacaggctggatgaccacaattaacggcaaggagctgaaggtggagggccagattacctactacaacagatacaagagacagaacgtagtcaaggacctgtccgtcgagctggatagactgagcgaagaatctgtgaacaacgacatctcctcctggacaaagggcagaagcggagaagctctgagcctcctgaagaaaagattctcccatagacccgtgcaggagaagttcgtgtgcctgaactgcggcttcgagacacacgcagccgagcaagccgccctgaacatcgccagatcctggctgttcctgcggagccaggagtacaagaaataccagacaaacaagacaaccggcaacaccgataagagagccttcgtcgagacctggcagtccttttaccggaagaagcttaaggaggtgtggaaacctgccgtgcggtctggcggatctggcggaggctccaccagccccaagaaaaagagaaaagtctaagctgccttctgcggggcttgccttctggccatgcccttcttctctcccttgcacctgtacctcttggtctttgaataaagcctgagtaggaaggctagcaaaaaaaaaaaaaaaaaaaaaaaaaaaaaaaaaaaaaaaaaaaaaaaaaaaaaaaaaaaaaaaaaaaaaaaaaaaaaaaa

SEQ ID NO: 13263 - RNA, 5785 nt, synthetic construct
  source 1..5785: mol_type = other RNA
aggaaataagagagaaaagaagagtaagaagaaatataagagccaccatggcccctaagaagaagcgtaaagtgagccggatggaacgcctcgtctacgaggtgcggcagaagtgcagaaacatcgaggacatctgcatctcctgcggatctctgaacgtgaccctggagcacccactgttcatcggcggcatgtgccagaactgtaaaaactgttttctggagtgtgcctatcaatacgacgatgacggctaccagagctactgcaccatctgttgcggcggaagagaggtgctgatgtgtggaaataacaactgctgccggtgcttctgcgtggaatgcgtggacctgctggtgggccccggcgccgcccaggccgctattaaggaagatccttggaactgctacatgtgcggccacaagggcacatacggcctgctgagacggagagaggactggcctagcagactgcagatgttcttcgccaataaccacgaccaggagttcgacccccctaaggtgtaccctcccgtccccgccgagaagagaaagcccatccgggtcctgagcctgttcgatggcatcgccaccggtctgctggtgctgaaggacctgggcatccaggtggataggtacattgcctccgaggtgtgcgaggactccatcaccgtgggaatggtgcgtcatcagggcaagatcatgtacgtgggcgacgtgcggagcgtgacacagaagcatatccaggagtggggccctttcgacctggtgatcggcggcagcccttgcaatgacctgagcatcgtgaacccagcccggaagggcctgtacgagggaaccggcagactgttcttcgagttttacagactgctgcacgacgcccggcctaaggaaggcgacgaccggcccttcttttggctgttcgagaatgtggtggccatgggagtcagcgacaagcgggatattagccggttcctggagagcaaccccgtgatgatcgatgccaaggaagtgagcgccgcccaccgggccagatacttctggggcaatctgcctggcatgaacagacccctggccagcaccgtgaacgacaagctggagctgcaggagtgcctggagcacggccggatcgccaagttcagcaaggtgagaaccatcaccacccgaagcaacagcatcaaacaaggcaaggaccagcactttcctgtgttcatgaacgagaaggaggacatcctgtggtgtaccgagatggagagagtgttcgggttcccagtccactacacagatgtcagcaacatgtctagactggccagacagagactgctgggaagaagctggtccgtccctgtgatcagacacctgttcgcccctctgaaggagtacttcgcctgcgtgagcagcggcaacagcaacgccaacagccggggccccagcttctctagcggcctggtgccactgtccctgagagggagccacatgggccccatggagatctacaaaaccgtgagcgcctggaagcggcagcctgtgcgcgtgctgagcctgtttcggaatatcgataaagtcctgaaaagcctgggattcctggagagcggctctggctccggcggtggcaccctgaagtacgtggaggatgtgacaaacgtggtcagacgggatgtggagaagtggggccccttcgatctggtgtacggcagcacccaacccctgggcagctcttgtgaccggtgccctggctggtacatgtttcagttccaccggatcctgcagtacgccctgccgagacaggagtcccagcggccattcttttggattttcatggacaacttgctgctgaccgaggatgaccaggaaactaccactcggttcctgcagaccgaagccgtgaccctgcaggacgtgagaggccgggactaccagaacgccatgcgggtgtggtccaacatccctggactgaaaagcaagcacgcacctctgacccctaaagaagaggagtacctgcaggcccaggtgcggagcagaagcaagctggacgcccctaaggtggatctgctggtgaagaattgcctcctgcccctgagagagtacttcaagtatttcagccagaatagtctgcccctgggaggcagcggcggcggcgcccaggagaccgtgaccttcaaggacgtggccgtggacttcacccaggaggagtggggccagctggaccccgtgcagaggaccctgtacagggacgtgatgctggagacctacggccacctgctgagcgtgggcaaccagatcgccaagcccgaggtgatcagcctgctggagcagggcgaggagccctggagcatggacagggtgtaccccccccagaggacctgccccgagtggatgaggggcggcccaagcagcggcgcccctcctcccagcggcggcagcccagccggctccccaacctctaccgaggagggcacctctgagtccgccacccccgagagcggccctggcacctccaccgagcccagcgagggcagcgcacccggcagccctgccggcagccccacctccacagaggagggaaccagcaccgagcccagcgaaggcagcgccccaggcaccagcaccgagcctagtgagcaggagattaaacggatcaacaagatcagaagaagacttgtgaaagacagcaacaccaagaaggccggcaagacaggccccatgaaaaccctgctggttagagtgatgacacccgatctgagagagcggctggaaaacctgagaaagaagcctgaaaatatcccccagcccatcagcaatacatctagagccaacctgaataagctgctgaccgattacaccgaaatgaagaaggcgatcctgcatgtgtactgggaagagttccagaaggaccctgtgggcctgatgagccgggtggcccagcctgccagcaagaagatcgatcagaacaagctgaaacctgagatggacgagaagggcaacctgaccaccgccggctttgcctgctctcagtgtggccagcccctgttcgtgtacaagctggagcaggtgtctgagaagggcaaggcttacaccaactacttcggacggtgcaatgtggccgagcacgaaaagctgatcctgctggcccagctgaagcccgagaaggatagcgacgaagccgtgacatatagcctgggaaagtttgggcagagggccctggatttctacagcattcatgtgaccaaggagtccacccaccccgtgaagcccctggcccagatcgccggaaacagatacgcctccggacctgtgggaaaggccctgagcgacgcatgtatgggcacaatcgcctccttcctgtctaagtaccaggacatcatcatcgaacaccagaaggtggtgaagggcaaccagaagagactggagagcctgcgggagctggccggcaaggaaaacctggaataccctagcgtgaccctgccacctcagcctcacaccaaggagggcgttgatgcctacaacgaagtgatcgcccgggtgcgaatgtgggtgaacctgaacctgtggcagaagctgaagctaagcagagatgatgccaagcctctgctgagactgaagggattcccttcctttcctctggtcgagagacaggccaacgaagtggactggtgggacatggtgtgtaacgtgaagaagctgatcaacgagaaaaaggaggatggcaaggtgttttggcagaatctggctggctacaagagacaggaagccctgagaccatacctgagcagcgaggaagatcggaagaagggaaagaaattcgctcggtaccagctgggcgacctgctgctgcacctggaaaagaagcacggcgaggactggggaaaggtgtacgacgaggcctgggagcggattgacaagaaagtggaaggcctgagcaagcacatcaagctggaagaggaacggagaagcgaggacgcccagagcaaggccgccctgaccgactggctgcgggctaaggccagcttcgtgatcgagggcctgaaggaggccgacaaggacgagttctgcagatgcgagctgaagctgcagaagtggtacggggacctgcggggaaagcccttcgccatcgaagccgagaacagcatcctggacatcagcggcttcagcaagcagtacaactgtgccttcatctggcagaaggacggcgtgaagaagctgaacctgtacctgatcatcaactacttcaagggcggcaagctgcggttcaagaagatcaaacctgaagccttcgaagccaacagattctacaccgtgatcaacaaaaagagcggcgagatcgtgcccatggaggtgaacttcaacttcgacgaccccaacctgatcatcctgcctctggcctttggcaagagacagggcagagaattcatctggaacgacctgctgtccctggaaaccggcagcctgaagctggccaacggaagagtgatcgagaagacactgtacaacagaagaacccggcaggatgagcctgccctgttcgtggccctgaccttcgagcggcgggaggtcctggactcctccaatatcaaaccaatgaacctgatcggcgtggcaagaggcgaaaacatccccgccgtgatcgccctgaccgaccccgagggctgcccactgagccggtttaaggatagcctgggaaacccaacccacatcctgagaatcggcgagagctataaggagaagcagcggaccatccaggccaagaaggaggtggagcagcggagagccggcggctacagccggaagtacgccagcaaagccaagaatctggcagacgatatggtgagaaacaccgctagagatctgctgtactacgccgtgacccaggatgccatgctgatcttcgccaacctgagccggggcttcggccggcagggcaagcggaccttcatggccgagagacagtacacacggatggaggactggctgaccgccaagctggcctacgagggcctgagcaagacctacctgtccaagacactggcccagtacacctccaagacatgcagcaactgtgggtttaccatcaccagcgccgactacgacagggtgctggagaagctgaagaagacagcaacaggctggatgaccacaattaacggcaaggagctgaaggtggagggccagattacctactacaacagatacaagagacagaacgtagtcaaggacctgtccgtcgagctggatagactgagcgaagaatctgtgaacaacgacatctcctcctggacaaagggcagaagcggagaagctctgagcctcctgaagaaaagattctcccatagacccgtgcaggagaagttcgtgtgcctgaactgcggcttcgagacacacgcagccgagcaagccgccctgaacatcgccagatcctggctgttcctgcggagccaggagtacaagaaataccagacaaacaagacaaccggcaacaccgataagagagccttcgtcgagacctggcagtccttttaccggaagaagcttaaggaggtgtggaaacctgccgtgcggtctggcggatctggcggaggctccaccagccccaagaaaaagagaaaagtctaagctgccttctgcggggcttgccttctggccatgcccttcttctctcccttgcacctgtacctcttggtctttgaataaagcctgagtaggaaggctagcaaaaaaaaaaaaaaaaaaaaaaaaaaaaaaaaaaaaaaaaaaaaaaaaaaaaaaaaaaaaaaaaaaaaaaaaaaaaaaaa

SEQ ID NO: 13264 - RNA, 5785 nt, synthetic construct
  source 1..5785: mol_type = other RNA
aggaaataagagagaaaagaagagtaagaagaaatataagagccaccatggcccctaagaagaagcgtaaagtgagccggatggaacgcctcgtctacgaggtgcggcagaagtgcagaaacatcgaggacatctgcatctcctgcggatctctgaacgtgaccctggagcacccactgttcatcggcggcatgtgccagaactgtaaaaactgttttctggagtgtgcctatcaatacgacgatgacggctaccagagctactgcaccatctgttgcggcggaagagaggtgctgatgtgtggaaataacaactgctgccggtgcttctgcgtggaatgcgtggacctgctggtgggccccggcgccgcccaggccgctattaaggaagatccttggaactgctacatgtgcggccacaagggcacatacggcctgctgagacggagagaggactggcctagcagactgcagatgttcttcgccaataaccacgaccaggagttcgacccccctaaggtgtaccctcccgtccccgccgagaagagaaagcccatccgggtcctgagcctgttcgatggcatcgccaccggtctgctggtgctgaaggacctgggcatccaggtggataggtacattgcctccgaggtgtgcgaggactccatcaccgtgggaatggtgcgtcatcagggcaagatcatgtacgtgggcgacgtgcggagcgtgacacagaagcatatccaggagtggggccctttcgacctggtgatcggcggcagcccttgcaatgacctgagcatcgtgaacccagcccggaagggcctgtacgagggaaccggcagactgttcttcgagttttacagactgctgcacgacgcccggcctaaggaaggcgacgaccggcccttcttttggctgttcgagaatgtggtggccatgggagtcagcgacaagcgggatattagccggttcctggagagcaaccccgtgatgatcgatgccaaggaagtgagcgccgcccaccgggccagatacttctggggcaatctgcctggcatgaacagacccctggccagcaccgtgaacgacaagctggagctgcaggagtgcctggagcacggccggatcgccaagttcagcaaggtgagaaccatcaccacccgaagcaacagcatcaaacaaggcaaggaccagcactttcctgtgttcatgaacgagaaggaggacatcctgtggtgtaccgagatggagagagtgttcgggttcccagtccactacacagatgtcagcaacatgtctagactggccagacagagactgctgggaagaagctggtccgtccctgtgatcagacacctgttcgcccctctgaaggagtacttcgcctgcgtgagcagcggcaacagcaacgccaacagccggggccccagcttctctagcggcctggtgccactgtccctgagagggagccacatgggccccatggagatctacaaaaccgtgagcgcctggaagcggcagcctgtgcgcgtgctgagcctgtttcggaatatcgataaagtcctgaaaagcctgggattcctggagagcggctctggctccggcggtggcaccctgaagtacgtggaggatgtgacaaacgtggtcagacgggatgtggagaagtggggccccttcgatctggtgtacggcagcacccaacccctgggcagctcttgtgaccggtgccctggctggtacatgtttcagttccaccggatcctgcagtacgccctgccgagacaggagtcccagcggccattcttttggattttcatggacaacttgctgctgaccgaggatgaccaggaaactaccactcggttcctgcagaccgaagccgtgaccctgcaggacgtgagaggccgggactaccagaacgccatgcgggtgtggtccaacatccctggactgaaaagcaagcacgcacctctgacccctaaagaagaggagtacctgcaggcccaggtgcggagcagaagcaagctggacgcccctaaggtggatctgctggtgaagaattgcctcctgcccctgagagagtacttcaagtatttcagccagaatagtctgcccctgggaggcagcggcggcggcatggccgccgtgagccccaccaccaggtgccaggagagcgtgaccttcgaggacgtggccgtggtgttcaccgacgaggagtggagccacctggtgcccatccagagggacctgtacaaggaggtgatgctggagaactacaacagcatcgtgagcctgggcctgcccgtgccccagcccgacgtgatcttccagctgaagaggggcgacaagccctgggtggtggacctgcacggcagcgagggcggcccaagcagcggcgcccctcctcccagcggcggcagcccagccggctccccaacctctaccgaggagggcacctctgagtccgccacccccgagagcggccctggcacctccaccgagcccagcgagggcagcgcacccggcagccctgccggcagccccacctccacagaggagggaaccagcaccgagcccagcgaaggcagcgccccaggcaccagcaccgagcctagtgagcaggagattaaacggatcaacaagatcagaagaagacttgtgaaagacagcaacaccaagaaggccggcaagacaggccccatgaaaaccctgctggttagagtgatgacacccgatctgagagagcggctggaaaacctgagaaagaagcctgaaaatatcccccagcccatcagcaatacatctagagccaacctgaataagctgctgaccgattacaccgaaatgaagaaggcgatcctgcatgtgtactgggaagagttccagaaggaccctgtgggcctgatgagccgggtggcccagcctgccagcaagaagatcgatcagaacaagctgaaacctgagatggacgagaagggcaacctgaccaccgccggctttgcctgctctcagtgtggccagcccctgttcgtgtacaagctggagcaggtgtctgagaagggcaaggcttacaccaactacttcggacggtgcaatgtggccgagcacgaaaagctgatcctgctggcccagctgaagcccgagaaggatagcgacgaagccgtgacatatagcctgggaaagtttgggcagagggccctggatttctacagcattcatgtgaccaaggagtccacccaccccgtgaagcccctggcccagatcgccggaaacagatacgcctccggacctgtgggaaaggccctgagcgacgcatgtatgggcacaatcgcctccttcctgtctaagtaccaggacatcatcatcgaacaccagaaggtggtgaagggcaaccagaagagactggagagcctgcgggagctggccggcaaggaaaacctggaataccctagcgtgaccctgccacctcagcctcacaccaaggagggcgttgatgcctacaacgaagtgatcgcccgggtgcgaatgtgggtgaacctgaacctgtggcagaagctgaagctaagcagagatgatgccaagcctctgctgagactgaagggattcccttcctttcctctggtcgagagacaggccaacgaagtggactggtgggacatggtgtgtaacgtgaagaagctgatcaacgagaaaaaggaggatggcaaggtgttttggcagaatctggctggctacaagagacaggaagccctgagaccatacctgagcagcgaggaagatcggaagaagggaaagaaattcgctcggtaccagctgggcgacctgctgctgcacctggaaaagaagcacggcgaggactggggaaaggtgtacgacgaggcctgggagcggattgacaagaaagtggaaggcctgagcaagcacatcaagctggaagaggaacggagaagcgaggacgcccagagcaaggccgccctgaccgactggctgcgggctaaggccagcttcgtgatcgagggcctgaaggaggccgacaaggacgagttctgcagatgcgagctgaagctgcagaagtggtacggggacctgcggggaaagcccttcgccatcgaagccgagaacagcatcctggacatcagcggcttcagcaagcagtacaactgtgccttcatctggcagaaggacggcgtgaagaagctgaacctgtacctgatcatcaactacttcaagggcggcaagctgcggttcaagaagatcaaacctgaagccttcgaagccaacagattctacaccgtgatcaacaaaaagagcggcgagatcgtgcccatggaggtgaacttcaacttcgacgaccccaacctgatcatcctgcctctggcctttggcaagagacagggcagagaattcatctggaacgacctgctgtccctggaaaccggcagcctgaagctggccaacggaagagtgatcgagaagacactgtacaacagaagaacccggcaggatgagcctgccctgttcgtggccctgaccttcgagcggcgggaggtcctggactcctccaatatcaaaccaatgaacctgatcggcgtggcaagaggcgaaaacatccccgccgtgatcgccctgaccgaccccgagggctgcccactgagccggtttaaggatagcctgggaaacccaacccacatcctgagaatcggcgagagctataaggagaagcagcggaccatccaggccaagaaggaggtggagcagcggagagccggcggctacagccggaagtacgccagcaaagccaagaatctggcagacgatatggtgagaaacaccgctagagatctgctgtactacgccgtgacccaggatgccatgctgatcttcgccaacctgagccggggcttcggccggcagggcaagcggaccttcatggccgagagacagtacacacggatggaggactggctgaccgccaagctggcctacgagggcctgagcaagacctacctgtccaagacactggcccagtacacctccaagacatgcagcaactgtgggtttaccatcaccagcgccgactacgacagggtgctggagaagctgaagaagacagcaacaggctggatgaccacaattaacggcaaggagctgaaggtggagggccagattacctactacaacagatacaagagacagaacgtagtcaaggacctgtccgtcgagctggatagactgagcgaagaatctgtgaacaacgacatctcctcctggacaaagggcagaagcggagaagctctgagcctcctgaagaaaagattctcccatagacccgtgcaggagaagttcgtgtgcctgaactgcggcttcgagacacacgcagccgagcaagccgccctgaacatcgccagatcctggctgttcctgcggagccaggagtacaagaaataccagacaaacaagacaaccggcaacaccgataagagagccttcgtcgagacctggcagtccttttaccggaagaagcttaaggaggtgtggaaacctgccgtgcggtctggcggatctggcggaggctccaccagccccaagaaaaagagaaaagtctaagctgccttctgcggggcttgccttctggccatgcccttcttctctcccttgcacctgtacctcttggtctttgaataaagcctgagtaggaaggctagcaaaaaaaaaaaaaaaaaaaaaaaaaaaaaaaaaaaaaaaaaaaaaaaaaaaaaaaaaaaaaaaaaaaaaaaaaaaaaaaa

SEQ ID NO: 13265 - RNA, 5785 nt, synthetic construct
  source 1..5785: mol_type = other RNA
aggaaataagagagaaaagaagagtaagaagaaatataagagccaccatggcccctaagaagaagcgtaaagtgagccggatggaacgcctcgtctacgaggtgcggcagaagtgcagaaacatcgaggacatctgcatctcctgcggatctctgaacgtgaccctggagcacccactgttcatcggcggcatgtgccagaactgtaaaaactgttttctggagtgtgcctatcaatacgacgatgacggctaccagagctactgcaccatctgttgcggcggaagagaggtgctgatgtgtggaaataacaactgctgccggtgcttctgcgtggaatgcgtggacctgctggtgggccccggcgccgcccaggccgctattaaggaagatccttggaactgctacatgtgcggccacaagggcacatacggcctgctgagacggagagaggactggcctagcagactgcagatgttcttcgccaataaccacgaccaggagttcgacccccctaaggtgtaccctcccgtccccgccgagaagagaaagcccatccgggtcctgagcctgttcgatggcatcgccaccggtctgctggtgctgaaggacctgggcatccaggtggataggtacattgcctccgaggtgtgcgaggactccatcaccgtgggaatggtgcgtcatcagggcaagatcatgtacgtgggcgacgtgcggagcgtgacacagaagcatatccaggagtggggccctttcgacctggtgatcggcggcagcccttgcaatgacctgagcatcgtgaacccagcccggaagggcctgtacgagggaaccggcagactgttcttcgagttttacagactgctgcacgacgcccggcctaaggaaggcgacgaccggcccttcttttggctgttcgagaatgtggtggccatgggagtcagcgacaagcgggatattagccggttcctggagagcaaccccgtgatgatcgatgccaaggaagtgagcgccgcccaccgggccagatacttctggggcaatctgcctggcatgaacagacccctggccagcaccgtgaacgacaagctggagctgcaggagtgcctggagcacggccggatcgccaagttcagcaaggtgagaaccatcaccacccgaagcaacagcatcaaacaaggcaaggaccagcactttcctgtgttcatgaacgagaaggaggacatcctgtggtgtaccgagatggagagagtgttcgggttcccagtccactacacagatgtcagcaacatgtctagactggccagacagagactgctgggaagaagctggtccgtccctgtgatcagacacctgttcgcccctctgaaggagtacttcgcctgcgtgagcagcggcaacagcaacgccaacagccggggccccagcttctctagcggcctggtgccactgtccctgagagggagccacatgggccccatggagatctacaaaaccgtgagcgcctggaagcggcagcctgtgcgcgtgctgagcctgtttcggaatatcgataaagtcctgaaaagcctgggattcctggagagcggctctggctccggcggtggcaccctgaagtacgtggaggatgtgacaaacgtggtcagacgggatgtggagaagtggggccccttcgatctggtgtacggcagcacccaacccctgggcagctcttgtgaccggtgccctggctggtacatgtttcagttccaccggatcctgcagtacgccctgccgagacaggagtcccagcggccattcttttggattttcatggacaacttgctgctgaccgaggatgaccaggaaactaccactcggttcctgcagaccgaagccgtgaccctgcaggacgtgagaggccgggactaccagaacgccatgcgggtgtggtccaacatccctggactgaaaagcaagcacgcacctctgacccctaaagaagaggagtacctgcaggcccaggtgcggagcagaagcaagctggacgcccctaaggtggatctgctggtgaagaattgcctcctgcccctgagagagtacttcaagtatttcagccagaatagtctgcccctgggaggcagcggcggcggcttcgagagcgtggtgttcgaggacgtggccgtggacttcacccccgaggagtgggccctgctggaccccgcccagaggaacctgtacagggacgtgatgctggagaccttcaggaacctggccagcgtgggcgagaactggaagtgccacagcatcgaggaccagcacaagaaccagggcacccacctgaggtggagggtggtggagatccccagcgagaacaacgagagcaaccagtgcggcggcggcccaagcagcggcgcccctcctcccagcggcggcagcccagccggctccccaacctctaccgaggagggcacctctgagtccgccacccccgagagcggccctggcacctccaccgagcccagcgagggcagcgcacccggcagccctgccggcagccccacctccacagaggagggaaccagcaccgagcccagcgaaggcagcgccccaggcaccagcaccgagcctagtgagcaggagattaaacggatcaacaagatcagaagaagacttgtgaaagacagcaacaccaagaaggccggcaagacaggccccatgaaaaccctgctggttagagtgatgacacccgatctgagagagcggctggaaaacctgagaaagaagcctgaaaatatcccccagcccatcagcaatacatctagagccaacctgaataagctgctgaccgattacaccgaaatgaagaaggcgatcctgcatgtgtactgggaagagttccagaaggaccctgtgggcctgatgagccgggtggcccagcctgccagcaagaagatcgatcagaacaagctgaaacctgagatggacgagaagggcaacctgaccaccgccggctttgcctgctctcagtgtggccagcccctgttcgtgtacaagctggagcaggtgtctgagaagggcaaggcttacaccaactacttcggacggtgcaatgtggccgagcacgaaaagctgatcctgctggcccagctgaagcccgagaaggatagcgacgaagccgtgacatatagcctgggaaagtttgggcagagggccctggatttctacagcattcatgtgaccaaggagtccacccaccccgtgaagcccctggcccagatcgccggaaacagatacgcctccggacctgtgggaaaggccctgagcgacgcatgtatgggcacaatcgcctccttcctgtctaagtaccaggacatcatcatcgaacaccagaaggtggtgaagggcaaccagaagagactggagagcctgcgggagctggccggcaaggaaaacctggaataccctagcgtgaccctgccacctcagcctcacaccaaggagggcgttgatgcctacaacgaagtgatcgcccgggtgcgaatgtgggtgaacctgaacctgtggcagaagctgaagctaagcagagatgatgccaagcctctgctgagactgaagggattcccttcctttcctctggtcgagagacaggccaacgaagtggactggtgggacatggtgtgtaacgtgaagaagctgatcaacgagaaaaaggaggatggcaaggtgttttggcagaatctggctggctacaagagacaggaagccctgagaccatacctgagcagcgaggaagatcggaagaagggaaagaaattcgctcggtaccagctgggcgacctgctgctgcacctggaaaagaagcacggcgaggactggggaaaggtgtacgacgaggcctgggagcggattgacaagaaagtggaaggcctgagcaagcacatcaagctggaagaggaacggagaagcgaggacgcccagagcaaggccgccctgaccgactggctgcgggctaaggccagcttcgtgatcgagggcctgaaggaggccgacaaggacgagttctgcagatgcgagctgaagctgcagaagtggtacggggacctgcggggaaagcccttcgccatcgaagccgagaacagcatcctggacatcagcggcttcagcaagcagtacaactgtgccttcatctggcagaaggacggcgtgaagaagctgaacctgtacctgatcatcaactacttcaagggcggcaagctgcggttcaagaagatcaaacctgaagccttcgaagccaacagattctacaccgtgatcaacaaaaagagcggcgagatcgtgcccatggaggtgaacttcaacttcgacgaccccaacctgatcatcctgcctctggcctttggcaagagacagggcagagaattcatctggaacgacctgctgtccctggaaaccggcagcctgaagctggccaacggaagagtgatcgagaagacactgtacaacagaagaacccggcaggatgagcctgccctgttcgtggccctgaccttcgagcggcgggaggtcctggactcctccaatatcaaaccaatgaacctgatcggcgtggcaagaggcgaaaacatccccgccgtgatcgccctgaccgaccccgagggctgcccactgagccggtttaaggatagcctgggaaacccaacccacatcctgagaatcggcgagagctataaggagaagcagcggaccatccaggccaagaaggaggtggagcagcggagagccggcggctacagccggaagtacgccagcaaagccaagaatctggcagacgatatggtgagaaacaccgctagagatctgctgtactacgccgtgacccaggatgccatgctgatcttcgccaacctgagccggggcttcggccggcagggcaagcggaccttcatggccgagagacagtacacacggatggaggactggctgaccgccaagctggcctacgagggcctgagcaagacctacctgtccaagacactggcccagtacacctccaagacatgcagcaactgtgggtttaccatcaccagcgccgactacgacagggtgctggagaagctgaagaagacagcaacaggctggatgaccacaattaacggcaaggagctgaaggtggagggccagattacctactacaacagatacaagagacagaacgtagtcaaggacctgtccgtcgagctggatagactgagcgaagaatctgtgaacaacgacatctcctcctggacaaagggcagaagcggagaagctctgagcctcctgaagaaaagattctcccatagacccgtgcaggagaagttcgtgtgcctgaactgcggcttcgagacacacgcagccgagcaagccgccctgaacatcgccagatcctggctgttcctgcggagccaggagtacaagaaataccagacaaacaagacaaccggcaacaccgataagagagccttcgtcgagacctggcagtccttttaccggaagaagcttaaggaggtgtggaaacctgccgtgcggtctggcggatctggcggaggctccaccagccccaagaaaaagagaaaagtctaagctgccttctgcggggcttgccttctggccatgcccttcttctctcccttgcacctgtacctcttggtctttgaataaagcctgagtaggaaggctagcaaaaaaaaaaaaaaaaaaaaaaaaaaaaaaaaaaaaaaaaaaaaaaaaaaaaaaaaaaaaaaaaaaaaaaaaaaaaaaaa

SEQ ID NO: 13266 - RNA, 5785 nt, synthetic construct
  source 1..5785: mol_type = other RNA
aggaaataagagagaaaagaagagtaagaagaaatataagagccaccatggcccctaagaagaagcgtaaagtgagccggatggaacgcctcgtctacgaggtgcggcagaagtgcagaaacatcgaggacatctgcatctcctgcggatctctgaacgtgaccctggagcacccactgttcatcggcggcatgtgccagaactgtaaaaactgttttctggagtgtgcctatcaatacgacgatgacggctaccagagctactgcaccatctgttgcggcggaagagaggtgctgatgtgtggaaataacaactgctgccggtgcttctgcgtggaatgcgtggacctgctggtgggccccggcgccgcccaggccgctattaaggaagatccttggaactgctacatgtgcggccacaagggcacatacggcctgctgagacggagagaggactggcctagcagactgcagatgttcttcgccaataaccacgaccaggagttcgacccccctaaggtgtaccctcccgtccccgccgagaagagaaagcccatccgggtcctgagcctgttcgatggcatcgccaccggtctgctggtgctgaaggacctgggcatccaggtggataggtacattgcctccgaggtgtgcgaggactccatcaccgtgggaatggtgcgtcatcagggcaagatcatgtacgtgggcgacgtgcggagcgtgacacagaagcatatccaggagtggggccctttcgacctggtgatcggcggcagcccttgcaatgacctgagcatcgtgaacccagcccggaagggcctgtacgagggaaccggcagactgttcttcgagttttacagactgctgcacgacgcccggcctaaggaaggcgacgaccggcccttcttttggctgttcgagaatgtggtggccatgggagtcagcgacaagcgggatattagccggttcctggagagcaaccccgtgatgatcgatgccaaggaagtgagcgccgcccaccgggccagatacttctggggcaatctgcctggcatgaacagacccctggccagcaccgtgaacgacaagctggagctgcaggagtgcctggagcacggccggatcgccaagttcagcaaggtgagaaccatcaccacccgaagcaacagcatcaaacaaggcaaggaccagcactttcctgtgttcatgaacgagaaggaggacatcctgtggtgtaccgagatggagagagtgttcgggttcccagtccactacacagatgtcagcaacatgtctagactggccagacagagactgctgggaagaagctggtccgtccctgtgatcagacacctgttcgcccctctgaaggagtacttcgcctgcgtgagcagcggcaacagcaacgccaacagccggggccccagcttctctagcggcctggtgccactgtccctgagagggagccacatgggccccatggagatctacaaaaccgtgagcgcctggaagcggcagcctgtgcgcgtgctgagcctgtttcggaatatcgataaagtcctgaaaagcctgggattcctggagagcggctctggctccggcggtggcaccctgaagtacgtggaggatgtgacaaacgtggtcagacgggatgtggagaagtggggccccttcgatctggtgtacggcagcacccaacccctgggcagctcttgtgaccggtgccctggctggtacatgtttcagttccaccggatcctgcagtacgccctgccgagacaggagtcccagcggccattcttttggattttcatggacaacttgctgctgaccgaggatgaccaggaaactaccactcggttcctgcagaccgaagccgtgaccctgcaggacgtgagaggccgggactaccagaacgccatgcgggtgtggtccaacatccctggactgaaaagcaagcacgcacctctgacccctaaagaagaggagtacctgcaggcccaggtgcggagcagaagcaagctggacgcccctaaggtggatctgctggtgaagaattgcctcctgcccctgagagagtacttcaagtatttcagccagaatagtctgcccctgggaggcagcggcggcggcaggcccagggccctgaagttcgccgacgtggccgtgtacttcagccccgaggagtggggctgcctgaggcccgcccagaggctgctgtacagggaggtgatgagggagacctacggcctgctgggcgccctgggctgcgccggccccacccccgccctgatcagctggctggagaggaacaccgacgactgggagcccgccgccctggacccccaggagtacaggaggtgggccaccttccagggcggcccaagcagcggcgcccctcctcccagcggcggcagcccagccggctccccaacctctaccgaggagggcacctctgagtccgccacccccgagagcggccctggcacctccaccgagcccagcgagggcagcgcacccggcagccctgccggcagccccacctccacagaggagggaaccagcaccgagcccagcgaaggcagcgccccaggcaccagcaccgagcctagtgagcaggagattaaacggatcaacaagatcagaagaagacttgtgaaagacagcaacaccaagaaggccggcaagacaggccccatgaaaaccctgctggttagagtgatgacacccgatctgagagagcggctggaaaacctgagaaagaagcctgaaaatatcccccagcccatcagcaatacatctagagccaacctgaataagctgctgaccgattacaccgaaatgaagaaggcgatcctgcatgtgtactgggaagagttccagaaggaccctgtgggcctgatgagccgggtggcccagcctgccagcaagaagatcgatcagaacaagctgaaacctgagatggacgagaagggcaacctgaccaccgccggctttgcctgctctcagtgtggccagcccctgttcgtgtacaagctggagcaggtgtctgagaagggcaaggcttacaccaactacttcggacggtgcaatgtggccgagcacgaaaagctgatcctgctggcccagctgaagcccgagaaggatagcgacgaagccgtgacatatagcctgggaaagtttgggcagagggccctggatttctacagcattcatgtgaccaaggagtccacccaccccgtgaagcccctggcccagatcgccggaaacagatacgcctccggacctgtgggaaaggccctgagcgacgcatgtatgggcacaatcgcctccttcctgtctaagtaccaggacatcatcatcgaacaccagaaggtggtgaagggcaaccagaagagactggagagcctgcgggagctggccggcaaggaaaacctggaataccctagcgtgaccctgccacctcagcctcacaccaaggagggcgttgatgcctacaacgaagtgatcgcccgggtgcgaatgtgggtgaacctgaacctgtggcagaagctgaagctaagcagagatgatgccaagcctctgctgagactgaagggattcccttcctttcctctggtcgagagacaggccaacgaagtggactggtgggacatggtgtgtaacgtgaagaagctgatcaacgagaaaaaggaggatggcaaggtgttttggcagaatctggctggctacaagagacaggaagccctgagaccatacctgagcagcgaggaagatcggaagaagggaaagaaattcgctcggtaccagctgggcgacctgctgctgcacctggaaaagaagcacggcgaggactggggaaaggtgtacgacgaggcctgggagcggattgacaagaaagtggaaggcctgagcaagcacatcaagctggaagaggaacggagaagcgaggacgcccagagcaaggccgccctgaccgactggctgcgggctaaggccagcttcgtgatcgagggcctgaaggaggccgacaaggacgagttctgcagatgcgagctgaagctgcagaagtggtacggggacctgcggggaaagcccttcgccatcgaagccgagaacagcatcctggacatcagcggcttcagcaagcagtacaactgtgccttcatctggcagaaggacggcgtgaagaagctgaacctgtacctgatcatcaactacttcaagggcggcaagctgcggttcaagaagatcaaacctgaagccttcgaagccaacagattctacaccgtgatcaacaaaaagagcggcgagatcgtgcccatggaggtgaacttcaacttcgacgaccccaacctgatcatcctgcctctggcctttggcaagagacagggcagagaattcatctggaacgacctgctgtccctggaaaccggcagcctgaagctggccaacggaagagtgatcgagaagacactgtacaacagaagaacccggcaggatgagcctgccctgttcgtggccctgaccttcgagcggcgggaggtcctggactcctccaatatcaaaccaatgaacctgatcggcgtggcaagaggcgaaaacatccccgccgtgatcgccctgaccgaccccgagggctgcccactgagccggtttaaggatagcctgggaaacccaacccacatcctgagaatcggcgagagctataaggagaagcagcggaccatccaggccaagaaggaggtggagcagcggagagccggcggctacagccggaagtacgccagcaaagccaagaatctggcagacgatatggtgagaaacaccgctagagatctgctgtactacgccgtgacccaggatgccatgctgatcttcgccaacctgagccggggcttcggccggcagggcaagcggaccttcatggccgagagacagtacacacggatggaggactggctgaccgccaagctggcctacgagggcctgagcaagacctacctgtccaagacactggcccagtacacctccaagacatgcagcaactgtgggtttaccatcaccagcgccgactacgacagggtgctggagaagctgaagaagacagcaacaggctggatgaccacaattaacggcaaggagctgaaggtggagggccagattacctactacaacagatacaagagacagaacgtagtcaaggacctgtccgtcgagctggatagactgagcgaagaatctgtgaacaacgacatctcctcctggacaaagggcagaagcggagaagctctgagcctcctgaagaaaagattctcccatagacccgtgcaggagaagttcgtgtgcctgaactgcggcttcgagacacacgcagccgagcaagccgccctgaacatcgccagatcctggctgttcctgcggagccaggagtacaagaaataccagacaaacaagacaaccggcaacaccgataagagagccttcgtcgagacctggcagtccttttaccggaagaagcttaaggaggtgtggaaacctgccgtgcggtctggcggatctggcggaggctccaccagccccaagaaaaagagaaaagtctaagctgccttctgcggggcttgccttctggccatgcccttcttctctcccttgcacctgtacctcttggtctttgaataaagcctgagtaggaaggctagcaaaaaaaaaaaaaaaaaaaaaaaaaaaaaaaaaaaaaaaaaaaaaaaaaaaaaaaaaaaaaaaaaaaaaaaaaaaaaaaa

SEQ ID NO: 13267 - RNA, 5785 nt, synthetic construct
  source 1..5785: mol_type = other RNA
aggaaataagagagaaaagaagagtaagaagaaatataagagccaccatggcccctaagaagaagcgtaaagtgagccggatggaacgcctcgtctacgaggtgcggcagaagtgcagaaacatcgaggacatctgcatctcctgcggatctctgaacgtgaccctggagcacccactgttcatcggcggcatgtgccagaactgtaaaaactgttttctggagtgtgcctatcaatacgacgatgacggctaccagagctactgcaccatctgttgcggcggaagagaggtgctgatgtgtggaaataacaactgctgccggtgcttctgcgtggaatgcgtggacctgctggtgggccccggcgccgcccaggccgctattaaggaagatccttggaactgctacatgtgcggccacaagggcacatacggcctgctgagacggagagaggactggcctagcagactgcagatgttcttcgccaataaccacgaccaggagttcgacccccctaaggtgtaccctcccgtccccgccgagaagagaaagcccatccgggtcctgagcctgttcgatggcatcgccaccggtctgctggtgctgaaggacctgggcatccaggtggataggtacattgcctccgaggtgtgcgaggactccatcaccgtgggaatggtgcgtcatcagggcaagatcatgtacgtgggcgacgtgcggagcgtgacacagaagcatatccaggagtggggccctttcgacctggtgatcggcggcagcccttgcaatgacctgagcatcgtgaacccagcccggaagggcctgtacgagggaaccggcagactgttcttcgagttttacagactgctgcacgacgcccggcctaaggaaggcgacgaccggcccttcttttggctgttcgagaatgtggtggccatgggagtcagcgacaagcgggatattagccggttcctggagagcaaccccgtgatgatcgatgccaaggaagtgagcgccgcccaccgggccagatacttctggggcaatctgcctggcatgaacagacccctggccagcaccgtgaacgacaagctggagctgcaggagtgcctggagcacggccggatcgccaagttcagcaaggtgagaaccatcaccacccgaagcaacagcatcaaacaaggcaaggaccagcactttcctgtgttcatgaacgagaaggaggacatcctgtggtgtaccgagatggagagagtgttcgggttcccagtccactacacagatgtcagcaacatgtctagactggccagacagagactgctgggaagaagctggtccgtccctgtgatcagacacctgttcgcccctctgaaggagtacttcgcctgcgtgagcagcggcaacagcaacgccaacagccggggccccagcttctctagcggcctggtgccactgtccctgagagggagccacatgggccccatggagatctacaaaaccgtgagcgcctggaagcggcagcctgtgcgcgtgctgagcctgtttcggaatatcgataaagtcctgaaaagcctgggattcctggagagcggctctggctccggcggtggcaccctgaagtacgtggaggatgtgacaaacgtggtcagacgggatgtggagaagtggggccccttcgatctggtgtacggcagcacccaacccctgggcagctcttgtgaccggtgccctggctggtacatgtttcagttccaccggatcctgcagtacgccctgccgagacaggagtcccagcggccattcttttggattttcatggacaacttgctgctgaccgaggatgaccaggaaactaccactcggttcctgcagaccgaagccgtgaccctgcaggacgtgagaggccgggactaccagaacgccatgcgggtgtggtccaacatccctggactgaaaagcaagcacgcacctctgacccctaaagaagaggagtacctgcaggcccaggtgcggagcagaagcaagctggacgcccctaaggtggatctgctggtgaagaattgcctcctgcccctgagagagtacttcaagtatttcagccagaatagtctgcccctgggaggcagcggcggcggcatccacctgaccgcctggccccagaagagcgtgaccttcgaggacgtggccgtgtacttcacccaggccgagtgggacggcctgagccccgcccagaggaccctgtacagggacgtgatgctggagaactacggcaacgtggccagcctgggcttccccctgctgaagcccgccgtgatcagccagctggagggcggcggcgacctgggcggccccagccccctggccgccggcaccggcctgggcggcccaagcagcggcgcccctcctcccagcggcggcagcccagccggctccccaacctctaccgaggagggcacctctgagtccgccacccccgagagcggccctggcacctccaccgagcccagcgagggcagcgcacccggcagccctgccggcagccccacctccacagaggagggaaccagcaccgagcccagcgaaggcagcgccccaggcaccagcaccgagcctagtgagcaggagattaaacggatcaacaagatcagaagaagacttgtgaaagacagcaacaccaagaaggccggcaagacaggccccatgaaaaccctgctggttagagtgatgacacccgatctgagagagcggctggaaaacctgagaaagaagcctgaaaatatcccccagcccatcagcaatacatctagagccaacctgaataagctgctgaccgattacaccgaaatgaagaaggcgatcctgcatgtgtactgggaagagttccagaaggaccctgtgggcctgatgagccgggtggcccagcctgccagcaagaagatcgatcagaacaagctgaaacctgagatggacgagaagggcaacctgaccaccgccggctttgcctgctctcagtgtggccagcccctgttcgtgtacaagctggagcaggtgtctgagaagggcaaggcttacaccaactacttcggacggtgcaatgtggccgagcacgaaaagctgatcctgctggcccagctgaagcccgagaaggatagcgacgaagccgtgacatatagcctgggaaagtttgggcagagggccctggatttctacagcattcatgtgaccaaggagtccacccaccccgtgaagcccctggcccagatcgccggaaacagatacgcctccggacctgtgggaaaggccctgagcgacgcatgtatgggcacaatcgcctccttcctgtctaagtaccaggacatcatcatcgaacaccagaaggtggtgaagggcaaccagaagagactggagagcctgcgggagctggccggcaaggaaaacctggaataccctagcgtgaccctgccacctcagcctcacaccaaggagggcgttgatgcctacaacgaagtgatcgcccgggtgcgaatgtgggtgaacctgaacctgtggcagaagctgaagctaagcagagatgatgccaagcctctgctgagactgaagggattcccttcctttcctctggtcgagagacaggccaacgaagtggactggtgggacatggtgtgtaacgtgaagaagctgatcaacgagaaaaaggaggatggcaaggtgttttggcagaatctggctggctacaagagacaggaagccctgagaccatacctgagcagcgaggaagatcggaagaagggaaagaaattcgctcggtaccagctgggcgacctgctgctgcacctggaaaagaagcacggcgaggactggggaaaggtgtacgacgaggcctgggagcggattgacaagaaagtggaaggcctgagcaagcacatcaagctggaagaggaacggagaagcgaggacgcccagagcaaggccgccctgaccgactggctgcgggctaaggccagcttcgtgatcgagggcctgaaggaggccgacaaggacgagttctgcagatgcgagctgaagctgcagaagtggtacggggacctgcggggaaagcccttcgccatcgaagccgagaacagcatcctggacatcagcggcttcagcaagcagtacaactgtgccttcatctggcagaaggacggcgtgaagaagctgaacctgtacctgatcatcaactacttcaagggcggcaagctgcggttcaagaagatcaaacctgaagccttcgaagccaacagattctacaccgtgatcaacaaaaagagcggcgagatcgtgcccatggaggtgaacttcaacttcgacgaccccaacctgatcatcctgcctctggcctttggcaagagacagggcagagaattcatctggaacgacctgctgtccctggaaaccggcagcctgaagctggccaacggaagagtgatcgagaagacactgtacaacagaagaacccggcaggatgagcctgccctgttcgtggccctgaccttcgagcggcgggaggtcctggactcctccaatatcaaaccaatgaacctgatcggcgtggcaagaggcgaaaacatccccgccgtgatcgccctgaccgaccccgagggctgcccactgagccggtttaaggatagcctgggaaacccaacccacatcctgagaatcggcgagagctataaggagaagcagcggaccatccaggccaagaaggaggtggagcagcggagagccggcggctacagccggaagtacgccagcaaagccaagaatctggcagacgatatggtgagaaacaccgctagagatctgctgtactacgccgtgacccaggatgccatgctgatcttcgccaacctgagccggggcttcggccggcagggcaagcggaccttcatggccgagagacagtacacacggatggaggactggctgaccgccaagctggcctacgagggcctgagcaagacctacctgtccaagacactggcccagtacacctccaagacatgcagcaactgtgggtttaccatcaccagcgccgactacgacagggtgctggagaagctgaagaagacagcaacaggctggatgaccacaattaacggcaaggagctgaaggtggagggccagattacctactacaacagatacaagagacagaacgtagtcaaggacctgtccgtcgagctggatagactgagcgaagaatctgtgaacaacgacatctcctcctggacaaagggcagaagcggagaagctctgagcctcctgaagaaaagattctcccatagacccgtgcaggagaagttcgtgtgcctgaactgcggcttcgagacacacgcagccgagcaagccgccctgaacatcgccagatcctggctgttcctgcggagccaggagtacaagaaataccagacaaacaagacaaccggcaacaccgataagagagccttcgtcgagacctggcagtccttttaccggaagaagcttaaggaggtgtggaaacctgccgtgcggtctggcggatctggcggaggctccaccagccccaagaaaaagagaaaagtctaagctgccttctgcggggcttgccttctggccatgcccttcttctctcccttgcacctgtacctcttggtctttgaataaagcctgagtaggaaggctagcaaaaaaaaaaaaaaaaaaaaaaaaaaaaaaaaaaaaaaaaaaaaaaaaaaaaaaaaaaaaaaaaaaaaaaaaaaaaaaaa

SEQ ID NO: 13268 - RNA, 5785 nt, synthetic construct
  source 1..5785: mol_type = other RNA
aggaaataagagagaaaagaagagtaagaagaaatataagagccaccatggcccctaagaagaagcgtaaagtgagccggatggaacgcctcgtctacgaggtgcggcagaagtgcagaaacatcgaggacatctgcatctcctgcggatctctgaacgtgaccctggagcacccactgttcatcggcggcatgtgccagaactgtaaaaactgttttctggagtgtgcctatcaatacgacgatgacggctaccagagctactgcaccatctgttgcggcggaagagaggtgctgatgtgtggaaataacaactgctgccggtgcttctgcgtggaatgcgtggacctgctggtgggccccggcgccgcccaggccgctattaaggaagatccttggaactgctacatgtgcggccacaagggcacatacggcctgctgagacggagagaggactggcctagcagactgcagatgttcttcgccaataaccacgaccaggagttcgacccccctaaggtgtaccctcccgtccccgccgagaagagaaagcccatccgggtcctgagcctgttcgatggcatcgccaccggtctgctggtgctgaaggacctgggcatccaggtggataggtacattgcctccgaggtgtgcgaggactccatcaccgtgggaatggtgcgtcatcagggcaagatcatgtacgtgggcgacgtgcggagcgtgacacagaagcatatccaggagtggggccctttcgacctggtgatcggcggcagcccttgcaatgacctgagcatcgtgaacccagcccggaagggcctgtacgagggaaccggcagactgttcttcgagttttacagactgctgcacgacgcccggcctaaggaaggcgacgaccggcccttcttttggctgttcgagaatgtggtggccatgggagtcagcgacaagcgggatattagccggttcctggagagcaaccccgtgatgatcgatgccaaggaagtgagcgccgcccaccgggccagatacttctggggcaatctgcctggcatgaacagacccctggccagcaccgtgaacgacaagctggagctgcaggagtgcctggagcacggccggatcgccaagttcagcaaggtgagaaccatcaccacccgaagcaacagcatcaaacaaggcaaggaccagcactttcctgtgttcatgaacgagaaggaggacatcctgtggtgtaccgagatggagagagtgttcgggttcccagtccactacacagatgtcagcaacatgtctagactggccagacagagactgctgggaagaagctggtccgtccctgtgatcagacacctgttcgcccctctgaaggagtacttcgcctgcgtgagcagcggcaacagcaacgccaacagccggggccccagcttctctagcggcctggtgccactgtccctgagagggagccacatgggccccatggagatctacaaaaccgtgagcgcctggaagcggcagcctgtgcgcgtgctgagcctgtttcggaatatcgataaagtcctgaaaagcctgggattcctggagagcggctctggctccggcggtggcaccctgaagtacgtggaggatgtgacaaacgtggtcagacgggatgtggagaagtggggccccttcgatctggtgtacggcagcacccaacccctgggcagctcttgtgaccggtgccctggctggtacatgtttcagttccaccggatcctgcagtacgccctgccgagacaggagtcccagcggccattcttttggattttcatggacaacttgctgctgaccgaggatgaccaggaaactaccactcggttcctgcagaccgaagccgtgaccctgcaggacgtgagaggccgggactaccagaacgccatgcgggtgtggtccaacatccctggactgaaaagcaagcacgcacctctgacccctaaagaagaggagtacctgcaggcccaggtgcggagcagaagcaagctggacgcccctaaggtggatctgctggtgaagaattgcctcctgcccctgagagagtacttcaagtatttcagccagaatagtctgcccctgggaggcagcggcggcggcgcccaggtgctggtgaccttccaggacgtggccgtggacttcacccaggaggagtggaggctgctggaccccggccagaaggagctgtacaaggaggtgatgctggagaacgccgagaacatgctgttcctgggcctgcccgtgcccagggaggactggttcttccacttccacgagggcggcgacccctggatgctggagggcaagggccccagcatcagcaggctggacgaggagaggcacggcggcccaagcagcggcgcccctcctcccagcggcggcagcccagccggctccccaacctctaccgaggagggcacctctgagtccgccacccccgagagcggccctggcacctccaccgagcccagcgagggcagcgcacccggcagccctgccggcagccccacctccacagaggagggaaccagcaccgagcccagcgaaggcagcgccccaggcaccagcaccgagcctagtgagcaggagattaaacggatcaacaagatcagaagaagacttgtgaaagacagcaacaccaagaaggccggcaagacaggccccatgaaaaccctgctggttagagtgatgacacccgatctgagagagcggctggaaaacctgagaaagaagcctgaaaatatcccccagcccatcagcaatacatctagagccaacctgaataagctgctgaccgattacaccgaaatgaagaaggcgatcctgcatgtgtactgggaagagttccagaaggaccctgtgggcctgatgagccgggtggcccagcctgccagcaagaagatcgatcagaacaagctgaaacctgagatggacgagaagggcaacctgaccaccgccggctttgcctgctctcagtgtggccagcccctgttcgtgtacaagctggagcaggtgtctgagaagggcaaggcttacaccaactacttcggacggtgcaatgtggccgagcacgaaaagctgatcctgctggcccagctgaagcccgagaaggatagcgacgaagccgtgacatatagcctgggaaagtttgggcagagggccctggatttctacagcattcatgtgaccaaggagtccacccaccccgtgaagcccctggcccagatcgccggaaacagatacgcctccggacctgtgggaaaggccctgagcgacgcatgtatgggcacaatcgcctccttcctgtctaagtaccaggacatcatcatcgaacaccagaaggtggtgaagggcaaccagaagagactggagagcctgcgggagctggccggcaaggaaaacctggaataccctagcgtgaccctgccacctcagcctcacaccaaggagggcgttgatgcctacaacgaagtgatcgcccgggtgcgaatgtgggtgaacctgaacctgtggcagaagctgaagctaagcagagatgatgccaagcctctgctgagactgaagggattcccttcctttcctctggtcgagagacaggccaacgaagtggactggtgggacatggtgtgtaacgtgaagaagctgatcaacgagaaaaaggaggatggcaaggtgttttggcagaatctggctggctacaagagacaggaagccctgagaccatacctgagcagcgaggaagatcggaagaagggaaagaaattcgctcggtaccagctgggcgacctgctgctgcacctggaaaagaagcacggcgaggactggggaaaggtgtacgacgaggcctgggagcggattgacaagaaagtggaaggcctgagcaagcacatcaagctggaagaggaacggagaagcgaggacgcccagagcaaggccgccctgaccgactggctgcgggctaaggccagcttcgtgatcgagggcctgaaggaggccgacaaggacgagttctgcagatgcgagctgaagctgcagaagtggtacggggacctgcggggaaagcccttcgccatcgaagccgagaacagcatcctggacatcagcggcttcagcaagcagtacaactgtgccttcatctggcagaaggacggcgtgaagaagctgaacctgtacctgatcatcaactacttcaagggcggcaagctgcggttcaagaagatcaaacctgaagccttcgaagccaacagattctacaccgtgatcaacaaaaagagcggcgagatcgtgcccatggaggtgaacttcaacttcgacgaccccaacctgatcatcctgcctctggcctttggcaagagacagggcagagaattcatctggaacgacctgctgtccctggaaaccggcagcctgaagctggccaacggaagagtgatcgagaagacactgtacaacagaagaacccggcaggatgagcctgccctgttcgtggccctgaccttcgagcggcgggaggtcctggactcctccaatatcaaaccaatgaacctgatcggcgtggcaagaggcgaaaacatccccgccgtgatcgccctgaccgaccccgagggctgcccactgagccggtttaaggatagcctgggaaacccaacccacatcctgagaatcggcgagagctataaggagaagcagcggaccatccaggccaagaaggaggtggagcagcggagagccggcggctacagccggaagtacgccagcaaagccaagaatctggcagacgatatggtgagaaacaccgctagagatctgctgtactacgccgtgacccaggatgccatgctgatcttcgccaacctgagccggggcttcggccggcagggcaagcggaccttcatggccgagagacagtacacacggatggaggactggctgaccgccaagctggcctacgagggcctgagcaagacctacctgtccaagacactggcccagtacacctccaagacatgcagcaactgtgggtttaccatcaccagcgccgactacgacagggtgctggagaagctgaagaagacagcaacaggctggatgaccacaattaacggcaaggagctgaaggtggagggccagattacctactacaacagatacaagagacagaacgtagtcaaggacctgtccgtcgagctggatagactgagcgaagaatctgtgaacaacgacatctcctcctggacaaagggcagaagcggagaagctctgagcctcctgaagaaaagattctcccatagacccgtgcaggagaagttcgtgtgcctgaactgcggcttcgagacacacgcagccgagcaagccgccctgaacatcgccagatcctggctgttcctgcggagccaggagtacaagaaataccagacaaacaagacaaccggcaacaccgataagagagccttcgtcgagacctggcagtccttttaccggaagaagcttaaggaggtgtggaaacctgccgtgcggtctggcggatctggcggaggctccaccagccccaagaaaaagagaaaagtctaagctgccttctgcggggcttgccttctggccatgcccttcttctctcccttgcacctgtacctcttggtctttgaataaagcctgagtaggaaggctagcaaaaaaaaaaaaaaaaaaaaaaaaaaaaaaaaaaaaaaaaaaaaaaaaaaaaaaaaaaaaaaaaaaaaaaaaaaaaaaaa

SEQ ID NO: 13269 - RNA, 5785 nt, synthetic construct
  source 1..5785: mol_type = other RNA
aggaaataagagagaaaagaagagtaagaagaaatataagagccaccatggcccctaagaagaagcgtaaagtgagccggatggaacgcctcgtctacgaggtgcggcagaagtgcagaaacatcgaggacatctgcatctcctgcggatctctgaacgtgaccctggagcacccactgttcatcggcggcatgtgccagaactgtaaaaactgttttctggagtgtgcctatcaatacgacgatgacggctaccagagctactgcaccatctgttgcggcggaagagaggtgctgatgtgtggaaataacaactgctgccggtgcttctgcgtggaatgcgtggacctgctggtgggccccggcgccgcccaggccgctattaaggaagatccttggaactgctacatgtgcggccacaagggcacatacggcctgctgagacggagagaggactggcctagcagactgcagatgttcttcgccaataaccacgaccaggagttcgacccccctaaggtgtaccctcccgtccccgccgagaagagaaagcccatccgggtcctgagcctgttcgatggcatcgccaccggtctgctggtgctgaaggacctgggcatccaggtggataggtacattgcctccgaggtgtgcgaggactccatcaccgtgggaatggtgcgtcatcagggcaagatcatgtacgtgggcgacgtgcggagcgtgacacagaagcatatccaggagtggggccctttcgacctggtgatcggcggcagcccttgcaatgacctgagcatcgtgaacccagcccggaagggcctgtacgagggaaccggcagactgttcttcgagttttacagactgctgcacgacgcccggcctaaggaaggcgacgaccggcccttcttttggctgttcgagaatgtggtggccatgggagtcagcgacaagcgggatattagccggttcctggagagcaaccccgtgatgatcgatgccaaggaagtgagcgccgcccaccgggccagatacttctggggcaatctgcctggcatgaacagacccctggccagcaccgtgaacgacaagctggagctgcaggagtgcctggagcacggccggatcgccaagttcagcaaggtgagaaccatcaccacccgaagcaacagcatcaaacaaggcaaggaccagcactttcctgtgttcatgaacgagaaggaggacatcctgtggtgtaccgagatggagagagtgttcgggttcccagtccactacacagatgtcagcaacatgtctagactggccagacagagactgctgggaagaagctggtccgtccctgtgatcagacacctgttcgcccctctgaaggagtacttcgcctgcgtgagcagcggcaacagcaacgccaacagccggggccccagcttctctagcggcctggtgccactgtccctgagagggagccacatgggccccatggagatctacaaaaccgtgagcgcctggaagcggcagcctgtgcgcgtgctgagcctgtttcggaatatcgataaagtcctgaaaagcctgggattcctggagagcggctctggctccggcggtggcaccctgaagtacgtggaggatgtgacaaacgtggtcagacgggatgtggagaagtggggccccttcgatctggtgtacggcagcacccaacccctgggcagctcttgtgaccggtgccctggctggtacatgtttcagttccaccggatcctgcagtacgccctgccgagacaggagtcccagcggccattcttttggattttcatggacaacttgctgctgaccgaggatgaccaggaaactaccactcggttcctgcagaccgaagccgtgaccctgcaggacgtgagaggccgggactaccagaacgccatgcgggtgtggtccaacatccctggactgaaaagcaagcacgcacctctgacccctaaagaagaggagtacctgcaggcccaggtgcggagcagaagcaagctggacgcccctaaggtggatctgctggtgaagaattgcctcctgcccctgagagagtacttcaagtatttcagccagaatagtctgcccctgggaggcagcggcggcggcagcgaggacctggtgaccttcagggacgtggccgtggacttcagccaggaggagtgggagcagctgaacagcgcccagaggggcctgtacagggacgtgatgctggagaactacaggagcctggtgagcctgggcgtgagcgtgagcaagcccgacgtgatcagcctgctggagcagggcaaggagccctgggtggtgaaggagggcaccaggggcacctacagcgactggaagtacgccttcggcggcccaagcagcggcgcccctcctcccagcggcggcagcccagccggctccccaacctctaccgaggagggcacctctgagtccgccacccccgagagcggccctggcacctccaccgagcccagcgagggcagcgcacccggcagccctgccggcagccccacctccacagaggagggaaccagcaccgagcccagcgaaggcagcgccccaggcaccagcaccgagcctagtgagcaggagattaaacggatcaacaagatcagaagaagacttgtgaaagacagcaacaccaagaaggccggcaagacaggccccatgaaaaccctgctggttagagtgatgacacccgatctgagagagcggctggaaaacctgagaaagaagcctgaaaatatcccccagcccatcagcaatacatctagagccaacctgaataagctgctgaccgattacaccgaaatgaagaaggcgatcctgcatgtgtactgggaagagttccagaaggaccctgtgggcctgatgagccgggtggcccagcctgccagcaagaagatcgatcagaacaagctgaaacctgagatggacgagaagggcaacctgaccaccgccggctttgcctgctctcagtgtggccagcccctgttcgtgtacaagctggagcaggtgtctgagaagggcaaggcttacaccaactacttcggacggtgcaatgtggccgagcacgaaaagctgatcctgctggcccagctgaagcccgagaaggatagcgacgaagccgtgacatatagcctgggaaagtttgggcagagggccctggatttctacagcattcatgtgaccaaggagtccacccaccccgtgaagcccctggcccagatcgccggaaacagatacgcctccggacctgtgggaaaggccctgagcgacgcatgtatgggcacaatcgcctccttcctgtctaagtaccaggacatcatcatcgaacaccagaaggtggtgaagggcaaccagaagagactggagagcctgcgggagctggccggcaaggaaaacctggaataccctagcgtgaccctgccacctcagcctcacaccaaggagggcgttgatgcctacaacgaagtgatcgcccgggtgcgaatgtgggtgaacctgaacctgtggcagaagctgaagctaagcagagatgatgccaagcctctgctgagactgaagggattcccttcctttcctctggtcgagagacaggccaacgaagtggactggtgggacatggtgtgtaacgtgaagaagctgatcaacgagaaaaaggaggatggcaaggtgttttggcagaatctggctggctacaagagacaggaagccctgagaccatacctgagcagcgaggaagatcggaagaagggaaagaaattcgctcggtaccagctgggcgacctgctgctgcacctggaaaagaagcacggcgaggactggggaaaggtgtacgacgaggcctgggagcggattgacaagaaagtggaaggcctgagcaagcacatcaagctggaagaggaacggagaagcgaggacgcccagagcaaggccgccctgaccgactggctgcgggctaaggccagcttcgtgatcgagggcctgaaggaggccgacaaggacgagttctgcagatgcgagctgaagctgcagaagtggtacggggacctgcggggaaagcccttcgccatcgaagccgagaacagcatcctggacatcagcggcttcagcaagcagtacaactgtgccttcatctggcagaaggacggcgtgaagaagctgaacctgtacctgatcatcaactacttcaagggcggcaagctgcggttcaagaagatcaaacctgaagccttcgaagccaacagattctacaccgtgatcaacaaaaagagcggcgagatcgtgcccatggaggtgaacttcaacttcgacgaccccaacctgatcatcctgcctctggcctttggcaagagacagggcagagaattcatctggaacgacctgctgtccctggaaaccggcagcctgaagctggccaacggaagagtgatcgagaagacactgtacaacagaagaacccggcaggatgagcctgccctgttcgtggccctgaccttcgagcggcgggaggtcctggactcctccaatatcaaaccaatgaacctgatcggcgtggcaagaggcgaaaacatccccgccgtgatcgccctgaccgaccccgagggctgcccactgagccggtttaaggatagcctgggaaacccaacccacatcctgagaatcggcgagagctataaggagaagcagcggaccatccaggccaagaaggaggtggagcagcggagagccggcggctacagccggaagtacgccagcaaagccaagaatctggcagacgatatggtgagaaacaccgctagagatctgctgtactacgccgtgacccaggatgccatgctgatcttcgccaacctgagccggggcttcggccggcagggcaagcggaccttcatggccgagagacagtacacacggatggaggactggctgaccgccaagctggcctacgagggcctgagcaagacctacctgtccaagacactggcccagtacacctccaagacatgcagcaactgtgggtttaccatcaccagcgccgactacgacagggtgctggagaagctgaagaagacagcaacaggctggatgaccacaattaacggcaaggagctgaaggtggagggccagattacctactacaacagatacaagagacagaacgtagtcaaggacctgtccgtcgagctggatagactgagcgaagaatctgtgaacaacgacatctcctcctggacaaagggcagaagcggagaagctctgagcctcctgaagaaaagattctcccatagacccgtgcaggagaagttcgtgtgcctgaactgcggcttcgagacacacgcagccgagcaagccgccctgaacatcgccagatcctggctgttcctgcggagccaggagtacaagaaataccagacaaacaagacaaccggcaacaccgataagagagccttcgtcgagacctggcagtccttttaccggaagaagcttaaggaggtgtggaaacctgccgtgcggtctggcggatctggcggaggctccaccagccccaagaaaaagagaaaagtctaagctgccttctgcggggcttgccttctggccatgcccttcttctctcccttgcacctgtacctcttggtctttgaataaagcctgagtaggaaggctagcaaaaaaaaaaaaaaaaaaaaaaaaaaaaaaaaaaaaaaaaaaaaaaaaaaaaaaaaaaaaaaaaaaaaaaaaaaaaaaaa

SEQ ID NO: 13270 - RNA, 5785 nt, synthetic construct
  source 1..5785: mol_type = other RNA
aggaaataagagagaaaagaagagtaagaagaaatataagagccaccatggcccctaagaagaagcgtaaagtgagccggatggaacgcctcgtctacgaggtgcggcagaagtgcagaaacatcgaggacatctgcatctcctgcggatctctgaacgtgaccctggagcacccactgttcatcggcggcatgtgccagaactgtaaaaactgttttctggagtgtgcctatcaatacgacgatgacggctaccagagctactgcaccatctgttgcggcggaagagaggtgctgatgtgtggaaataacaactgctgccggtgcttctgcgtggaatgcgtggacctgctggtgggccccggcgccgcccaggccgctattaaggaagatccttggaactgctacatgtgcggccacaagggcacatacggcctgctgagacggagagaggactggcctagcagactgcagatgttcttcgccaataaccacgaccaggagttcgacccccctaaggtgtaccctcccgtccccgccgagaagagaaagcccatccgggtcctgagcctgttcgatggcatcgccaccggtctgctggtgctgaaggacctgggcatccaggtggataggtacattgcctccgaggtgtgcgaggactccatcaccgtgggaatggtgcgtcatcagggcaagatcatgtacgtgggcgacgtgcggagcgtgacacagaagcatatccaggagtggggccctttcgacctggtgatcggcggcagcccttgcaatgacctgagcatcgtgaacccagcccggaagggcctgtacgagggaaccggcagactgttcttcgagttttacagactgctgcacgacgcccggcctaaggaaggcgacgaccggcccttcttttggctgttcgagaatgtggtggccatgggagtcagcgacaagcgggatattagccggttcctggagagcaaccccgtgatgatcgatgccaaggaagtgagcgccgcccaccgggccagatacttctggggcaatctgcctggcatgaacagacccctggccagcaccgtgaacgacaagctggagctgcaggagtgcctggagcacggccggatcgccaagttcagcaaggtgagaaccatcaccacccgaagcaacagcatcaaacaaggcaaggaccagcactttcctgtgttcatgaacgagaaggaggacatcctgtggtgtaccgagatggagagagtgttcgggttcccagtccactacacagatgtcagcaacatgtctagactggccagacagagactgctgggaagaagctggtccgtccctgtgatcagacacctgttcgcccctctgaaggagtacttcgcctgcgtgagcagcggcaacagcaacgccaacagccggggccccagcttctctagcggcctggtgccactgtccctgagagggagccacatgggccccatggagatctacaaaaccgtgagcgcctggaagcggcagcctgtgcgcgtgctgagcctgtttcggaatatcgataaagtcctgaaaagcctgggattcctggagagcggctctggctccggcggtggcaccctgaagtacgtggaggatgtgacaaacgtggtcagacgggatgtggagaagtggggccccttcgatctggtgtacggcagcacccaacccctgggcagctcttgtgaccggtgccctggctggtacatgtttcagttccaccggatcctgcagtacgccctgccgagacaggagtcccagcggccattcttttggattttcatggacaacttgctgctgaccgaggatgaccaggaaactaccactcggttcctgcagaccgaagccgtgaccctgcaggacgtgagaggccgggactaccagaacgccatgcgggtgtggtccaacatccctggactgaaaagcaagcacgcacctctgacccctaaagaagaggagtacctgcaggcccaggtgcggagcagaagcaagctggacgcccctaaggtggatctgctggtgaagaattgcctcctgcccctgagagagtacttcaagtatttcagccagaatagtctgcccctgggaggcagcggcggcggctgctggggcctgctgagcttcaaggacatcagcatggagttcacctgggacgagtggcagctgctggacagcacccagaagtacctgtacagggacgtgatcctggagaactaccacaacctgatcagcgtgggctaccacggcaccaagcccgacctgatcttcaagctggagcagggcgaggacccctggatcatcaacgccaagatcagcaggcagagcaggcccgacggctgggaggagggcggcccaagcagcggcgcccctcctcccagcggcggcagcccagccggctccccaacctctaccgaggagggcacctctgagtccgccacccccgagagcggccctggcacctccaccgagcccagcgagggcagcgcacccggcagccctgccggcagccccacctccacagaggagggaaccagcaccgagcccagcgaaggcagcgccccaggcaccagcaccgagcctagtgagcaggagattaaacggatcaacaagatcagaagaagacttgtgaaagacagcaacaccaagaaggccggcaagacaggccccatgaaaaccctgctggttagagtgatgacacccgatctgagagagcggctggaaaacctgagaaagaagcctgaaaatatcccccagcccatcagcaatacatctagagccaacctgaataagctgctgaccgattacaccgaaatgaagaaggcgatcctgcatgtgtactgggaagagttccagaaggaccctgtgggcctgatgagccgggtggcccagcctgccagcaagaagatcgatcagaacaagctgaaacctgagatggacgagaagggcaacctgaccaccgccggctttgcctgctctcagtgtggccagcccctgttcgtgtacaagctggagcaggtgtctgagaagggcaaggcttacaccaactacttcggacggtgcaatgtggccgagcacgaaaagctgatcctgctggcccagctgaagcccgagaaggatagcgacgaagccgtgacatatagcctgggaaagtttgggcagagggccctggatttctacagcattcatgtgaccaaggagtccacccaccccgtgaagcccctggcccagatcgccggaaacagatacgcctccggacctgtgggaaaggccctgagcgacgcatgtatgggcacaatcgcctccttcctgtctaagtaccaggacatcatcatcgaacaccagaaggtggtgaagggcaaccagaagagactggagagcctgcgggagctggccggcaaggaaaacctggaataccctagcgtgaccctgccacctcagcctcacaccaaggagggcgttgatgcctacaacgaagtgatcgcccgggtgcgaatgtgggtgaacctgaacctgtggcagaagctgaagctaagcagagatgatgccaagcctctgctgagactgaagggattcccttcctttcctctggtcgagagacaggccaacgaagtggactggtgggacatggtgtgtaacgtgaagaagctgatcaacgagaaaaaggaggatggcaaggtgttttggcagaatctggctggctacaagagacaggaagccctgagaccatacctgagcagcgaggaagatcggaagaagggaaagaaattcgctcggtaccagctgggcgacctgctgctgcacctggaaaagaagcacggcgaggactggggaaaggtgtacgacgaggcctgggagcggattgacaagaaagtggaaggcctgagcaagcacatcaagctggaagaggaacggagaagcgaggacgcccagagcaaggccgccctgaccgactggctgcgggctaaggccagcttcgtgatcgagggcctgaaggaggccgacaaggacgagttctgcagatgcgagctgaagctgcagaagtggtacggggacctgcggggaaagcccttcgccatcgaagccgagaacagcatcctggacatcagcggcttcagcaagcagtacaactgtgccttcatctggcagaaggacggcgtgaagaagctgaacctgtacctgatcatcaactacttcaagggcggcaagctgcggttcaagaagatcaaacctgaagccttcgaagccaacagattctacaccgtgatcaacaaaaagagcggcgagatcgtgcccatggaggtgaacttcaacttcgacgaccccaacctgatcatcctgcctctggcctttggcaagagacagggcagagaattcatctggaacgacctgctgtccctggaaaccggcagcctgaagctggccaacggaagagtgatcgagaagacactgtacaacagaagaacccggcaggatgagcctgccctgttcgtggccctgaccttcgagcggcgggaggtcctggactcctccaatatcaaaccaatgaacctgatcggcgtggcaagaggcgaaaacatccccgccgtgatcgccctgaccgaccccgagggctgcccactgagccggtttaaggatagcctgggaaacccaacccacatcctgagaatcggcgagagctataaggagaagcagcggaccatccaggccaagaaggaggtggagcagcggagagccggcggctacagccggaagtacgccagcaaagccaagaatctggcagacgatatggtgagaaacaccgctagagatctgctgtactacgccgtgacccaggatgccatgctgatcttcgccaacctgagccggggcttcggccggcagggcaagcggaccttcatggccgagagacagtacacacggatggaggactggctgaccgccaagctggcctacgagggcctgagcaagacctacctgtccaagacactggcccagtacacctccaagacatgcagcaactgtgggtttaccatcaccagcgccgactacgacagggtgctggagaagctgaagaagacagcaacaggctggatgaccacaattaacggcaaggagctgaaggtggagggccagattacctactacaacagatacaagagacagaacgtagtcaaggacctgtccgtcgagctggatagactgagcgaagaatctgtgaacaacgacatctcctcctggacaaagggcagaagcggagaagctctgagcctcctgaagaaaagattctcccatagacccgtgcaggagaagttcgtgtgcctgaactgcggcttcgagacacacgcagccgagcaagccgccctgaacatcgccagatcctggctgttcctgcggagccaggagtacaagaaataccagacaaacaagacaaccggcaacaccgataagagagccttcgtcgagacctggcagtccttttaccggaagaagcttaaggaggtgtggaaacctgccgtgcggtctggcggatctggcggaggctccaccagccccaagaaaaagagaaaagtctaagctgccttctgcggggcttgccttctggccatgcccttcttctctcccttgcacctgtacctcttggtctttgaataaagcctgagtaggaaggctagcaaaaaaaaaaaaaaaaaaaaaaaaaaaaaaaaaaaaaaaaaaaaaaaaaaaaaaaaaaaaaaaaaaaaaaaaaaaaaaaa

SEQ ID NO: 13271 - RNA, 5785 nt, synthetic construct
  source 1..5785: mol_type = other RNA
aggaaataagagagaaaagaagagtaagaagaaatataagagccaccatggcccctaagaagaagcgtaaagtgagccggatggaacgcctcgtctacgaggtgcggcagaagtgcagaaacatcgaggacatctgcatctcctgcggatctctgaacgtgaccctggagcacccactgttcatcggcggcatgtgccagaactgtaaaaactgttttctggagtgtgcctatcaatacgacgatgacggctaccagagctactgcaccatctgttgcggcggaagagaggtgctgatgtgtggaaataacaactgctgccggtgcttctgcgtggaatgcgtggacctgctggtgggccccggcgccgcccaggccgctattaaggaagatccttggaactgctacatgtgcggccacaagggcacatacggcctgctgagacggagagaggactggcctagcagactgcagatgttcttcgccaataaccacgaccaggagttcgacccccctaaggtgtaccctcccgtccccgccgagaagagaaagcccatccgggtcctgagcctgttcgatggcatcgccaccggtctgctggtgctgaaggacctgggcatccaggtggataggtacattgcctccgaggtgtgcgaggactccatcaccgtgggaatggtgcgtcatcagggcaagatcatgtacgtgggcgacgtgcggagcgtgacacagaagcatatccaggagtggggccctttcgacctggtgatcggcggcagcccttgcaatgacctgagcatcgtgaacccagcccggaagggcctgtacgagggaaccggcagactgttcttcgagttttacagactgctgcacgacgcccggcctaaggaaggcgacgaccggcccttcttttggctgttcgagaatgtggtggccatgggagtcagcgacaagcgggatattagccggttcctggagagcaaccccgtgatgatcgatgccaaggaagtgagcgccgcccaccgggccagatacttctggggcaatctgcctggcatgaacagacccctggccagcaccgtgaacgacaagctggagctgcaggagtgcctggagcacggccggatcgccaagttcagcaaggtgagaaccatcaccacccgaagcaacagcatcaaacaaggcaaggaccagcactttcctgtgttcatgaacgagaaggaggacatcctgtggtgtaccgagatggagagagtgttcgggttcccagtccactacacagatgtcagcaacatgtctagactggccagacagagactgctgggaagaagctggtccgtccctgtgatcagacacctgttcgcccctctgaaggagtacttcgcctgcgtgagcagcggcaacagcaacgccaacagccggggccccagcttctctagcggcctggtgccactgtccctgagagggagccacatgggccccatggagatctacaaaaccgtgagcgcctggaagcggcagcctgtgcgcgtgctgagcctgtttcggaatatcgataaagtcctgaaaagcctgggattcctggagagcggctctggctccggcggtggcaccctgaagtacgtggaggatgtgacaaacgtggtcagacgggatgtggagaagtggggccccttcgatctggtgtacggcagcacccaacccctgggcagctcttgtgaccggtgccctggctggtacatgtttcagttccaccggatcctgcagtacgccctgccgagacaggagtcccagcggccattcttttggattttcatggacaacttgctgctgaccgaggatgaccaggaaactaccactcggttcctgcagaccgaagccgtgaccctgcaggacgtgagaggccgggactaccagaacgccatgcgggtgtggtccaacatccctggactgaaaagcaagcacgcacctctgacccctaaagaagaggagtacctgcaggcccaggtgcggagcagaagcaagctggacgcccctaaggtggatctgctggtgaagaattgcctcctgcccctgagagagtacttcaagtatttcagccagaatagtctgcccctgggaggcagcggcggcggccagatgaggctgaggttcgaggacatcagcgtgagcttcagccaggaggagtgggcctacctggacgaggagcagaaggagctgtacagggaggtgatgagggacaactaccagaccctgatcagcctgggcgtgggcttcagcagcgtgacccccgacatcatcagcaggatcgagcagggcgaggagccctacgtgagggacgagcccggcagcgaggagagggagaccggcaggagcagcggcggcccaagcagcggcgcccctcctcccagcggcggcagcccagccggctccccaacctctaccgaggagggcacctctgagtccgccacccccgagagcggccctggcacctccaccgagcccagcgagggcagcgcacccggcagccctgccggcagccccacctccacagaggagggaaccagcaccgagcccagcgaaggcagcgccccaggcaccagcaccgagcctagtgagcaggagattaaacggatcaacaagatcagaagaagacttgtgaaagacagcaacaccaagaaggccggcaagacaggccccatgaaaaccctgctggttagagtgatgacacccgatctgagagagcggctggaaaacctgagaaagaagcctgaaaatatcccccagcccatcagcaatacatctagagccaacctgaataagctgctgaccgattacaccgaaatgaagaaggcgatcctgcatgtgtactgggaagagttccagaaggaccctgtgggcctgatgagccgggtggcccagcctgccagcaagaagatcgatcagaacaagctgaaacctgagatggacgagaagggcaacctgaccaccgccggctttgcctgctctcagtgtggccagcccctgttcgtgtacaagctggagcaggtgtctgagaagggcaaggcttacaccaactacttcggacggtgcaatgtggccgagcacgaaaagctgatcctgctggcccagctgaagcccgagaaggatagcgacgaagccgtgacatatagcctgggaaagtttgggcagagggccctggatttctacagcattcatgtgaccaaggagtccacccaccccgtgaagcccctggcccagatcgccggaaacagatacgcctccggacctgtgggaaaggccctgagcgacgcatgtatgggcacaatcgcctccttcctgtctaagtaccaggacatcatcatcgaacaccagaaggtggtgaagggcaaccagaagagactggagagcctgcgggagctggccggcaaggaaaacctggaataccctagcgtgaccctgccacctcagcctcacaccaaggagggcgttgatgcctacaacgaagtgatcgcccgggtgcgaatgtgggtgaacctgaacctgtggcagaagctgaagctaagcagagatgatgccaagcctctgctgagactgaagggattcccttcctttcctctggtcgagagacaggccaacgaagtggactggtgggacatggtgtgtaacgtgaagaagctgatcaacgagaaaaaggaggatggcaaggtgttttggcagaatctggctggctacaagagacaggaagccctgagaccatacctgagcagcgaggaagatcggaagaagggaaagaaattcgctcggtaccagctgggcgacctgctgctgcacctggaaaagaagcacggcgaggactggggaaaggtgtacgacgaggcctgggagcggattgacaagaaagtggaaggcctgagcaagcacatcaagctggaagaggaacggagaagcgaggacgcccagagcaaggccgccctgaccgactggctgcgggctaaggccagcttcgtgatcgagggcctgaaggaggccgacaaggacgagttctgcagatgcgagctgaagctgcagaagtggtacggggacctgcggggaaagcccttcgccatcgaagccgagaacagcatcctggacatcagcggcttcagcaagcagtacaactgtgccttcatctggcagaaggacggcgtgaagaagctgaacctgtacctgatcatcaactacttcaagggcggcaagctgcggttcaagaagatcaaacctgaagccttcgaagccaacagattctacaccgtgatcaacaaaaagagcggcgagatcgtgcccatggaggtgaacttcaacttcgacgaccccaacctgatcatcctgcctctggcctttggcaagagacagggcagagaattcatctggaacgacctgctgtccctggaaaccggcagcctgaagctggccaacggaagagtgatcgagaagacactgtacaacagaagaacccggcaggatgagcctgccctgttcgtggccctgaccttcgagcggcgggaggtcctggactcctccaatatcaaaccaatgaacctgatcggcgtggcaagaggcgaaaacatccccgccgtgatcgccctgaccgaccccgagggctgcccactgagccggtttaaggatagcctgggaaacccaacccacatcctgagaatcggcgagagctataaggagaagcagcggaccatccaggccaagaaggaggtggagcagcggagagccggcggctacagccggaagtacgccagcaaagccaagaatctggcagacgatatggtgagaaacaccgctagagatctgctgtactacgccgtgacccaggatgccatgctgatcttcgccaacctgagccggggcttcggccggcagggcaagcggaccttcatggccgagagacagtacacacggatggaggactggctgaccgccaagctggcctacgagggcctgagcaagacctacctgtccaagacactggcccagtacacctccaagacatgcagcaactgtgggtttaccatcaccagcgccgactacgacagggtgctggagaagctgaagaagacagcaacaggctggatgaccacaattaacggcaaggagctgaaggtggagggccagattacctactacaacagatacaagagacagaacgtagtcaaggacctgtccgtcgagctggatagactgagcgaagaatctgtgaacaacgacatctcctcctggacaaagggcagaagcggagaagctctgagcctcctgaagaaaagattctcccatagacccgtgcaggagaagttcgtgtgcctgaactgcggcttcgagacacacgcagccgagcaagccgccctgaacatcgccagatcctggctgttcctgcggagccaggagtacaagaaataccagacaaacaagacaaccggcaacaccgataagagagccttcgtcgagacctggcagtccttttaccggaagaagcttaaggaggtgtggaaacctgccgtgcggtctggcggatctggcggaggctccaccagccccaagaaaaagagaaaagtctaagctgccttctgcggggcttgccttctggccatgcccttcttctctcccttgcacctgtacctcttggtctttgaataaagcctgagtaggaaggctagcaaaaaaaaaaaaaaaaaaaaaaaaaaaaaaaaaaaaaaaaaaaaaaaaaaaaaaaaaaaaaaaaaaaaaaaaaaaaaaaa

SEQ ID NO: 13272 - RNA, 5785 nt, synthetic construct
  source 1..5785: mol_type = other RNA
aggaaataagagagaaaagaagagtaagaagaaatataagagccaccatggcccctaagaagaagcgtaaagtgagccggatggaacgcctcgtctacgaggtgcggcagaagtgcagaaacatcgaggacatctgcatctcctgcggatctctgaacgtgaccctggagcacccactgttcatcggcggcatgtgccagaactgtaaaaactgttttctggagtgtgcctatcaatacgacgatgacggctaccagagctactgcaccatctgttgcggcggaagagaggtgctgatgtgtggaaataacaactgctgccggtgcttctgcgtggaatgcgtggacctgctggtgggccccggcgccgcccaggccgctattaaggaagatccttggaactgctacatgtgcggccacaagggcacatacggcctgctgagacggagagaggactggcctagcagactgcagatgttcttcgccaataaccacgaccaggagttcgacccccctaaggtgtaccctcccgtccccgccgagaagagaaagcccatccgggtcctgagcctgttcgatggcatcgccaccggtctgctggtgctgaaggacctgggcatccaggtggataggtacattgcctccgaggtgtgcgaggactccatcaccgtgggaatggtgcgtcatcagggcaagatcatgtacgtgggcgacgtgcggagcgtgacacagaagcatatccaggagtggggccctttcgacctggtgatcggcggcagcccttgcaatgacctgagcatcgtgaacccagcccggaagggcctgtacgagggaaccggcagactgttcttcgagttttacagactgctgcacgacgcccggcctaaggaaggcgacgaccggcccttcttttggctgttcgagaatgtggtggccatgggagtcagcgacaagcgggatattagccggttcctggagagcaaccccgtgatgatcgatgccaaggaagtgagcgccgcccaccgggccagatacttctggggcaatctgcctggcatgaacagacccctggccagcaccgtgaacgacaagctggagctgcaggagtgcctggagcacggccggatcgccaagttcagcaaggtgagaaccatcaccacccgaagcaacagcatcaaacaaggcaaggaccagcactttcctgtgttcatgaacgagaaggaggacatcctgtggtgtaccgagatggagagagtgttcgggttcccagtccactacacagatgtcagcaacatgtctagactggccagacagagactgctgggaagaagctggtccgtccctgtgatcagacacctgttcgcccctctgaaggagtacttcgcctgcgtgagcagcggcaacagcaacgccaacagccggggccccagcttctctagcggcctggtgccactgtccctgagagggagccacatgggccccatggagatctacaaaaccgtgagcgcctggaagcggcagcctgtgcgcgtgctgagcctgtttcggaatatcgataaagtcctgaaaagcctgggattcctggagagcggctctggctccggcggtggcaccctgaagtacgtggaggatgtgacaaacgtggtcagacgggatgtggagaagtggggccccttcgatctggtgtacggcagcacccaacccctgggcagctcttgtgaccggtgccctggctggtacatgtttcagttccaccggatcctgcagtacgccctgccgagacaggagtcccagcggccattcttttggattttcatggacaacttgctgctgaccgaggatgaccaggaaactaccactcggttcctgcagaccgaagccgtgaccctgcaggacgtgagaggccgggactaccagaacgccatgcgggtgtggtccaacatccctggactgaaaagcaagcacgcacctctgacccctaaagaagaggagtacctgcaggcccaggtgcggagcagaagcaagctggacgcccctaaggtggatctgctggtgaagaattgcctcctgcccctgagagagtacttcaagtatttcagccagaatagtctgcccctgggaggcagcggcggcggcgtgaccttcgaggacgtggccgtgaacttcagcagggaggagtgggccctgctggaccccccccagaggaagctgtacagggacgtgatgtgggagaccctgaggcacctggccgccgtggacgaccagcagagcgaggacgagttcaggaacttccagaagagggtgaggagcgaggaggtggagaaggccagccagtacaccctgtggtaccagcacggcgagatggacagcaggacccccggcggcccaagcagcggcgcccctcctcccagcggcggcagcccagccggctccccaacctctaccgaggagggcacctctgagtccgccacccccgagagcggccctggcacctccaccgagcccagcgagggcagcgcacccggcagccctgccggcagccccacctccacagaggagggaaccagcaccgagcccagcgaaggcagcgccccaggcaccagcaccgagcctagtgagcaggagattaaacggatcaacaagatcagaagaagacttgtgaaagacagcaacaccaagaaggccggcaagacaggccccatgaaaaccctgctggttagagtgatgacacccgatctgagagagcggctggaaaacctgagaaagaagcctgaaaatatcccccagcccatcagcaatacatctagagccaacctgaataagctgctgaccgattacaccgaaatgaagaaggcgatcctgcatgtgtactgggaagagttccagaaggaccctgtgggcctgatgagccgggtggcccagcctgccagcaagaagatcgatcagaacaagctgaaacctgagatggacgagaagggcaacctgaccaccgccggctttgcctgctctcagtgtggccagcccctgttcgtgtacaagctggagcaggtgtctgagaagggcaaggcttacaccaactacttcggacggtgcaatgtggccgagcacgaaaagctgatcctgctggcccagctgaagcccgagaaggatagcgacgaagccgtgacatatagcctgggaaagtttgggcagagggccctggatttctacagcattcatgtgaccaaggagtccacccaccccgtgaagcccctggcccagatcgccggaaacagatacgcctccggacctgtgggaaaggccctgagcgacgcatgtatgggcacaatcgcctccttcctgtctaagtaccaggacatcatcatcgaacaccagaaggtggtgaagggcaaccagaagagactggagagcctgcgggagctggccggcaaggaaaacctggaataccctagcgtgaccctgccacctcagcctcacaccaaggagggcgttgatgcctacaacgaagtgatcgcccgggtgcgaatgtgggtgaacctgaacctgtggcagaagctgaagctaagcagagatgatgccaagcctctgctgagactgaagggattcccttcctttcctctggtcgagagacaggccaacgaagtggactggtgggacatggtgtgtaacgtgaagaagctgatcaacgagaaaaaggaggatggcaaggtgttttggcagaatctggctggctacaagagacaggaagccctgagaccatacctgagcagcgaggaagatcggaagaagggaaagaaattcgctcggtaccagctgggcgacctgctgctgcacctggaaaagaagcacggcgaggactggggaaaggtgtacgacgaggcctgggagcggattgacaagaaagtggaaggcctgagcaagcacatcaagctggaagaggaacggagaagcgaggacgcccagagcaaggccgccctgaccgactggctgcgggctaaggccagcttcgtgatcgagggcctgaaggaggccgacaaggacgagttctgcagatgcgagctgaagctgcagaagtggtacggggacctgcggggaaagcccttcgccatcgaagccgagaacagcatcctggacatcagcggcttcagcaagcagtacaactgtgccttcatctggcagaaggacggcgtgaagaagctgaacctgtacctgatcatcaactacttcaagggcggcaagctgcggttcaagaagatcaaacctgaagccttcgaagccaacagattctacaccgtgatcaacaaaaagagcggcgagatcgtgcccatggaggtgaacttcaacttcgacgaccccaacctgatcatcctgcctctggcctttggcaagagacagggcagagaattcatctggaacgacctgctgtccctggaaaccggcagcctgaagctggccaacggaagagtgatcgagaagacactgtacaacagaagaacccggcaggatgagcctgccctgttcgtggccctgaccttcgagcggcgggaggtcctggactcctccaatatcaaaccaatgaacctgatcggcgtggcaagaggcgaaaacatccccgccgtgatcgccctgaccgaccccgagggctgcccactgagccggtttaaggatagcctgggaaacccaacccacatcctgagaatcggcgagagctataaggagaagcagcggaccatccaggccaagaaggaggtggagcagcggagagccggcggctacagccggaagtacgccagcaaagccaagaatctggcagacgatatggtgagaaacaccgctagagatctgctgtactacgccgtgacccaggatgccatgctgatcttcgccaacctgagccggggcttcggccggcagggcaagcggaccttcatggccgagagacagtacacacggatggaggactggctgaccgccaagctggcctacgagggcctgagcaagacctacctgtccaagacactggcccagtacacctccaagacatgcagcaactgtgggtttaccatcaccagcgccgactacgacagggtgctggagaagctgaagaagacagcaacaggctggatgaccacaattaacggcaaggagctgaaggtggagggccagattacctactacaacagatacaagagacagaacgtagtcaaggacctgtccgtcgagctggatagactgagcgaagaatctgtgaacaacgacatctcctcctggacaaagggcagaagcggagaagctctgagcctcctgaagaaaagattctcccatagacccgtgcaggagaagttcgtgtgcctgaactgcggcttcgagacacacgcagccgagcaagccgccctgaacatcgccagatcctggctgttcctgcggagccaggagtacaagaaataccagacaaacaagacaaccggcaacaccgataagagagccttcgtcgagacctggcagtccttttaccggaagaagcttaaggaggtgtggaaacctgccgtgcggtctggcggatctggcggaggctccaccagccccaagaaaaagagaaaagtctaagctgccttctgcggggcttgccttctggccatgcccttcttctctcccttgcacctgtacctcttggtctttgaataaagcctgagtaggaaggctagcaaaaaaaaaaaaaaaaaaaaaaaaaaaaaaaaaaaaaaaaaaaaaaaaaaaaaaaaaaaaaaaaaaaaaaaaaaaaaaaa

SEQ ID NO: 13273 - RNA, 5785 nt, synthetic construct
  source 1..5785: mol_type = other RNA
aggaaataagagagaaaagaagagtaagaagaaatataagagccaccatggcccctaagaagaagcgtaaagtgagccggatggaacgcctcgtctacgaggtgcggcagaagtgcagaaacatcgaggacatctgcatctcctgcggatctctgaacgtgaccctggagcacccactgttcatcggcggcatgtgccagaactgtaaaaactgttttctggagtgtgcctatcaatacgacgatgacggctaccagagctactgcaccatctgttgcggcggaagagaggtgctgatgtgtggaaataacaactgctgccggtgcttctgcgtggaatgcgtggacctgctggtgggccccggcgccgcccaggccgctattaaggaagatccttggaactgctacatgtgcggccacaagggcacatacggcctgctgagacggagagaggactggcctagcagactgcagatgttcttcgccaataaccacgaccaggagttcgacccccctaaggtgtaccctcccgtccccgccgagaagagaaagcccatccgggtcctgagcctgttcgatggcatcgccaccggtctgctggtgctgaaggacctgggcatccaggtggataggtacattgcctccgaggtgtgcgaggactccatcaccgtgggaatggtgcgtcatcagggcaagatcatgtacgtgggcgacgtgcggagcgtgacacagaagcatatccaggagtggggccctttcgacctggtgatcggcggcagcccttgcaatgacctgagcatcgtgaacccagcccggaagggcctgtacgagggaaccggcagactgttcttcgagttttacagactgctgcacgacgcccggcctaaggaaggcgacgaccggcccttcttttggctgttcgagaatgtggtggccatgggagtcagcgacaagcgggatattagccggttcctggagagcaaccccgtgatgatcgatgccaaggaagtgagcgccgcccaccgggccagatacttctggggcaatctgcctggcatgaacagacccctggccagcaccgtgaacgacaagctggagctgcaggagtgcctggagcacggccggatcgccaagttcagcaaggtgagaaccatcaccacccgaagcaacagcatcaaacaaggcaaggaccagcactttcctgtgttcatgaacgagaaggaggacatcctgtggtgtaccgagatggagagagtgttcgggttcccagtccactacacagatgtcagcaacatgtctagactggccagacagagactgctgggaagaagctggtccgtccctgtgatcagacacctgttcgcccctctgaaggagtacttcgcctgcgtgagcagcggcaacagcaacgccaacagccggggccccagcttctctagcggcctggtgccactgtccctgagagggagccacatgggccccatggagatctacaaaaccgtgagcgcctggaagcggcagcctgtgcgcgtgctgagcctgtttcggaatatcgataaagtcctgaaaagcctgggattcctggagagcggctctggctccggcggtggcaccctgaagtacgtggaggatgtgacaaacgtggtcagacgggatgtggagaagtggggccccttcgatctggtgtacggcagcacccaacccctgggcagctcttgtgaccggtgccctggctggtacatgtttcagttccaccggatcctgcagtacgccctgccgagacaggagtcccagcggccattcttttggattttcatggacaacttgctgctgaccgaggatgaccaggaaactaccactcggttcctgcagaccgaagccgtgaccctgcaggacgtgagaggccgggactaccagaacgccatgcgggtgtggtccaacatccctggactgaaaagcaagcacgcacctctgacccctaaagaagaggagtacctgcaggcccaggtgcggagcagaagcaagctggacgcccctaaggtggatctgctggtgaagaattgcctcctgcccctgagagagtacttcaagtatttcagccagaatagtctgcccctgggaggcagcggcggcggcgcccagggcctgatggccttcgaggacgtggccgtgtacttcagcagggaggagtggggcctgctggacgccgcccagagggccctgtacaggagggtgatgctggagaacttcaccctgctggccagcctgggcctgagcgtgagcaggccccacgtggtgatccagctggagtgcggcaaggagccctgggtgctgaacggcaccgacgtgaccctggccaggaacgcccagaggaggcccggcggcccaagcagcggcgcccctcctcccagcggcggcagcccagccggctccccaacctctaccgaggagggcacctctgagtccgccacccccgagagcggccctggcacctccaccgagcccagcgagggcagcgcacccggcagccctgccggcagccccacctccacagaggagggaaccagcaccgagcccagcgaaggcagcgccccaggcaccagcaccgagcctagtgagcaggagattaaacggatcaacaagatcagaagaagacttgtgaaagacagcaacaccaagaaggccggcaagacaggccccatgaaaaccctgctggttagagtgatgacacccgatctgagagagcggctggaaaacctgagaaagaagcctgaaaatatcccccagcccatcagcaatacatctagagccaacctgaataagctgctgaccgattacaccgaaatgaagaaggcgatcctgcatgtgtactgggaagagttccagaaggaccctgtgggcctgatgagccgggtggcccagcctgccagcaagaagatcgatcagaacaagctgaaacctgagatggacgagaagggcaacctgaccaccgccggctttgcctgctctcagtgtggccagcccctgttcgtgtacaagctggagcaggtgtctgagaagggcaaggcttacaccaactacttcggacggtgcaatgtggccgagcacgaaaagctgatcctgctggcccagctgaagcccgagaaggatagcgacgaagccgtgacatatagcctgggaaagtttgggcagagggccctggatttctacagcattcatgtgaccaaggagtccacccaccccgtgaagcccctggcccagatcgccggaaacagatacgcctccggacctgtgggaaaggccctgagcgacgcatgtatgggcacaatcgcctccttcctgtctaagtaccaggacatcatcatcgaacaccagaaggtggtgaagggcaaccagaagagactggagagcctgcgggagctggccggcaaggaaaacctggaataccctagcgtgaccctgccacctcagcctcacaccaaggagggcgttgatgcctacaacgaagtgatcgcccgggtgcgaatgtgggtgaacctgaacctgtggcagaagctgaagctaagcagagatgatgccaagcctctgctgagactgaagggattcccttcctttcctctggtcgagagacaggccaacgaagtggactggtgggacatggtgtgtaacgtgaagaagctgatcaacgagaaaaaggaggatggcaaggtgttttggcagaatctggctggctacaagagacaggaagccctgagaccatacctgagcagcgaggaagatcggaagaagggaaagaaattcgctcggtaccagctgggcgacctgctgctgcacctggaaaagaagcacggcgaggactggggaaaggtgtacgacgaggcctgggagcggattgacaagaaagtggaaggcctgagcaagcacatcaagctggaagaggaacggagaagcgaggacgcccagagcaaggccgccctgaccgactggctgcgggctaaggccagcttcgtgatcgagggcctgaaggaggccgacaaggacgagttctgcagatgcgagctgaagctgcagaagtggtacggggacctgcggggaaagcccttcgccatcgaagccgagaacagcatcctggacatcagcggcttcagcaagcagtacaactgtgccttcatctggcagaaggacggcgtgaagaagctgaacctgtacctgatcatcaactacttcaagggcggcaagctgcggttcaagaagatcaaacctgaagccttcgaagccaacagattctacaccgtgatcaacaaaaagagcggcgagatcgtgcccatggaggtgaacttcaacttcgacgaccccaacctgatcatcctgcctctggcctttggcaagagacagggcagagaattcatctggaacgacctgctgtccctggaaaccggcagcctgaagctggccaacggaagagtgatcgagaagacactgtacaacagaagaacccggcaggatgagcctgccctgttcgtggccctgaccttcgagcggcgggaggtcctggactcctccaatatcaaaccaatgaacctgatcggcgtggcaagaggcgaaaacatccccgccgtgatcgccctgaccgaccccgagggctgcccactgagccggtttaaggatagcctgggaaacccaacccacatcctgagaatcggcgagagctataaggagaagcagcggaccatccaggccaagaaggaggtggagcagcggagagccggcggctacagccggaagtacgccagcaaagccaagaatctggcagacgatatggtgagaaacaccgctagagatctgctgtactacgccgtgacccaggatgccatgctgatcttcgccaacctgagccggggcttcggccggcagggcaagcggaccttcatggccgagagacagtacacacggatggaggactggctgaccgccaagctggcctacgagggcctgagcaagacctacctgtccaagacactggcccagtacacctccaagacatgcagcaactgtgggtttaccatcaccagcgccgactacgacagggtgctggagaagctgaagaagacagcaacaggctggatgaccacaattaacggcaaggagctgaaggtggagggccagattacctactacaacagatacaagagacagaacgtagtcaaggacctgtccgtcgagctggatagactgagcgaagaatctgtgaacaacgacatctcctcctggacaaagggcagaagcggagaagctctgagcctcctgaagaaaagattctcccatagacccgtgcaggagaagttcgtgtgcctgaactgcggcttcgagacacacgcagccgagcaagccgccctgaacatcgccagatcctggctgttcctgcggagccaggagtacaagaaataccagacaaacaagacaaccggcaacaccgataagagagccttcgtcgagacctggcagtccttttaccggaagaagcttaaggaggtgtggaaacctgccgtgcggtctggcggatctggcggaggctccaccagccccaagaaaaagagaaaagtctaagctgccttctgcggggcttgccttctggccatgcccttcttctctcccttgcacctgtacctcttggtctttgaataaagcctgagtaggaaggctagcaaaaaaaaaaaaaaaaaaaaaaaaaaaaaaaaaaaaaaaaaaaaaaaaaaaaaaaaaaaaaaaaaaaaaaaaaaaaaaaa

SEQ ID NO: 13274 - RNA, 5785 nt, synthetic construct
  source 1..5785: mol_type = other RNA
aggaaataagagagaaaagaagagtaagaagaaatataagagccaccatggcccctaagaagaagcgtaaagtgagccggatggaacgcctcgtctacgaggtgcggcagaagtgcagaaacatcgaggacatctgcatctcctgcggatctctgaacgtgaccctggagcacccactgttcatcggcggcatgtgccagaactgtaaaaactgttttctggagtgtgcctatcaatacgacgatgacggctaccagagctactgcaccatctgttgcggcggaagagaggtgctgatgtgtggaaataacaactgctgccggtgcttctgcgtggaatgcgtggacctgctggtgggccccggcgccgcccaggccgctattaaggaagatccttggaactgctacatgtgcggccacaagggcacatacggcctgctgagacggagagaggactggcctagcagactgcagatgttcttcgccaataaccacgaccaggagttcgacccccctaaggtgtaccctcccgtccccgccgagaagagaaagcccatccgggtcctgagcctgttcgatggcatcgccaccggtctgctggtgctgaaggacctgggcatccaggtggataggtacattgcctccgaggtgtgcgaggactccatcaccgtgggaatggtgcgtcatcagggcaagatcatgtacgtgggcgacgtgcggagcgtgacacagaagcatatccaggagtggggccctttcgacctggtgatcggcggcagcccttgcaatgacctgagcatcgtgaacccagcccggaagggcctgtacgagggaaccggcagactgttcttcgagttttacagactgctgcacgacgcccggcctaaggaaggcgacgaccggcccttcttttggctgttcgagaatgtggtggccatgggagtcagcgacaagcgggatattagccggttcctggagagcaaccccgtgatgatcgatgccaaggaagtgagcgccgcccaccgggccagatacttctggggcaatctgcctggcatgaacagacccctggccagcaccgtgaacgacaagctggagctgcaggagtgcctggagcacggccggatcgccaagttcagcaaggtgagaaccatcaccacccgaagcaacagcatcaaacaaggcaaggaccagcactttcctgtgttcatgaacgagaaggaggacatcctgtggtgtaccgagatggagagagtgttcgggttcccagtccactacacagatgtcagcaacatgtctagactggccagacagagactgctgggaagaagctggtccgtccctgtgatcagacacctgttcgcccctctgaaggagtacttcgcctgcgtgagcagcggcaacagcaacgccaacagccggggccccagcttctctagcggcctggtgccactgtccctgagagggagccacatgggccccatggagatctacaaaaccgtgagcgcctggaagcggcagcctgtgcgcgtgctgagcctgtttcggaatatcgataaagtcctgaaaagcctgggattcctggagagcggctctggctccggcggtggcaccctgaagtacgtggaggatgtgacaaacgtggtcagacgggatgtggagaagtggggccccttcgatctggtgtacggcagcacccaacccctgggcagctcttgtgaccggtgccctggctggtacatgtttcagttccaccggatcctgcagtacgccctgccgagacaggagtcccagcggccattcttttggattttcatggacaacttgctgctgaccgaggatgaccaggaaactaccactcggttcctgcagaccgaagccgtgaccctgcaggacgtgagaggccgggactaccagaacgccatgcgggtgtggtccaacatccctggactgaaaagcaagcacgcacctctgacccctaaagaagaggagtacctgcaggcccaggtgcggagcagaagcaagctggacgcccctaaggtggatctgctggtgaagaattgcctcctgcccctgagagagtacttcaagtatttcagccagaatagtctgcccctgggaggcagcggcggcggccccgagaccgtggtgagcttcgaggacgtggccgtgaggttcagccccgacgagtggcacctgctggacgacggccagaggaggctgtacagggacgtgctgagggagaactacagccacgtgaggagcctgggcttccccgtgcccgacctggccgtgatcttcaggatggagaggggcgaggagccctggccccccggcctgcccgccggcaccaagagcgacgaccaggaggaggagaggggcggcccaagcagcggcgcccctcctcccagcggcggcagcccagccggctccccaacctctaccgaggagggcacctctgagtccgccacccccgagagcggccctggcacctccaccgagcccagcgagggcagcgcacccggcagccctgccggcagccccacctccacagaggagggaaccagcaccgagcccagcgaaggcagcgccccaggcaccagcaccgagcctagtgagcaggagattaaacggatcaacaagatcagaagaagacttgtgaaagacagcaacaccaagaaggccggcaagacaggccccatgaaaaccctgctggttagagtgatgacacccgatctgagagagcggctggaaaacctgagaaagaagcctgaaaatatcccccagcccatcagcaatacatctagagccaacctgaataagctgctgaccgattacaccgaaatgaagaaggcgatcctgcatgtgtactgggaagagttccagaaggaccctgtgggcctgatgagccgggtggcccagcctgccagcaagaagatcgatcagaacaagctgaaacctgagatggacgagaagggcaacctgaccaccgccggctttgcctgctctcagtgtggccagcccctgttcgtgtacaagctggagcaggtgtctgagaagggcaaggcttacaccaactacttcggacggtgcaatgtggccgagcacgaaaagctgatcctgctggcccagctgaagcccgagaaggatagcgacgaagccgtgacatatagcctgggaaagtttgggcagagggccctggatttctacagcattcatgtgaccaaggagtccacccaccccgtgaagcccctggcccagatcgccggaaacagatacgcctccggacctgtgggaaaggccctgagcgacgcatgtatgggcacaatcgcctccttcctgtctaagtaccaggacatcatcatcgaacaccagaaggtggtgaagggcaaccagaagagactggagagcctgcgggagctggccggcaaggaaaacctggaataccctagcgtgaccctgccacctcagcctcacaccaaggagggcgttgatgcctacaacgaagtgatcgcccgggtgcgaatgtgggtgaacctgaacctgtggcagaagctgaagctaagcagagatgatgccaagcctctgctgagactgaagggattcccttcctttcctctggtcgagagacaggccaacgaagtggactggtgggacatggtgtgtaacgtgaagaagctgatcaacgagaaaaaggaggatggcaaggtgttttggcagaatctggctggctacaagagacaggaagccctgagaccatacctgagcagcgaggaagatcggaagaagggaaagaaattcgctcggtaccagctgggcgacctgctgctgcacctggaaaagaagcacggcgaggactggggaaaggtgtacgacgaggcctgggagcggattgacaagaaagtggaaggcctgagcaagcacatcaagctggaagaggaacggagaagcgaggacgcccagagcaaggccgccctgaccgactggctgcgggctaaggccagcttcgtgatcgagggcctgaaggaggccgacaaggacgagttctgcagatgcgagctgaagctgcagaagtggtacggggacctgcggggaaagcccttcgccatcgaagccgagaacagcatcctggacatcagcggcttcagcaagcagtacaactgtgccttcatctggcagaaggacggcgtgaagaagctgaacctgtacctgatcatcaactacttcaagggcggcaagctgcggttcaagaagatcaaacctgaagccttcgaagccaacagattctacaccgtgatcaacaaaaagagcggcgagatcgtgcccatggaggtgaacttcaacttcgacgaccccaacctgatcatcctgcctctggcctttggcaagagacagggcagagaattcatctggaacgacctgctgtccctggaaaccggcagcctgaagctggccaacggaagagtgatcgagaagacactgtacaacagaagaacccggcaggatgagcctgccctgttcgtggccctgaccttcgagcggcgggaggtcctggactcctccaatatcaaaccaatgaacctgatcggcgtggcaagaggcgaaaacatccccgccgtgatcgccctgaccgaccccgagggctgcccactgagccggtttaaggatagcctgggaaacccaacccacatcctgagaatcggcgagagctataaggagaagcagcggaccatccaggccaagaaggaggtggagcagcggagagccggcggctacagccggaagtacgccagcaaagccaagaatctggcagacgatatggtgagaaacaccgctagagatctgctgtactacgccgtgacccaggatgccatgctgatcttcgccaacctgagccggggcttcggccggcagggcaagcggaccttcatggccgagagacagtacacacggatggaggactggctgaccgccaagctggcctacgagggcctgagcaagacctacctgtccaagacactggcccagtacacctccaagacatgcagcaactgtgggtttaccatcaccagcgccgactacgacagggtgctggagaagctgaagaagacagcaacaggctggatgaccacaattaacggcaaggagctgaaggtggagggccagattacctactacaacagatacaagagacagaacgtagtcaaggacctgtccgtcgagctggatagactgagcgaagaatctgtgaacaacgacatctcctcctggacaaagggcagaagcggagaagctctgagcctcctgaagaaaagattctcccatagacccgtgcaggagaagttcgtgtgcctgaactgcggcttcgagacacacgcagccgagcaagccgccctgaacatcgccagatcctggctgttcctgcggagccaggagtacaagaaataccagacaaacaagacaaccggcaacaccgataagagagccttcgtcgagacctggcagtccttttaccggaagaagcttaaggaggtgtggaaacctgccgtgcggtctggcggatctggcggaggctccaccagccccaagaaaaagagaaaagtctaagctgccttctgcggggcttgccttctggccatgcccttcttctctcccttgcacctgtacctcttggtctttgaataaagcctgagtaggaaggctagcaaaaaaaaaaaaaaaaaaaaaaaaaaaaaaaaaaaaaaaaaaaaaaaaaaaaaaaaaaaaaaaaaaaaaaaaaaaaaaaa

SEQ ID NO: 13275 - RNA, 5785 nt, synthetic construct
  source 1..5785: mol_type = other RNA
aggaaataagagagaaaagaagagtaagaagaaatataagagccaccatggcccctaagaagaagcgtaaagtgagccggatggaacgcctcgtctacgaggtgcggcagaagtgcagaaacatcgaggacatctgcatctcctgcggatctctgaacgtgaccctggagcacccactgttcatcggcggcatgtgccagaactgtaaaaactgttttctggagtgtgcctatcaatacgacgatgacggctaccagagctactgcaccatctgttgcggcggaagagaggtgctgatgtgtggaaataacaactgctgccggtgcttctgcgtggaatgcgtggacctgctggtgggccccggcgccgcccaggccgctattaaggaagatccttggaactgctacatgtgcggccacaagggcacatacggcctgctgagacggagagaggactggcctagcagactgcagatgttcttcgccaataaccacgaccaggagttcgacccccctaaggtgtaccctcccgtccccgccgagaagagaaagcccatccgggtcctgagcctgttcgatggcatcgccaccggtctgctggtgctgaaggacctgggcatccaggtggataggtacattgcctccgaggtgtgcgaggactccatcaccgtgggaatggtgcgtcatcagggcaagatcatgtacgtgggcgacgtgcggagcgtgacacagaagcatatccaggagtggggccctttcgacctggtgatcggcggcagcccttgcaatgacctgagcatcgtgaacccagcccggaagggcctgtacgagggaaccggcagactgttcttcgagttttacagactgctgcacgacgcccggcctaaggaaggcgacgaccggcccttcttttggctgttcgagaatgtggtggccatgggagtcagcgacaagcgggatattagccggttcctggagagcaaccccgtgatgatcgatgccaaggaagtgagcgccgcccaccgggccagatacttctggggcaatctgcctggcatgaacagacccctggccagcaccgtgaacgacaagctggagctgcaggagtgcctggagcacggccggatcgccaagttcagcaaggtgagaaccatcaccacccgaagcaacagcatcaaacaaggcaaggaccagcactttcctgtgttcatgaacgagaaggaggacatcctgtggtgtaccgagatggagagagtgttcgggttcccagtccactacacagatgtcagcaacatgtctagactggccagacagagactgctgggaagaagctggtccgtccctgtgatcagacacctgttcgcccctctgaaggagtacttcgcctgcgtgagcagcggcaacagcaacgccaacagccggggccccagcttctctagcggcctggtgccactgtccctgagagggagccacatgggccccatggagatctacaaaaccgtgagcgcctggaagcggcagcctgtgcgcgtgctgagcctgtttcggaatatcgataaagtcctgaaaagcctgggattcctggagagcggctctggctccggcggtggcaccctgaagtacgtggaggatgtgacaaacgtggtcagacgggatgtggagaagtggggccccttcgatctggtgtacggcagcacccaacccctgggcagctcttgtgaccggtgccctggctggtacatgtttcagttccaccggatcctgcagtacgccctgccgagacaggagtcccagcggccattcttttggattttcatggacaacttgctgctgaccgaggatgaccaggaaactaccactcggttcctgcagaccgaagccgtgaccctgcaggacgtgagaggccgggactaccagaacgccatgcgggtgtggtccaacatccctggactgaaaagcaagcacgcacctctgacccctaaagaagaggagtacctgcaggcccaggtgcggagcagaagcaagctggacgcccctaaggtggatctgctggtgaagaattgcctcctgcccctgagagagtacttcaagtatttcagccagaatagtctgcccctgggaggcagcggcggcggcaggcccagggccgtgaagttcggcgacgtggccctgtacttcagcagggaggagtggggctgcctgaggcccgcccagagggccctgtacagggacgtgatgcaggagacctacggccacctgggcgccctgggctgcgccggccccaagcccgccctgatcagctggctggagaggaacaccgacgactgggagaccgccgccctggacccccaggagtgccccaagggcgtggccgtgcagggcggcccaagcagcggcgcccctcctcccagcggcggcagcccagccggctccccaacctctaccgaggagggcacctctgagtccgccacccccgagagcggccctggcacctccaccgagcccagcgagggcagcgcacccggcagccctgccggcagccccacctccacagaggagggaaccagcaccgagcccagcgaaggcagcgccccaggcaccagcaccgagcctagtgagcaggagattaaacggatcaacaagatcagaagaagacttgtgaaagacagcaacaccaagaaggccggcaagacaggccccatgaaaaccctgctggttagagtgatgacacccgatctgagagagcggctggaaaacctgagaaagaagcctgaaaatatcccccagcccatcagcaatacatctagagccaacctgaataagctgctgaccgattacaccgaaatgaagaaggcgatcctgcatgtgtactgggaagagttccagaaggaccctgtgggcctgatgagccgggtggcccagcctgccagcaagaagatcgatcagaacaagctgaaacctgagatggacgagaagggcaacctgaccaccgccggctttgcctgctctcagtgtggccagcccctgttcgtgtacaagctggagcaggtgtctgagaagggcaaggcttacaccaactacttcggacggtgcaatgtggccgagcacgaaaagctgatcctgctggcccagctgaagcccgagaaggatagcgacgaagccgtgacatatagcctgggaaagtttgggcagagggccctggatttctacagcattcatgtgaccaaggagtccacccaccccgtgaagcccctggcccagatcgccggaaacagatacgcctccggacctgtgggaaaggccctgagcgacgcatgtatgggcacaatcgcctccttcctgtctaagtaccaggacatcatcatcgaacaccagaaggtggtgaagggcaaccagaagagactggagagcctgcgggagctggccggcaaggaaaacctggaataccctagcgtgaccctgccacctcagcctcacaccaaggagggcgttgatgcctacaacgaagtgatcgcccgggtgcgaatgtgggtgaacctgaacctgtggcagaagctgaagctaagcagagatgatgccaagcctctgctgagactgaagggattcccttcctttcctctggtcgagagacaggccaacgaagtggactggtgggacatggtgtgtaacgtgaagaagctgatcaacgagaaaaaggaggatggcaaggtgttttggcagaatctggctggctacaagagacaggaagccctgagaccatacctgagcagcgaggaagatcggaagaagggaaagaaattcgctcggtaccagctgggcgacctgctgctgcacctggaaaagaagcacggcgaggactggggaaaggtgtacgacgaggcctgggagcggattgacaagaaagtggaaggcctgagcaagcacatcaagctggaagaggaacggagaagcgaggacgcccagagcaaggccgccctgaccgactggctgcgggctaaggccagcttcgtgatcgagggcctgaaggaggccgacaaggacgagttctgcagatgcgagctgaagctgcagaagtggtacggggacctgcggggaaagcccttcgccatcgaagccgagaacagcatcctggacatcagcggcttcagcaagcagtacaactgtgccttcatctggcagaaggacggcgtgaagaagctgaacctgtacctgatcatcaactacttcaagggcggcaagctgcggttcaagaagatcaaacctgaagccttcgaagccaacagattctacaccgtgatcaacaaaaagagcggcgagatcgtgcccatggaggtgaacttcaacttcgacgaccccaacctgatcatcctgcctctggcctttggcaagagacagggcagagaattcatctggaacgacctgctgtccctggaaaccggcagcctgaagctggccaacggaagagtgatcgagaagacactgtacaacagaagaacccggcaggatgagcctgccctgttcgtggccctgaccttcgagcggcgggaggtcctggactcctccaatatcaaaccaatgaacctgatcggcgtggcaagaggcgaaaacatccccgccgtgatcgccctgaccgaccccgagggctgcccactgagccggtttaaggatagcctgggaaacccaacccacatcctgagaatcggcgagagctataaggagaagcagcggaccatccaggccaagaaggaggtggagcagcggagagccggcggctacagccggaagtacgccagcaaagccaagaatctggcagacgatatggtgagaaacaccgctagagatctgctgtactacgccgtgacccaggatgccatgctgatcttcgccaacctgagccggggcttcggccggcagggcaagcggaccttcatggccgagagacagtacacacggatggaggactggctgaccgccaagctggcctacgagggcctgagcaagacctacctgtccaagacactggcccagtacacctccaagacatgcagcaactgtgggtttaccatcaccagcgccgactacgacagggtgctggagaagctgaagaagacagcaacaggctggatgaccacaattaacggcaaggagctgaaggtggagggccagattacctactacaacagatacaagagacagaacgtagtcaaggacctgtccgtcgagctggatagactgagcgaagaatctgtgaacaacgacatctcctcctggacaaagggcagaagcggagaagctctgagcctcctgaagaaaagattctcccatagacccgtgcaggagaagttcgtgtgcctgaactgcggcttcgagacacacgcagccgagcaagccgccctgaacatcgccagatcctggctgttcctgcggagccaggagtacaagaaataccagacaaacaagacaaccggcaacaccgataagagagccttcgtcgagacctggcagtccttttaccggaagaagcttaaggaggtgtggaaacctgccgtgcggtctggcggatctggcggaggctccaccagccccaagaaaaagagaaaagtctaagctgccttctgcggggcttgccttctggccatgcccttcttctctcccttgcacctgtacctcttggtctttgaataaagcctgagtaggaaggctagcaaaaaaaaaaaaaaaaaaaaaaaaaaaaaaaaaaaaaaaaaaaaaaaaaaaaaaaaaaaaaaaaaaaaaaaaaaaaaaaa

SEQ ID NO: 13276 - RNA, 5785 nt, synthetic construct
  source 1..5785: mol_type = other RNA
aggaaataagagagaaaagaagagtaagaagaaatataagagccaccatggcccctaagaagaagcgtaaagtgagccggatggaacgcctcgtctacgaggtgcggcagaagtgcagaaacatcgaggacatctgcatctcctgcggatctctgaacgtgaccctggagcacccactgttcatcggcggcatgtgccagaactgtaaaaactgttttctggagtgtgcctatcaatacgacgatgacggctaccagagctactgcaccatctgttgcggcggaagagaggtgctgatgtgtggaaataacaactgctgccggtgcttctgcgtggaatgcgtggacctgctggtgggccccggcgccgcccaggccgctattaaggaagatccttggaactgctacatgtgcggccacaagggcacatacggcctgctgagacggagagaggactggcctagcagactgcagatgttcttcgccaataaccacgaccaggagttcgacccccctaaggtgtaccctcccgtccccgccgagaagagaaagcccatccgggtcctgagcctgttcgatggcatcgccaccggtctgctggtgctgaaggacctgggcatccaggtggataggtacattgcctccgaggtgtgcgaggactccatcaccgtgggaatggtgcgtcatcagggcaagatcatgtacgtgggcgacgtgcggagcgtgacacagaagcatatccaggagtggggccctttcgacctggtgatcggcggcagcccttgcaatgacctgagcatcgtgaacccagcccggaagggcctgtacgagggaaccggcagactgttcttcgagttttacagactgctgcacgacgcccggcctaaggaaggcgacgaccggcccttcttttggctgttcgagaatgtggtggccatgggagtcagcgacaagcgggatattagccggttcctggagagcaaccccgtgatgatcgatgccaaggaagtgagcgccgcccaccgggccagatacttctggggcaatctgcctggcatgaacagacccctggccagcaccgtgaacgacaagctggagctgcaggagtgcctggagcacggccggatcgccaagttcagcaaggtgagaaccatcaccacccgaagcaacagcatcaaacaaggcaaggaccagcactttcctgtgttcatgaacgagaaggaggacatcctgtggtgtaccgagatggagagagtgttcgggttcccagtccactacacagatgtcagcaacatgtctagactggccagacagagactgctgggaagaagctggtccgtccctgtgatcagacacctgttcgcccctctgaaggagtacttcgcctgcgtgagcagcggcaacagcaacgccaacagccggggccccagcttctctagcggcctggtgccactgtccctgagagggagccacatgggccccatggagatctacaaaaccgtgagcgcctggaagcggcagcctgtgcgcgtgctgagcctgtttcggaatatcgataaagtcctgaaaagcctgggattcctggagagcggctctggctccggcggtggcaccctgaagtacgtggaggatgtgacaaacgtggtcagacgggatgtggagaagtggggccccttcgatctggtgtacggcagcacccaacccctgggcagctcttgtgaccggtgccctggctggtacatgtttcagttccaccggatcctgcagtacgccctgccgagacaggagtcccagcggccattcttttggattttcatggacaacttgctgctgaccgaggatgaccaggaaactaccactcggttcctgcagaccgaagccgtgaccctgcaggacgtgagaggccgggactaccagaacgccatgcgggtgtggtccaacatccctggactgaaaagcaagcacgcacctctgacccctaaagaagaggagtacctgcaggcccaggtgcggagcagaagcaagctggacgcccctaaggtggatctgctggtgaagaattgcctcctgcccctgagagagtacttcaagtatttcagccagaatagtctgcccctgggaggcagcggcggcggcaagcccggcgccctgagcttcgccgacgtggccgtgtacttcagccccgaggagtggggctgcctgaggcccgcccagagggccctgtacagggacgtgatgagggagacctacggccacctgggcgccctgggcttccccggccccaagcccgccctgatcagctggatggagcaggagagcgaggcctggagcagcgccgcccaggaccccgagaagggcgagagcctgggcggcgccaggggcggcccaagcagcggcgcccctcctcccagcggcggcagcccagccggctccccaacctctaccgaggagggcacctctgagtccgccacccccgagagcggccctggcacctccaccgagcccagcgagggcagcgcacccggcagccctgccggcagccccacctccacagaggagggaaccagcaccgagcccagcgaaggcagcgccccaggcaccagcaccgagcctagtgagcaggagattaaacggatcaacaagatcagaagaagacttgtgaaagacagcaacaccaagaaggccggcaagacaggccccatgaaaaccctgctggttagagtgatgacacccgatctgagagagcggctggaaaacctgagaaagaagcctgaaaatatcccccagcccatcagcaatacatctagagccaacctgaataagctgctgaccgattacaccgaaatgaagaaggcgatcctgcatgtgtactgggaagagttccagaaggaccctgtgggcctgatgagccgggtggcccagcctgccagcaagaagatcgatcagaacaagctgaaacctgagatggacgagaagggcaacctgaccaccgccggctttgcctgctctcagtgtggccagcccctgttcgtgtacaagctggagcaggtgtctgagaagggcaaggcttacaccaactacttcggacggtgcaatgtggccgagcacgaaaagctgatcctgctggcccagctgaagcccgagaaggatagcgacgaagccgtgacatatagcctgggaaagtttgggcagagggccctggatttctacagcattcatgtgaccaaggagtccacccaccccgtgaagcccctggcccagatcgccggaaacagatacgcctccggacctgtgggaaaggccctgagcgacgcatgtatgggcacaatcgcctccttcctgtctaagtaccaggacatcatcatcgaacaccagaaggtggtgaagggcaaccagaagagactggagagcctgcgggagctggccggcaaggaaaacctggaataccctagcgtgaccctgccacctcagcctcacaccaaggagggcgttgatgcctacaacgaagtgatcgcccgggtgcgaatgtgggtgaacctgaacctgtggcagaagctgaagctaagcagagatgatgccaagcctctgctgagactgaagggattcccttcctttcctctggtcgagagacaggccaacgaagtggactggtgggacatggtgtgtaacgtgaagaagctgatcaacgagaaaaaggaggatggcaaggtgttttggcagaatctggctggctacaagagacaggaagccctgagaccatacctgagcagcgaggaagatcggaagaagggaaagaaattcgctcggtaccagctgggcgacctgctgctgcacctggaaaagaagcacggcgaggactggggaaaggtgtacgacgaggcctgggagcggattgacaagaaagtggaaggcctgagcaagcacatcaagctggaagaggaacggagaagcgaggacgcccagagcaaggccgccctgaccgactggctgcgggctaaggccagcttcgtgatcgagggcctgaaggaggccgacaaggacgagttctgcagatgcgagctgaagctgcagaagtggtacggggacctgcggggaaagcccttcgccatcgaagccgagaacagcatcctggacatcagcggcttcagcaagcagtacaactgtgccttcatctggcagaaggacggcgtgaagaagctgaacctgtacctgatcatcaactacttcaagggcggcaagctgcggttcaagaagatcaaacctgaagccttcgaagccaacagattctacaccgtgatcaacaaaaagagcggcgagatcgtgcccatggaggtgaacttcaacttcgacgaccccaacctgatcatcctgcctctggcctttggcaagagacagggcagagaattcatctggaacgacctgctgtccctggaaaccggcagcctgaagctggccaacggaagagtgatcgagaagacactgtacaacagaagaacccggcaggatgagcctgccctgttcgtggccctgaccttcgagcggcgggaggtcctggactcctccaatatcaaaccaatgaacctgatcggcgtggcaagaggcgaaaacatccccgccgtgatcgccctgaccgaccccgagggctgcccactgagccggtttaaggatagcctgggaaacccaacccacatcctgagaatcggcgagagctataaggagaagcagcggaccatccaggccaagaaggaggtggagcagcggagagccggcggctacagccggaagtacgccagcaaagccaagaatctggcagacgatatggtgagaaacaccgctagagatctgctgtactacgccgtgacccaggatgccatgctgatcttcgccaacctgagccggggcttcggccggcagggcaagcggaccttcatggccgagagacagtacacacggatggaggactggctgaccgccaagctggcctacgagggcctgagcaagacctacctgtccaagacactggcccagtacacctccaagacatgcagcaactgtgggtttaccatcaccagcgccgactacgacagggtgctggagaagctgaagaagacagcaacaggctggatgaccacaattaacggcaaggagctgaaggtggagggccagattacctactacaacagatacaagagacagaacgtagtcaaggacctgtccgtcgagctggatagactgagcgaagaatctgtgaacaacgacatctcctcctggacaaagggcagaagcggagaagctctgagcctcctgaagaaaagattctcccatagacccgtgcaggagaagttcgtgtgcctgaactgcggcttcgagacacacgcagccgagcaagccgccctgaacatcgccagatcctggctgttcctgcggagccaggagtacaagaaataccagacaaacaagacaaccggcaacaccgataagagagccttcgtcgagacctggcagtccttttaccggaagaagcttaaggaggtgtggaaacctgccgtgcggtctggcggatctggcggaggctccaccagccccaagaaaaagagaaaagtctaagctgccttctgcggggcttgccttctggccatgcccttcttctctcccttgcacctgtacctcttggtctttgaataaagcctgagtaggaaggctagcaaaaaaaaaaaaaaaaaaaaaaaaaaaaaaaaaaaaaaaaaaaaaaaaaaaaaaaaaaaaaaaaaaaaaaaaaaaaaaaa

SEQ ID NO: 13277 - RNA, 5785 nt, synthetic construct
  source 1..5785: mol_type = other RNA
aggaaataagagagaaaagaagagtaagaagaaatataagagccaccatggcccctaagaagaagcgtaaagtgagccggatggaacgcctcgtctacgaggtgcggcagaagtgcagaaacatcgaggacatctgcatctcctgcggatctctgaacgtgaccctggagcacccactgttcatcggcggcatgtgccagaactgtaaaaactgttttctggagtgtgcctatcaatacgacgatgacggctaccagagctactgcaccatctgttgcggcggaagagaggtgctgatgtgtggaaataacaactgctgccggtgcttctgcgtggaatgcgtggacctgctggtgggccccggcgccgcccaggccgctattaaggaagatccttggaactgctacatgtgcggccacaagggcacatacggcctgctgagacggagagaggactggcctagcagactgcagatgttcttcgccaataaccacgaccaggagttcgacccccctaaggtgtaccctcccgtccccgccgagaagagaaagcccatccgggtcctgagcctgttcgatggcatcgccaccggtctgctggtgctgaaggacctgggcatccaggtggataggtacattgcctccgaggtgtgcgaggactccatcaccgtgggaatggtgcgtcatcagggcaagatcatgtacgtgggcgacgtgcggagcgtgacacagaagcatatccaggagtggggccctttcgacctggtgatcggcggcagcccttgcaatgacctgagcatcgtgaacccagcccggaagggcctgtacgagggaaccggcagactgttcttcgagttttacagactgctgcacgacgcccggcctaaggaaggcgacgaccggcccttcttttggctgttcgagaatgtggtggccatgggagtcagcgacaagcgggatattagccggttcctggagagcaaccccgtgatgatcgatgccaaggaagtgagcgccgcccaccgggccagatacttctggggcaatctgcctggcatgaacagacccctggccagcaccgtgaacgacaagctggagctgcaggagtgcctggagcacggccggatcgccaagttcagcaaggtgagaaccatcaccacccgaagcaacagcatcaaacaaggcaaggaccagcactttcctgtgttcatgaacgagaaggaggacatcctgtggtgtaccgagatggagagagtgttcgggttcccagtccactacacagatgtcagcaacatgtctagactggccagacagagactgctgggaagaagctggtccgtccctgtgatcagacacctgttcgcccctctgaaggagtacttcgcctgcgtgagcagcggcaacagcaacgccaacagccggggccccagcttctctagcggcctggtgccactgtccctgagagggagccacatgggccccatggagatctacaaaaccgtgagcgcctggaagcggcagcctgtgcgcgtgctgagcctgtttcggaatatcgataaagtcctgaaaagcctgggattcctggagagcggctctggctccggcggtggcaccctgaagtacgtggaggatgtgacaaacgtggtcagacgggatgtggagaagtggggccccttcgatctggtgtacggcagcacccaacccctgggcagctcttgtgaccggtgccctggctggtacatgtttcagttccaccggatcctgcagtacgccctgccgagacaggagtcccagcggccattcttttggattttcatggacaacttgctgctgaccgaggatgaccaggaaactaccactcggttcctgcagaccgaagccgtgaccctgcaggacgtgagaggccgggactaccagaacgccatgcgggtgtggtccaacatccctggactgaaaagcaagcacgcacctctgacccctaaagaagaggagtacctgcaggcccaggtgcggagcagaagcaagctggacgcccctaaggtggatctgctggtgaagaattgcctcctgcccctgagagagtacttcaagtatttcagccagaatagtctgcccctgggaggcagcggcggcggcgagcccggcgccgtgagcttcgccgacgtggccgtgtacttcagccccgaggagtggggctgcctgaggcccgcccagagggtgctgtacagggacgtgatgagggagacctacggccacctgggcgccctgggcttccccggccccaagcccgccctgatcagctggatggagcaggagagcgaggcctggagcagcgccgcccaggaccccgaggagggcgagagcctgggcggcgccctgggcggcccaagcagcggcgcccctcctcccagcggcggcagcccagccggctccccaacctctaccgaggagggcacctctgagtccgccacccccgagagcggccctggcacctccaccgagcccagcgagggcagcgcacccggcagccctgccggcagccccacctccacagaggagggaaccagcaccgagcccagcgaaggcagcgccccaggcaccagcaccgagcctagtgagcaggagattaaacggatcaacaagatcagaagaagacttgtgaaagacagcaacaccaagaaggccggcaagacaggccccatgaaaaccctgctggttagagtgatgacacccgatctgagagagcggctggaaaacctgagaaagaagcctgaaaatatcccccagcccatcagcaatacatctagagccaacctgaataagctgctgaccgattacaccgaaatgaagaaggcgatcctgcatgtgtactgggaagagttccagaaggaccctgtgggcctgatgagccgggtggcccagcctgccagcaagaagatcgatcagaacaagctgaaacctgagatggacgagaagggcaacctgaccaccgccggctttgcctgctctcagtgtggccagcccctgttcgtgtacaagctggagcaggtgtctgagaagggcaaggcttacaccaactacttcggacggtgcaatgtggccgagcacgaaaagctgatcctgctggcccagctgaagcccgagaaggatagcgacgaagccgtgacatatagcctgggaaagtttgggcagagggccctggatttctacagcattcatgtgaccaaggagtccacccaccccgtgaagcccctggcccagatcgccggaaacagatacgcctccggacctgtgggaaaggccctgagcgacgcatgtatgggcacaatcgcctccttcctgtctaagtaccaggacatcatcatcgaacaccagaaggtggtgaagggcaaccagaagagactggagagcctgcgggagctggccggcaaggaaaacctggaataccctagcgtgaccctgccacctcagcctcacaccaaggagggcgttgatgcctacaacgaagtgatcgcccgggtgcgaatgtgggtgaacctgaacctgtggcagaagctgaagctaagcagagatgatgccaagcctctgctgagactgaagggattcccttcctttcctctggtcgagagacaggccaacgaagtggactggtgggacatggtgtgtaacgtgaagaagctgatcaacgagaaaaaggaggatggcaaggtgttttggcagaatctggctggctacaagagacaggaagccctgagaccatacctgagcagcgaggaagatcggaagaagggaaagaaattcgctcggtaccagctgggcgacctgctgctgcacctggaaaagaagcacggcgaggactggggaaaggtgtacgacgaggcctgggagcggattgacaagaaagtggaaggcctgagcaagcacatcaagctggaagaggaacggagaagcgaggacgcccagagcaaggccgccctgaccgactggctgcgggctaaggccagcttcgtgatcgagggcctgaaggaggccgacaaggacgagttctgcagatgcgagctgaagctgcagaagtggtacggggacctgcggggaaagcccttcgccatcgaagccgagaacagcatcctggacatcagcggcttcagcaagcagtacaactgtgccttcatctggcagaaggacggcgtgaagaagctgaacctgtacctgatcatcaactacttcaagggcggcaagctgcggttcaagaagatcaaacctgaagccttcgaagccaacagattctacaccgtgatcaacaaaaagagcggcgagatcgtgcccatggaggtgaacttcaacttcgacgaccccaacctgatcatcctgcctctggcctttggcaagagacagggcagagaattcatctggaacgacctgctgtccctggaaaccggcagcctgaagctggccaacggaagagtgatcgagaagacactgtacaacagaagaacccggcaggatgagcctgccctgttcgtggccctgaccttcgagcggcgggaggtcctggactcctccaatatcaaaccaatgaacctgatcggcgtggcaagaggcgaaaacatccccgccgtgatcgccctgaccgaccccgagggctgcccactgagccggtttaaggatagcctgggaaacccaacccacatcctgagaatcggcgagagctataaggagaagcagcggaccatccaggccaagaaggaggtggagcagcggagagccggcggctacagccggaagtacgccagcaaagccaagaatctggcagacgatatggtgagaaacaccgctagagatctgctgtactacgccgtgacccaggatgccatgctgatcttcgccaacctgagccggggcttcggccggcagggcaagcggaccttcatggccgagagacagtacacacggatggaggactggctgaccgccaagctggcctacgagggcctgagcaagacctacctgtccaagacactggcccagtacacctccaagacatgcagcaactgtgggtttaccatcaccagcgccgactacgacagggtgctggagaagctgaagaagacagcaacaggctggatgaccacaattaacggcaaggagctgaaggtggagggccagattacctactacaacagatacaagagacagaacgtagtcaaggacctgtccgtcgagctggatagactgagcgaagaatctgtgaacaacgacatctcctcctggacaaagggcagaagcggagaagctctgagcctcctgaagaaaagattctcccatagacccgtgcaggagaagttcgtgtgcctgaactgcggcttcgagacacacgcagccgagcaagccgccctgaacatcgccagatcctggctgttcctgcggagccaggagtacaagaaataccagacaaacaagacaaccggcaacaccgataagagagccttcgtcgagacctggcagtccttttaccggaagaagcttaaggaggtgtggaaacctgccgtgcggtctggcggatctggcggaggctccaccagccccaagaaaaagagaaaagtctaagctgccttctgcggggcttgccttctggccatgcccttcttctctcccttgcacctgtacctcttggtctttgaataaagcctgagtaggaaggctagcaaaaaaaaaaaaaaaaaaaaaaaaaaaaaaaaaaaaaaaaaaaaaaaaaaaaaaaaaaaaaaaaaaaaaaaaaaaaaaaa

SEQ ID NO: 13278 - RNA, 5788 nt, synthetic construct
  source 1..5788: mol_type = other RNA
aggaaataagagagaaaagaagagtaagaagaaatataagagccaccatggcccctaagaagaagcgtaaagtgagccggatggaacgcctcgtctacgaggtgcggcagaagtgcagaaacatcgaggacatctgcatctcctgcggatctctgaacgtgaccctggagcacccactgttcatcggcggcatgtgccagaactgtaaaaactgttttctggagtgtgcctatcaatacgacgatgacggctaccagagctactgcaccatctgttgcggcggaagagaggtgctgatgtgtggaaataacaactgctgccggtgcttctgcgtggaatgcgtggacctgctggtgggccccggcgccgcccaggccgctattaaggaagatccttggaactgctacatgtgcggccacaagggcacatacggcctgctgagacggagagaggactggcctagcagactgcagatgttcttcgccaataaccacgaccaggagttcgacccccctaaggtgtaccctcccgtccccgccgagaagagaaagcccatccgggtcctgagcctgttcgatggcatcgccaccggtctgctggtgctgaaggacctgggcatccaggtggataggtacattgcctccgaggtgtgcgaggactccatcaccgtgggaatggtgcgtcatcagggcaagatcatgtacgtgggcgacgtgcggagcgtgacacagaagcatatccaggagtggggccctttcgacctggtgatcggcggcagcccttgcaatgacctgagcatcgtgaacccagcccggaagggcctgtacgagggaaccggcagactgttcttcgagttttacagactgctgcacgacgcccggcctaaggaaggcgacgaccggcccttcttttggctgttcgagaatgtggtggccatgggagtcagcgacaagcgggatattagccggttcctggagagcaaccccgtgatgatcgatgccaaggaagtgagcgccgcccaccgggccagatacttctggggcaatctgcctggcatgaacagacccctggccagcaccgtgaacgacaagctggagctgcaggagtgcctggagcacggccggatcgccaagttcagcaaggtgagaaccatcaccacccgaagcaacagcatcaaacaaggcaaggaccagcactttcctgtgttcatgaacgagaaggaggacatcctgtggtgtaccgagatggagagagtgttcgggttcccagtccactacacagatgtcagcaacatgtctagactggccagacagagactgctgggaagaagctggtccgtccctgtgatcagacacctgttcgcccctctgaaggagtacttcgcctgcgtgagcagcggcaacagcaacgccaacagccggggccccagcttctctagcggcctggtgccactgtccctgagagggagccacatgggccccatggagatctacaaaaccgtgagcgcctggaagcggcagcctgtgcgcgtgctgagcctgtttcggaatatcgataaagtcctgaaaagcctgggattcctggagagcggctctggctccggcggtggcaccctgaagtacgtggaggatgtgacaaacgtggtcagacgggatgtggagaagtggggccccttcgatctggtgtacggcagcacccaacccctgggcagctcttgtgaccggtgccctggctggtacatgtttcagttccaccggatcctgcagtacgccctgccgagacaggagtcccagcggccattcttttggattttcatggacaacttgctgctgaccgaggatgaccaggaaactaccactcggttcctgcagaccgaagccgtgaccctgcaggacgtgagaggccgggactaccagaacgccatgcgggtgtggtccaacatccctggactgaaaagcaagcacgcacctctgacccctaaagaagaggagtacctgcaggcccaggtgcggagcagaagcaagctggacgcccctaaggtggatctgctggtgaagaattgcctcctgcccctgagagagtacttcaagtatttcagccagaatagtctgcccctgggaggcagcggcggcggcgtgaccttcgaggacgtggccgtgaacttcaccagcggcgagtgggccctgctggacagcagccagaagaagctgtacagggacgtgatgaaggagaccttcctgaacctgatcagcatcgagaagggcctggagcccaacatcgaggagcactacaaggacttctgcaggaacctgaggacccagctggtggagaaggactggggctacgagtacaacaggcagtgggacgacaacctgcagaccggcggcccaagcagcggcgcccctcctcccagcggcggcagcccagccggctccccaacctctaccgaggagggcacctctgagtccgccacccccgagagcggccctggcacctccaccgagcccagcgagggcagcgcacccggcagccctgccggcagccccacctccacagaggagggaaccagcaccgagcccagcgaaggcagcgccccaggcaccagcaccgagcctagtgagcaggagattaaacggatcaacaagatcagaagaagacttgtgaaagacagcaacaccaagaaggccggcaagacaggccccatgaaaaccctgctggttagagtgatgacacccgatctgagagagcggctggaaaacctgagaaagaagcctgaaaatatcccccagcccatcagcaatacatctagagccaacctgaataagctgctgaccgattacaccgaaatgaagaaggcgatcctgcatgtgtactgggaagagttccagaaggaccctgtgggcctgatgagccgggtggcccagcctgccagcaagaagatcgatcagaacaagctgaaacctgagatggacgagaagggcaacctgaccaccgccggctttgcctgctctcagtgtggccagcccctgttcgtgtacaagctggagcaggtgtctgagaagggcaaggcttacaccaactacttcggacggtgcaatgtggccgagcacgaaaagctgatcctgctggcccagctgaagcccgagaaggatagcgacgaagccgtgacatatagcctgggaaagtttgggcagagggccctggatttctacagcattcatgtgaccaaggagtccacccaccccgtgaagcccctggcccagatcgccggaaacagatacgcctccggacctgtgggaaaggccctgagcgacgcatgtatgggcacaatcgcctccttcctgtctaagtaccaggacatcatcatcgaacaccagaaggtggtgaagggcaaccagaagagactggagagcctgcgggagctggccggcaaggaaaacctggaataccctagcgtgaccctgccacctcagcctcacaccaaggagggcgttgatgcctacaacgaagtgatcgcccgggtgcgaatgtgggtgaacctgaacctgtggcagaagctgaagctaagcagagatgatgccaagcctctgctgagactgaagggattcccttcctttcctctggtcgagagacaggccaacgaagtggactggtgggacatggtgtgtaacgtgaagaagctgatcaacgagaaaaaggaggatggcaaggtgttttggcagaatctggctggctacaagagacaggaagccctgagaccatacctgagcagcgaggaagatcggaagaagggaaagaaattcgctcggtaccagctgggcgacctgctgctgcacctggaaaagaagcacggcgaggactggggaaaggtgtacgacgaggcctgggagcggattgacaagaaagtggaaggcctgagcaagcacatcaagctggaagaggaacggagaagcgaggacgcccagagcaaggccgccctgaccgactggctgcgggctaaggccagcttcgtgatcgagggcctgaaggaggccgacaaggacgagttctgcagatgcgagctgaagctgcagaagtggtacggggacctgcggggaaagcccttcgccatcgaagccgagaacagcatcctggacatcagcggcttcagcaagcagtacaactgtgccttcatctggcagaaggacggcgtgaagaagctgaacctgtacctgatcatcaactacttcaagggcggcaagctgcggttcaagaagatcaaacctgaagccttcgaagccaacagattctacaccgtgatcaacaaaaagagcggcgagatcgtgcccatggaggtgaacttcaacttcgacgaccccaacctgatcatcctgcctctggcctttggcaagagacagggcagagaattcatctggaacgacctgctgtccctggaaaccggcagcctgaagctggccaacggaagagtgatcgagaagacactgtacaacagaagaacccggcaggatgagcctgccctgttcgtggccctgaccttcgagcggcgggaggtcctggactcctccaatatcaaaccaatgaacctgatcggcgtggcaagaggcgaaaacatccccgccgtgatcgccctgaccgaccccgagggctgcccactgagccggtttaaggatagcctgggaaacccaacccacatcctgagaatcggcgagagctataaggagaagcagcggaccatccaggccaagaaggaggtggagcagcggagagccggcggctacagccggaagtacgccagcaaagccaagaatctggcagacgatatggtgagaaacaccgctagagatctgctgtactacgccgtgacccaggatgccatgctgatcttcgccaacctgagccggggcttcggccggcagggcaagcggaccttcatggccgagagacagtacacacggatggaggactggctgaccgccaagctggcctacgagggcctgagcaagacctacctgtccaagacactggcccagtacacctccaagacatgcagcaactgtgggtttaccatcaccagcgccgactacgacagggtgctggagaagctgaagaagacagcaacaggctggatgaccacaattaacggcaaggagctgaaggtggagggccagattacctactacaacagatacaagagacagaacgtagtcaaggacctgtccgtcgagctggatagactgagcgaagaatctgtgaacaacgacatctcctcctggacaaagggcagaagcggagaagctctgagcctcctgaagaaaagattctcccatagacccgtgcaggagaagttcgtgtgcctgaactgcggcttcgagacacacgcagccgagcaagccgccctgaacatcgccagatcctggctgttcctgcggagccaggagtacaagaaataccagacaaacaagacaaccggcaacaccgataagagagccttcgtcgagacctggcagtccttttaccggaagaagcttaaggaggtgtggaaacctgccgtgcggtctggcggatctggcggaggctccaccagccccaagaaaaagagaaaagtctaagctgccttctgcggggcttgccttctggccatgcccttcttctctcccttgcacctgtacctcttggtctttgaataaagcctgagtaggaaggctagcaaaaaaaaaaaaaaaaaaaaaaaaaaaaaaaaaaaaaaaaaaaaaaaaaaaaaaaaaaaaaaaaaaaaaaaaaaaaaaaa

SEQ ID NO: 13279 - RNA, 5785 nt, synthetic construct
  source 1..5785: mol_type = other RNA
aggaaataagagagaaaagaagagtaagaagaaatataagagccaccatggcccctaagaagaagcgtaaagtgagccggatggaacgcctcgtctacgaggtgcggcagaagtgcagaaacatcgaggacatctgcatctcctgcggatctctgaacgtgaccctggagcacccactgttcatcggcggcatgtgccagaactgtaaaaactgttttctggagtgtgcctatcaatacgacgatgacggctaccagagctactgcaccatctgttgcggcggaagagaggtgctgatgtgtggaaataacaactgctgccggtgcttctgcgtggaatgcgtggacctgctggtgggccccggcgccgcccaggccgctattaaggaagatccttggaactgctacatgtgcggccacaagggcacatacggcctgctgagacggagagaggactggcctagcagactgcagatgttcttcgccaataaccacgaccaggagttcgacccccctaaggtgtaccctcccgtccccgccgagaagagaaagcccatccgggtcctgagcctgttcgatggcatcgccaccggtctgctggtgctgaaggacctgggcatccaggtggataggtacattgcctccgaggtgtgcgaggactccatcaccgtgggaatggtgcgtcatcagggcaagatcatgtacgtgggcgacgtgcggagcgtgacacagaagcatatccaggagtggggccctttcgacctggtgatcggcggcagcccttgcaatgacctgagcatcgtgaacccagcccggaagggcctgtacgagggaaccggcagactgttcttcgagttttacagactgctgcacgacgcccggcctaaggaaggcgacgaccggcccttcttttggctgttcgagaatgtggtggccatgggagtcagcgacaagcgggatattagccggttcctggagagcaaccccgtgatgatcgatgccaaggaagtgagcgccgcccaccgggccagatacttctggggcaatctgcctggcatgaacagacccctggccagcaccgtgaacgacaagctggagctgcaggagtgcctggagcacggccggatcgccaagttcagcaaggtgagaaccatcaccacccgaagcaacagcatcaaacaaggcaaggaccagcactttcctgtgttcatgaacgagaaggaggacatcctgtggtgtaccgagatggagagagtgttcgggttcccagtccactacacagatgtcagcaacatgtctagactggccagacagagactgctgggaagaagctggtccgtccctgtgatcagacacctgttcgcccctctgaaggagtacttcgcctgcgtgagcagcggcaacagcaacgccaacagccggggccccagcttctctagcggcctggtgccactgtccctgagagggagccacatgggccccatggagatctacaaaaccgtgagcgcctggaagcggcagcctgtgcgcgtgctgagcctgtttcggaatatcgataaagtcctgaaaagcctgggattcctggagagcggctctggctccggcggtggcaccctgaagtacgtggaggatgtgacaaacgtggtcagacgggatgtggagaagtggggccccttcgatctggtgtacggcagcacccaacccctgggcagctcttgtgaccggtgccctggctggtacatgtttcagttccaccggatcctgcagtacgccctgccgagacaggagtcccagcggccattcttttggattttcatggacaacttgctgctgaccgaggatgaccaggaaactaccactcggttcctgcagaccgaagccgtgaccctgcaggacgtgagaggccgggactaccagaacgccatgcgggtgtggtccaacatccctggactgaaaagcaagcacgcacctctgacccctaaagaagaggagtacctgcaggcccaggtgcggagcagaagcaagctggacgcccctaaggtggatctgctggtgaagaattgcctcctgcccctgagagagtacttcaagtatttcagccagaatagtctgcccctgggaggcagcggcggcggcatgatgggcctggtgaccttcgaggacgtggccgtggacttcacccaggaggagtggcagtacctgaaccccccccagaggatcctgtacaggggcgtgatgatggagacctacaggaacctggtgttcgtggccggccagcaggccaccaagcccgacctgatcctgaagatggaggtggaggagccctacctggccgaggacaagatccccatctggagctgccccgaggaggcctgccagggcggcccaagcagcggcgcccctcctcccagcggcggcagcccagccggctccccaacctctaccgaggagggcacctctgagtccgccacccccgagagcggccctggcacctccaccgagcccagcgagggcagcgcacccggcagccctgccggcagccccacctccacagaggagggaaccagcaccgagcccagcgaaggcagcgccccaggcaccagcaccgagcctagtgagcaggagattaaacggatcaacaagatcagaagaagacttgtgaaagacagcaacaccaagaaggccggcaagacaggccccatgaaaaccctgctggttagagtgatgacacccgatctgagagagcggctggaaaacctgagaaagaagcctgaaaatatcccccagcccatcagcaatacatctagagccaacctgaataagctgctgaccgattacaccgaaatgaagaaggcgatcctgcatgtgtactgggaagagttccagaaggaccctgtgggcctgatgagccgggtggcccagcctgccagcaagaagatcgatcagaacaagctgaaacctgagatggacgagaagggcaacctgaccaccgccggctttgcctgctctcagtgtggccagcccctgttcgtgtacaagctggagcaggtgtctgagaagggcaaggcttacaccaactacttcggacggtgcaatgtggccgagcacgaaaagctgatcctgctggcccagctgaagcccgagaaggatagcgacgaagccgtgacatatagcctgggaaagtttgggcagagggccctggatttctacagcattcatgtgaccaaggagtccacccaccccgtgaagcccctggcccagatcgccggaaacagatacgcctccggacctgtgggaaaggccctgagcgacgcatgtatgggcacaatcgcctccttcctgtctaagtaccaggacatcatcatcgaacaccagaaggtggtgaagggcaaccagaagagactggagagcctgcgggagctggccggcaaggaaaacctggaataccctagcgtgaccctgccacctcagcctcacaccaaggagggcgttgatgcctacaacgaagtgatcgcccgggtgcgaatgtgggtgaacctgaacctgtggcagaagctgaagctaagcagagatgatgccaagcctctgctgagactgaagggattcccttcctttcctctggtcgagagacaggccaacgaagtggactggtgggacatggtgtgtaacgtgaagaagctgatcaacgagaaaaaggaggatggcaaggtgttttggcagaatctggctggctacaagagacaggaagccctgagaccatacctgagcagcgaggaagatcggaagaagggaaagaaattcgctcggtaccagctgggcgacctgctgctgcacctggaaaagaagcacggcgaggactggggaaaggtgtacgacgaggcctgggagcggattgacaagaaagtggaaggcctgagcaagcacatcaagctggaagaggaacggagaagcgaggacgcccagagcaaggccgccctgaccgactggctgcgggctaaggccagcttcgtgatcgagggcctgaaggaggccgacaaggacgagttctgcagatgcgagctgaagctgcagaagtggtacggggacctgcggggaaagcccttcgccatcgaagccgagaacagcatcctggacatcagcggcttcagcaagcagtacaactgtgccttcatctggcagaaggacggcgtgaagaagctgaacctgtacctgatcatcaactacttcaagggcggcaagctgcggttcaagaagatcaaacctgaagccttcgaagccaacagattctacaccgtgatcaacaaaaagagcggcgagatcgtgcccatggaggtgaacttcaacttcgacgaccccaacctgatcatcctgcctctggcctttggcaagagacagggcagagaattcatctggaacgacctgctgtccctggaaaccggcagcctgaagctggccaacggaagagtgatcgagaagacactgtacaacagaagaacccggcaggatgagcctgccctgttcgtggccctgaccttcgagcggcgggaggtcctggactcctccaatatcaaaccaatgaacctgatcggcgtggcaagaggcgaaaacatccccgccgtgatcgccctgaccgaccccgagggctgcccactgagccggtttaaggatagcctgggaaacccaacccacatcctgagaatcggcgagagctataaggagaagcagcggaccatccaggccaagaaggaggtggagcagcggagagccggcggctacagccggaagtacgccagcaaagccaagaatctggcagacgatatggtgagaaacaccgctagagatctgctgtactacgccgtgacccaggatgccatgctgatcttcgccaacctgagccggggcttcggccggcagggcaagcggaccttcatggccgagagacagtacacacggatggaggactggctgaccgccaagctggcctacgagggcctgagcaagacctacctgtccaagacactggcccagtacacctccaagacatgcagcaactgtgggtttaccatcaccagcgccgactacgacagggtgctggagaagctgaagaagacagcaacaggctggatgaccacaattaacggcaaggagctgaaggtggagggccagattacctactacaacagatacaagagacagaacgtagtcaaggacctgtccgtcgagctggatagactgagcgaagaatctgtgaacaacgacatctcctcctggacaaagggcagaagcggagaagctctgagcctcctgaagaaaagattctcccatagacccgtgcaggagaagttcgtgtgcctgaactgcggcttcgagacacacgcagccgagcaagccgccctgaacatcgccagatcctggctgttcctgcggagccaggagtacaagaaataccagacaaacaagacaaccggcaacaccgataagagagccttcgtcgagacctggcagtccttttaccggaagaagcttaaggaggtgtggaaacctgccgtgcggtctggcggatctggcggaggctccaccagccccaagaaaaagagaaaagtctaagctgccttctgcggggcttgccttctggccatgcccttcttctctcccttgcacctgtacctcttggtctttgaataaagcctgagtaggaaggctagcaaaaaaaaaaaaaaaaaaaaaaaaaaaaaaaaaaaaaaaaaaaaaaaaaaaaaaaaaaaaaaaaaaaaaaaaaaaaaaaa

SEQ ID NO: 13280 - RNA, 5785 nt, synthetic construct
  source 1..5785: mol_type = other RNA
aggaaataagagagaaaagaagagtaagaagaaatataagagccaccatggcccctaagaagaagcgtaaagtgagccggatggaacgcctcgtctacgaggtgcggcagaagtgcagaaacatcgaggacatctgcatctcctgcggatctctgaacgtgaccctggagcacccactgttcatcggcggcatgtgccagaactgtaaaaactgttttctggagtgtgcctatcaatacgacgatgacggctaccagagctactgcaccatctgttgcggcggaagagaggtgctgatgtgtggaaataacaactgctgccggtgcttctgcgtggaatgcgtggacctgctggtgggccccggcgccgcccaggccgctattaaggaagatccttggaactgctacatgtgcggccacaagggcacatacggcctgctgagacggagagaggactggcctagcagactgcagatgttcttcgccaataaccacgaccaggagttcgacccccctaaggtgtaccctcccgtccccgccgagaagagaaagcccatccgggtcctgagcctgttcgatggcatcgccaccggtctgctggtgctgaaggacctgggcatccaggtggataggtacattgcctccgaggtgtgcgaggactccatcaccgtgggaatggtgcgtcatcagggcaagatcatgtacgtgggcgacgtgcggagcgtgacacagaagcatatccaggagtggggccctttcgacctggtgatcggcggcagcccttgcaatgacctgagcatcgtgaacccagcccggaagggcctgtacgagggaaccggcagactgttcttcgagttttacagactgctgcacgacgcccggcctaaggaaggcgacgaccggcccttcttttggctgttcgagaatgtggtggccatgggagtcagcgacaagcgggatattagccggttcctggagagcaaccccgtgatgatcgatgccaaggaagtgagcgccgcccaccgggccagatacttctggggcaatctgcctggcatgaacagacccctggccagcaccgtgaacgacaagctggagctgcaggagtgcctggagcacggccggatcgccaagttcagcaaggtgagaaccatcaccacccgaagcaacagcatcaaacaaggcaaggaccagcactttcctgtgttcatgaacgagaaggaggacatcctgtggtgtaccgagatggagagagtgttcgggttcccagtccactacacagatgtcagcaacatgtctagactggccagacagagactgctgggaagaagctggtccgtccctgtgatcagacacctgttcgcccctctgaaggagtacttcgcctgcgtgagcagcggcaacagcaacgccaacagccggggccccagcttctctagcggcctggtgccactgtccctgagagggagccacatgggccccatggagatctacaaaaccgtgagcgcctggaagcggcagcctgtgcgcgtgctgagcctgtttcggaatatcgataaagtcctgaaaagcctgggattcctggagagcggctctggctccggcggtggcaccctgaagtacgtggaggatgtgacaaacgtggtcagacgggatgtggagaagtggggccccttcgatctggtgtacggcagcacccaacccctgggcagctcttgtgaccggtgccctggctggtacatgtttcagttccaccggatcctgcagtacgccctgccgagacaggagtcccagcggccattcttttggattttcatggacaacttgctgctgaccgaggatgaccaggaaactaccactcggttcctgcagaccgaagccgtgaccctgcaggacgtgagaggccgggactaccagaacgccatgcgggtgtggtccaacatccctggactgaaaagcaagcacgcacctctgacccctaaagaagaggagtacctgcaggcccaggtgcggagcagaagcaagctggacgcccctaaggtggatctgctggtgaagaattgcctcctgcccctgagagagtacttcaagtatttcagccagaatagtctgcccctgggaggcagcggcggcggcagccaggagcccgtgaccttcgaggacgtggccgtgtacttcacccagaaccagtgggccaacctggacttcacccagagggccctgtacagggaggtgatgctggagaactacgccaacgtggccagcctggccttccccttccccaagcccgacctggtgagccagctggagaggggcgaggccccctggggccccgacccctgggaggccgaggtgctgaggggcgtgtgccccggcggcggcggcccaagcagcggcgcccctcctcccagcggcggcagcccagccggctccccaacctctaccgaggagggcacctctgagtccgccacccccgagagcggccctggcacctccaccgagcccagcgagggcagcgcacccggcagccctgccggcagccccacctccacagaggagggaaccagcaccgagcccagcgaaggcagcgccccaggcaccagcaccgagcctagtgagcaggagattaaacggatcaacaagatcagaagaagacttgtgaaagacagcaacaccaagaaggccggcaagacaggccccatgaaaaccctgctggttagagtgatgacacccgatctgagagagcggctggaaaacctgagaaagaagcctgaaaatatcccccagcccatcagcaatacatctagagccaacctgaataagctgctgaccgattacaccgaaatgaagaaggcgatcctgcatgtgtactgggaagagttccagaaggaccctgtgggcctgatgagccgggtggcccagcctgccagcaagaagatcgatcagaacaagctgaaacctgagatggacgagaagggcaacctgaccaccgccggctttgcctgctctcagtgtggccagcccctgttcgtgtacaagctggagcaggtgtctgagaagggcaaggcttacaccaactacttcggacggtgcaatgtggccgagcacgaaaagctgatcctgctggcccagctgaagcccgagaaggatagcgacgaagccgtgacatatagcctgggaaagtttgggcagagggccctggatttctacagcattcatgtgaccaaggagtccacccaccccgtgaagcccctggcccagatcgccggaaacagatacgcctccggacctgtgggaaaggccctgagcgacgcatgtatgggcacaatcgcctccttcctgtctaagtaccaggacatcatcatcgaacaccagaaggtggtgaagggcaaccagaagagactggagagcctgcgggagctggccggcaaggaaaacctggaataccctagcgtgaccctgccacctcagcctcacaccaaggagggcgttgatgcctacaacgaagtgatcgcccgggtgcgaatgtgggtgaacctgaacctgtggcagaagctgaagctaagcagagatgatgccaagcctctgctgagactgaagggattcccttcctttcctctggtcgagagacaggccaacgaagtggactggtgggacatggtgtgtaacgtgaagaagctgatcaacgagaaaaaggaggatggcaaggtgttttggcagaatctggctggctacaagagacaggaagccctgagaccatacctgagcagcgaggaagatcggaagaagggaaagaaattcgctcggtaccagctgggcgacctgctgctgcacctggaaaagaagcacggcgaggactggggaaaggtgtacgacgaggcctgggagcggattgacaagaaagtggaaggcctgagcaagcacatcaagctggaagaggaacggagaagcgaggacgcccagagcaaggccgccctgaccgactggctgcgggctaaggccagcttcgtgatcgagggcctgaaggaggccgacaaggacgagttctgcagatgcgagctgaagctgcagaagtggtacggggacctgcggggaaagcccttcgccatcgaagccgagaacagcatcctggacatcagcggcttcagcaagcagtacaactgtgccttcatctggcagaaggacggcgtgaagaagctgaacctgtacctgatcatcaactacttcaagggcggcaagctgcggttcaagaagatcaaacctgaagccttcgaagccaacagattctacaccgtgatcaacaaaaagagcggcgagatcgtgcccatggaggtgaacttcaacttcgacgaccccaacctgatcatcctgcctctggcctttggcaagagacagggcagagaattcatctggaacgacctgctgtccctggaaaccggcagcctgaagctggccaacggaagagtgatcgagaagacactgtacaacagaagaacccggcaggatgagcctgccctgttcgtggccctgaccttcgagcggcgggaggtcctggactcctccaatatcaaaccaatgaacctgatcggcgtggcaagaggcgaaaacatccccgccgtgatcgccctgaccgaccccgagggctgcccactgagccggtttaaggatagcctgggaaacccaacccacatcctgagaatcggcgagagctataaggagaagcagcggaccatccaggccaagaaggaggtggagcagcggagagccggcggctacagccggaagtacgccagcaaagccaagaatctggcagacgatatggtgagaaacaccgctagagatctgctgtactacgccgtgacccaggatgccatgctgatcttcgccaacctgagccggggcttcggccggcagggcaagcggaccttcatggccgagagacagtacacacggatggaggactggctgaccgccaagctggcctacgagggcctgagcaagacctacctgtccaagacactggcccagtacacctccaagacatgcagcaactgtgggtttaccatcaccagcgccgactacgacagggtgctggagaagctgaagaagacagcaacaggctggatgaccacaattaacggcaaggagctgaaggtggagggccagattacctactacaacagatacaagagacagaacgtagtcaaggacctgtccgtcgagctggatagactgagcgaagaatctgtgaacaacgacatctcctcctggacaaagggcagaagcggagaagctctgagcctcctgaagaaaagattctcccatagacccgtgcaggagaagttcgtgtgcctgaactgcggcttcgagacacacgcagccgagcaagccgccctgaacatcgccagatcctggctgttcctgcggagccaggagtacaagaaataccagacaaacaagacaaccggcaacaccgataagagagccttcgtcgagacctggcagtccttttaccggaagaagcttaaggaggtgtggaaacctgccgtgcggtctggcggatctggcggaggctccaccagccccaagaaaaagagaaaagtctaagctgccttctgcggggcttgccttctggccatgcccttcttctctcccttgcacctgtacctcttggtctttgaataaagcctgagtaggaaggctagcaaaaaaaaaaaaaaaaaaaaaaaaaaaaaaaaaaaaaaaaaaaaaaaaaaaaaaaaaaaaaaaaaaaaaaaaaaaaaaaa

SEQ ID NO: 13281 - RNA, 5785 nt, synthetic construct
  source 1..5785: mol_type = other RNA
aggaaataagagagaaaagaagagtaagaagaaatataagagccaccatggcccctaagaagaagcgtaaagtgagccggatggaacgcctcgtctacgaggtgcggcagaagtgcagaaacatcgaggacatctgcatctcctgcggatctctgaacgtgaccctggagcacccactgttcatcggcggcatgtgccagaactgtaaaaactgttttctggagtgtgcctatcaatacgacgatgacggctaccagagctactgcaccatctgttgcggcggaagagaggtgctgatgtgtggaaataacaactgctgccggtgcttctgcgtggaatgcgtggacctgctggtgggccccggcgccgcccaggccgctattaaggaagatccttggaactgctacatgtgcggccacaagggcacatacggcctgctgagacggagagaggactggcctagcagactgcagatgttcttcgccaataaccacgaccaggagttcgacccccctaaggtgtaccctcccgtccccgccgagaagagaaagcccatccgggtcctgagcctgttcgatggcatcgccaccggtctgctggtgctgaaggacctgggcatccaggtggataggtacattgcctccgaggtgtgcgaggactccatcaccgtgggaatggtgcgtcatcagggcaagatcatgtacgtgggcgacgtgcggagcgtgacacagaagcatatccaggagtggggccctttcgacctggtgatcggcggcagcccttgcaatgacctgagcatcgtgaacccagcccggaagggcctgtacgagggaaccggcagactgttcttcgagttttacagactgctgcacgacgcccggcctaaggaaggcgacgaccggcccttcttttggctgttcgagaatgtggtggccatgggagtcagcgacaagcgggatattagccggttcctggagagcaaccccgtgatgatcgatgccaaggaagtgagcgccgcccaccgggccagatacttctggggcaatctgcctggcatgaacagacccctggccagcaccgtgaacgacaagctggagctgcaggagtgcctggagcacggccggatcgccaagttcagcaaggtgagaaccatcaccacccgaagcaacagcatcaaacaaggcaaggaccagcactttcctgtgttcatgaacgagaaggaggacatcctgtggtgtaccgagatggagagagtgttcgggttcccagtccactacacagatgtcagcaacatgtctagactggccagacagagactgctgggaagaagctggtccgtccctgtgatcagacacctgttcgcccctctgaaggagtacttcgcctgcgtgagcagcggcaacagcaacgccaacagccggggccccagcttctctagcggcctggtgccactgtccctgagagggagccacatgggccccatggagatctacaaaaccgtgagcgcctggaagcggcagcctgtgcgcgtgctgagcctgtttcggaatatcgataaagtcctgaaaagcctgggattcctggagagcggctctggctccggcggtggcaccctgaagtacgtggaggatgtgacaaacgtggtcagacgggatgtggagaagtggggccccttcgatctggtgtacggcagcacccaacccctgggcagctcttgtgaccggtgccctggctggtacatgtttcagttccaccggatcctgcagtacgccctgccgagacaggagtcccagcggccattcttttggattttcatggacaacttgctgctgaccgaggatgaccaggaaactaccactcggttcctgcagaccgaagccgtgaccctgcaggacgtgagaggccgggactaccagaacgccatgcgggtgtggtccaacatccctggactgaaaagcaagcacgcacctctgacccctaaagaagaggagtacctgcaggcccaggtgcggagcagaagcaagctggacgcccctaaggtggatctgctggtgaagaattgcctcctgcccctgagagagtacttcaagtatttcagccagaatagtctgcccctgggaggcagcggcggcggcatggccgccgccgccgccctgagggcccacgcccagagcagcgtgaccttcgaggacgtggccgtgaacttcagcatggaggagtggagcctgctgaacgaggcccagaggtgcctgtacagggacgtgatgctggagaccctgaccctgatcagcagcctgggctgctggcacggcggcgaggacgaggccgcccccagcaagcagagcacctgcatctacatctacaaggagcagggcggcggcggcccaagcagcggcgcccctcctcccagcggcggcagcccagccggctccccaacctctaccgaggagggcacctctgagtccgccacccccgagagcggccctggcacctccaccgagcccagcgagggcagcgcacccggcagccctgccggcagccccacctccacagaggagggaaccagcaccgagcccagcgaaggcagcgccccaggcaccagcaccgagcctagtgagcaggagattaaacggatcaacaagatcagaagaagacttgtgaaagacagcaacaccaagaaggccggcaagacaggccccatgaaaaccctgctggttagagtgatgacacccgatctgagagagcggctggaaaacctgagaaagaagcctgaaaatatcccccagcccatcagcaatacatctagagccaacctgaataagctgctgaccgattacaccgaaatgaagaaggcgatcctgcatgtgtactgggaagagttccagaaggaccctgtgggcctgatgagccgggtggcccagcctgccagcaagaagatcgatcagaacaagctgaaacctgagatggacgagaagggcaacctgaccaccgccggctttgcctgctctcagtgtggccagcccctgttcgtgtacaagctggagcaggtgtctgagaagggcaaggcttacaccaactacttcggacggtgcaatgtggccgagcacgaaaagctgatcctgctggcccagctgaagcccgagaaggatagcgacgaagccgtgacatatagcctgggaaagtttgggcagagggccctggatttctacagcattcatgtgaccaaggagtccacccaccccgtgaagcccctggcccagatcgccggaaacagatacgcctccggacctgtgggaaaggccctgagcgacgcatgtatgggcacaatcgcctccttcctgtctaagtaccaggacatcatcatcgaacaccagaaggtggtgaagggcaaccagaagagactggagagcctgcgggagctggccggcaaggaaaacctggaataccctagcgtgaccctgccacctcagcctcacaccaaggagggcgttgatgcctacaacgaagtgatcgcccgggtgcgaatgtgggtgaacctgaacctgtggcagaagctgaagctaagcagagatgatgccaagcctctgctgagactgaagggattcccttcctttcctctggtcgagagacaggccaacgaagtggactggtgggacatggtgtgtaacgtgaagaagctgatcaacgagaaaaaggaggatggcaaggtgttttggcagaatctggctggctacaagagacaggaagccctgagaccatacctgagcagcgaggaagatcggaagaagggaaagaaattcgctcggtaccagctgggcgacctgctgctgcacctggaaaagaagcacggcgaggactggggaaaggtgtacgacgaggcctgggagcggattgacaagaaagtggaaggcctgagcaagcacatcaagctggaagaggaacggagaagcgaggacgcccagagcaaggccgccctgaccgactggctgcgggctaaggccagcttcgtgatcgagggcctgaaggaggccgacaaggacgagttctgcagatgcgagctgaagctgcagaagtggtacggggacctgcggggaaagcccttcgccatcgaagccgagaacagcatcctggacatcagcggcttcagcaagcagtacaactgtgccttcatctggcagaaggacggcgtgaagaagctgaacctgtacctgatcatcaactacttcaagggcggcaagctgcggttcaagaagatcaaacctgaagccttcgaagccaacagattctacaccgtgatcaacaaaaagagcggcgagatcgtgcccatggaggtgaacttcaacttcgacgaccccaacctgatcatcctgcctctggcctttggcaagagacagggcagagaattcatctggaacgacctgctgtccctggaaaccggcagcctgaagctggccaacggaagagtgatcgagaagacactgtacaacagaagaacccggcaggatgagcctgccctgttcgtggccctgaccttcgagcggcgggaggtcctggactcctccaatatcaaaccaatgaacctgatcggcgtggcaagaggcgaaaacatccccgccgtgatcgccctgaccgaccccgagggctgcccactgagccggtttaaggatagcctgggaaacccaacccacatcctgagaatcggcgagagctataaggagaagcagcggaccatccaggccaagaaggaggtggagcagcggagagccggcggctacagccggaagtacgccagcaaagccaagaatctggcagacgatatggtgagaaacaccgctagagatctgctgtactacgccgtgacccaggatgccatgctgatcttcgccaacctgagccggggcttcggccggcagggcaagcggaccttcatggccgagagacagtacacacggatggaggactggctgaccgccaagctggcctacgagggcctgagcaagacctacctgtccaagacactggcccagtacacctccaagacatgcagcaactgtgggtttaccatcaccagcgccgactacgacagggtgctggagaagctgaagaagacagcaacaggctggatgaccacaattaacggcaaggagctgaaggtggagggccagattacctactacaacagatacaagagacagaacgtagtcaaggacctgtccgtcgagctggatagactgagcgaagaatctgtgaacaacgacatctcctcctggacaaagggcagaagcggagaagctctgagcctcctgaagaaaagattctcccatagacccgtgcaggagaagttcgtgtgcctgaactgcggcttcgagacacacgcagccgagcaagccgccctgaacatcgccagatcctggctgttcctgcggagccaggagtacaagaaataccagacaaacaagacaaccggcaacaccgataagagagccttcgtcgagacctggcagtccttttaccggaagaagcttaaggaggtgtggaaacctgccgtgcggtctggcggatctggcggaggctccaccagccccaagaaaaagagaaaagtctaagctgccttctgcggggcttgccttctggccatgcccttcttctctcccttgcacctgtacctcttggtctttgaataaagcctgagtaggaaggctagcaaaaaaaaaaaaaaaaaaaaaaaaaaaaaaaaaaaaaaaaaaaaaaaaaaaaaaaaaaaaaaaaaaaaaaaaaaaaaaaa

SEQ ID NO: 13282 - RNA, 5785 nt, synthetic construct
  source 1..5785: mol_type = other RNA
aggaaataagagagaaaagaagagtaagaagaaatataagagccaccatggcccctaagaagaagcgtaaagtgagccggatggaacgcctcgtctacgaggtgcggcagaagtgcagaaacatcgaggacatctgcatctcctgcggatctctgaacgtgaccctggagcacccactgttcatcggcggcatgtgccagaactgtaaaaactgttttctggagtgtgcctatcaatacgacgatgacggctaccagagctactgcaccatctgttgcggcggaagagaggtgctgatgtgtggaaataacaactgctgccggtgcttctgcgtggaatgcgtggacctgctggtgggccccggcgccgcccaggccgctattaaggaagatccttggaactgctacatgtgcggccacaagggcacatacggcctgctgagacggagagaggactggcctagcagactgcagatgttcttcgccaataaccacgaccaggagttcgacccccctaaggtgtaccctcccgtccccgccgagaagagaaagcccatccgggtcctgagcctgttcgatggcatcgccaccggtctgctggtgctgaaggacctgggcatccaggtggataggtacattgcctccgaggtgtgcgaggactccatcaccgtgggaatggtgcgtcatcagggcaagatcatgtacgtgggcgacgtgcggagcgtgacacagaagcatatccaggagtggggccctttcgacctggtgatcggcggcagcccttgcaatgacctgagcatcgtgaacccagcccggaagggcctgtacgagggaaccggcagactgttcttcgagttttacagactgctgcacgacgcccggcctaaggaaggcgacgaccggcccttcttttggctgttcgagaatgtggtggccatgggagtcagcgacaagcgggatattagccggttcctggagagcaaccccgtgatgatcgatgccaaggaagtgagcgccgcccaccgggccagatacttctggggcaatctgcctggcatgaacagacccctggccagcaccgtgaacgacaagctggagctgcaggagtgcctggagcacggccggatcgccaagttcagcaaggtgagaaccatcaccacccgaagcaacagcatcaaacaaggcaaggaccagcactttcctgtgttcatgaacgagaaggaggacatcctgtggtgtaccgagatggagagagtgttcgggttcccagtccactacacagatgtcagcaacatgtctagactggccagacagagactgctgggaagaagctggtccgtccctgtgatcagacacctgttcgcccctctgaaggagtacttcgcctgcgtgagcagcggcaacagcaacgccaacagccggggccccagcttctctagcggcctggtgccactgtccctgagagggagccacatgggccccatggagatctacaaaaccgtgagcgcctggaagcggcagcctgtgcgcgtgctgagcctgtttcggaatatcgataaagtcctgaaaagcctgggattcctggagagcggctctggctccggcggtggcaccctgaagtacgtggaggatgtgacaaacgtggtcagacgggatgtggagaagtggggccccttcgatctggtgtacggcagcacccaacccctgggcagctcttgtgaccggtgccctggctggtacatgtttcagttccaccggatcctgcagtacgccctgccgagacaggagtcccagcggccattcttttggattttcatggacaacttgctgctgaccgaggatgaccaggaaactaccactcggttcctgcagaccgaagccgtgaccctgcaggacgtgagaggccgggactaccagaacgccatgcgggtgtggtccaacatccctggactgaaaagcaagcacgcacctctgacccctaaagaagaggagtacctgcaggcccaggtgcggagcagaagcaagctggacgcccctaaggtggatctgctggtgaagaattgcctcctgcccctgagagagtacttcaagtatttcagccagaatagtctgcccctgggaggcagcggcggcggcgccgacatcaccctgatgagccaggcccaggacagcaggagcatcctgttccaggagagcgtgaccttcgaggacgtggccgtgaacttcaccaacagggagtggcagtgcctgacctacgcccagaggcacctgtacaaggacgtgatgctggagaactacggcaacatggtgagcctgggcttccccttccccaagccccccctgatcagccacctggagagggaggtggacccctgcgtgggcggcccaagcagcggcgcccctcctcccagcggcggcagcccagccggctccccaacctctaccgaggagggcacctctgagtccgccacccccgagagcggccctggcacctccaccgagcccagcgagggcagcgcacccggcagccctgccggcagccccacctccacagaggagggaaccagcaccgagcccagcgaaggcagcgccccaggcaccagcaccgagcctagtgagcaggagattaaacggatcaacaagatcagaagaagacttgtgaaagacagcaacaccaagaaggccggcaagacaggccccatgaaaaccctgctggttagagtgatgacacccgatctgagagagcggctggaaaacctgagaaagaagcctgaaaatatcccccagcccatcagcaatacatctagagccaacctgaataagctgctgaccgattacaccgaaatgaagaaggcgatcctgcatgtgtactgggaagagttccagaaggaccctgtgggcctgatgagccgggtggcccagcctgccagcaagaagatcgatcagaacaagctgaaacctgagatggacgagaagggcaacctgaccaccgccggctttgcctgctctcagtgtggccagcccctgttcgtgtacaagctggagcaggtgtctgagaagggcaaggcttacaccaactacttcggacggtgcaatgtggccgagcacgaaaagctgatcctgctggcccagctgaagcccgagaaggatagcgacgaagccgtgacatatagcctgggaaagtttgggcagagggccctggatttctacagcattcatgtgaccaaggagtccacccaccccgtgaagcccctggcccagatcgccggaaacagatacgcctccggacctgtgggaaaggccctgagcgacgcatgtatgggcacaatcgcctccttcctgtctaagtaccaggacatcatcatcgaacaccagaaggtggtgaagggcaaccagaagagactggagagcctgcgggagctggccggcaaggaaaacctggaataccctagcgtgaccctgccacctcagcctcacaccaaggagggcgttgatgcctacaacgaagtgatcgcccgggtgcgaatgtgggtgaacctgaacctgtggcagaagctgaagctaagcagagatgatgccaagcctctgctgagactgaagggattcccttcctttcctctggtcgagagacaggccaacgaagtggactggtgggacatggtgtgtaacgtgaagaagctgatcaacgagaaaaaggaggatggcaaggtgttttggcagaatctggctggctacaagagacaggaagccctgagaccatacctgagcagcgaggaagatcggaagaagggaaagaaattcgctcggtaccagctgggcgacctgctgctgcacctggaaaagaagcacggcgaggactggggaaaggtgtacgacgaggcctgggagcggattgacaagaaagtggaaggcctgagcaagcacatcaagctggaagaggaacggagaagcgaggacgcccagagcaaggccgccctgaccgactggctgcgggctaaggccagcttcgtgatcgagggcctgaaggaggccgacaaggacgagttctgcagatgcgagctgaagctgcagaagtggtacggggacctgcggggaaagcccttcgccatcgaagccgagaacagcatcctggacatcagcggcttcagcaagcagtacaactgtgccttcatctggcagaaggacggcgtgaagaagctgaacctgtacctgatcatcaactacttcaagggcggcaagctgcggttcaagaagatcaaacctgaagccttcgaagccaacagattctacaccgtgatcaacaaaaagagcggcgagatcgtgcccatggaggtgaacttcaacttcgacgaccccaacctgatcatcctgcctctggcctttggcaagagacagggcagagaattcatctggaacgacctgctgtccctggaaaccggcagcctgaagctggccaacggaagagtgatcgagaagacactgtacaacagaagaacccggcaggatgagcctgccctgttcgtggccctgaccttcgagcggcgggaggtcctggactcctccaatatcaaaccaatgaacctgatcggcgtggcaagaggcgaaaacatccccgccgtgatcgccctgaccgaccccgagggctgcccactgagccggtttaaggatagcctgggaaacccaacccacatcctgagaatcggcgagagctataaggagaagcagcggaccatccaggccaagaaggaggtggagcagcggagagccggcggctacagccggaagtacgccagcaaagccaagaatctggcagacgatatggtgagaaacaccgctagagatctgctgtactacgccgtgacccaggatgccatgctgatcttcgccaacctgagccggggcttcggccggcagggcaagcggaccttcatggccgagagacagtacacacggatggaggactggctgaccgccaagctggcctacgagggcctgagcaagacctacctgtccaagacactggcccagtacacctccaagacatgcagcaactgtgggtttaccatcaccagcgccgactacgacagggtgctggagaagctgaagaagacagcaacaggctggatgaccacaattaacggcaaggagctgaaggtggagggccagattacctactacaacagatacaagagacagaacgtagtcaaggacctgtccgtcgagctggatagactgagcgaagaatctgtgaacaacgacatctcctcctggacaaagggcagaagcggagaagctctgagcctcctgaagaaaagattctcccatagacccgtgcaggagaagttcgtgtgcctgaactgcggcttcgagacacacgcagccgagcaagccgccctgaacatcgccagatcctggctgttcctgcggagccaggagtacaagaaataccagacaaacaagacaaccggcaacaccgataagagagccttcgtcgagacctggcagtccttttaccggaagaagcttaaggaggtgtggaaacctgccgtgcggtctggcggatctggcggaggctccaccagccccaagaaaaagagaaaagtctaagctgccttctgcggggcttgccttctggccatgcccttcttctctcccttgcacctgtacctcttggtctttgaataaagcctgagtaggaaggctagcaaaaaaaaaaaaaaaaaaaaaaaaaaaaaaaaaaaaaaaaaaaaaaaaaaaaaaaaaaaaaaaaaaaaaaaaaaaaaaaa

SEQ ID NO: 13283 - RNA, 5785 nt, synthetic construct
  source 1..5785: mol_type = other RNA
aggaaataagagagaaaagaagagtaagaagaaatataagagccaccatggcccctaagaagaagcgtaaagtgagccggatggaacgcctcgtctacgaggtgcggcagaagtgcagaaacatcgaggacatctgcatctcctgcggatctctgaacgtgaccctggagcacccactgttcatcggcggcatgtgccagaactgtaaaaactgttttctggagtgtgcctatcaatacgacgatgacggctaccagagctactgcaccatctgttgcggcggaagagaggtgctgatgtgtggaaataacaactgctgccggtgcttctgcgtggaatgcgtggacctgctggtgggccccggcgccgcccaggccgctattaaggaagatccttggaactgctacatgtgcggccacaagggcacatacggcctgctgagacggagagaggactggcctagcagactgcagatgttcttcgccaataaccacgaccaggagttcgacccccctaaggtgtaccctcccgtccccgccgagaagagaaagcccatccgggtcctgagcctgttcgatggcatcgccaccggtctgctggtgctgaaggacctgggcatccaggtggataggtacattgcctccgaggtgtgcgaggactccatcaccgtgggaatggtgcgtcatcagggcaagatcatgtacgtgggcgacgtgcggagcgtgacacagaagcatatccaggagtggggccctttcgacctggtgatcggcggcagcccttgcaatgacctgagcatcgtgaacccagcccggaagggcctgtacgagggaaccggcagactgttcttcgagttttacagactgctgcacgacgcccggcctaaggaaggcgacgaccggcccttcttttggctgttcgagaatgtggtggccatgggagtcagcgacaagcgggatattagccggttcctggagagcaaccccgtgatgatcgatgccaaggaagtgagcgccgcccaccgggccagatacttctggggcaatctgcctggcatgaacagacccctggccagcaccgtgaacgacaagctggagctgcaggagtgcctggagcacggccggatcgccaagttcagcaaggtgagaaccatcaccacccgaagcaacagcatcaaacaaggcaaggaccagcactttcctgtgttcatgaacgagaaggaggacatcctgtggtgtaccgagatggagagagtgttcgggttcccagtccactacacagatgtcagcaacatgtctagactggccagacagagactgctgggaagaagctggtccgtccctgtgatcagacacctgttcgcccctctgaaggagtacttcgcctgcgtgagcagcggcaacagcaacgccaacagccggggccccagcttctctagcggcctggtgccactgtccctgagagggagccacatgggccccatggagatctacaaaaccgtgagcgcctggaagcggcagcctgtgcgcgtgctgagcctgtttcggaatatcgataaagtcctgaaaagcctgggattcctggagagcggctctggctccggcggtggcaccctgaagtacgtggaggatgtgacaaacgtggtcagacgggatgtggagaagtggggccccttcgatctggtgtacggcagcacccaacccctgggcagctcttgtgaccggtgccctggctggtacatgtttcagttccaccggatcctgcagtacgccctgccgagacaggagtcccagcggccattcttttggattttcatggacaacttgctgctgaccgaggatgaccaggaaactaccactcggttcctgcagaccgaagccgtgaccctgcaggacgtgagaggccgggactaccagaacgccatgcgggtgtggtccaacatccctggactgaaaagcaagcacgcacctctgacccctaaagaagaggagtacctgcaggcccaggtgcggagcagaagcaagctggacgcccctaaggtggatctgctggtgaagaattgcctcctgcccctgagagagtacttcaagtatttcagccagaatagtctgcccctgggaggcagcggcggcggcgtgttcgacgccgtgaccttcaccgacgtggccgtggacttcagccaggacgagtgggagaggctgaccctggcccagaggaccctgtacaagaaggtgatgctggagaactacagcaacctggccagcctgggcctgtgcatcagcaagcccgacgtgatcagcagcctggagcaggacaaggagccctggaccatgaagggcgagctgaccaggggcccctgcgccgacctggagtacgtgggcggcccaagcagcggcgcccctcctcccagcggcggcagcccagccggctccccaacctctaccgaggagggcacctctgagtccgccacccccgagagcggccctggcacctccaccgagcccagcgagggcagcgcacccggcagccctgccggcagccccacctccacagaggagggaaccagcaccgagcccagcgaaggcagcgccccaggcaccagcaccgagcctagtgagcaggagattaaacggatcaacaagatcagaagaagacttgtgaaagacagcaacaccaagaaggccggcaagacaggccccatgaaaaccctgctggttagagtgatgacacccgatctgagagagcggctggaaaacctgagaaagaagcctgaaaatatcccccagcccatcagcaatacatctagagccaacctgaataagctgctgaccgattacaccgaaatgaagaaggcgatcctgcatgtgtactgggaagagttccagaaggaccctgtgggcctgatgagccgggtggcccagcctgccagcaagaagatcgatcagaacaagctgaaacctgagatggacgagaagggcaacctgaccaccgccggctttgcctgctctcagtgtggccagcccctgttcgtgtacaagctggagcaggtgtctgagaagggcaaggcttacaccaactacttcggacggtgcaatgtggccgagcacgaaaagctgatcctgctggcccagctgaagcccgagaaggatagcgacgaagccgtgacatatagcctgggaaagtttgggcagagggccctggatttctacagcattcatgtgaccaaggagtccacccaccccgtgaagcccctggcccagatcgccggaaacagatacgcctccggacctgtgggaaaggccctgagcgacgcatgtatgggcacaatcgcctccttcctgtctaagtaccaggacatcatcatcgaacaccagaaggtggtgaagggcaaccagaagagactggagagcctgcgggagctggccggcaaggaaaacctggaataccctagcgtgaccctgccacctcagcctcacaccaaggagggcgttgatgcctacaacgaagtgatcgcccgggtgcgaatgtgggtgaacctgaacctgtggcagaagctgaagctaagcagagatgatgccaagcctctgctgagactgaagggattcccttcctttcctctggtcgagagacaggccaacgaagtggactggtgggacatggtgtgtaacgtgaagaagctgatcaacgagaaaaaggaggatggcaaggtgttttggcagaatctggctggctacaagagacaggaagccctgagaccatacctgagcagcgaggaagatcggaagaagggaaagaaattcgctcggtaccagctgggcgacctgctgctgcacctggaaaagaagcacggcgaggactggggaaaggtgtacgacgaggcctgggagcggattgacaagaaagtggaaggcctgagcaagcacatcaagctggaagaggaacggagaagcgaggacgcccagagcaaggccgccctgaccgactggctgcgggctaaggccagcttcgtgatcgagggcctgaaggaggccgacaaggacgagttctgcagatgcgagctgaagctgcagaagtggtacggggacctgcggggaaagcccttcgccatcgaagccgagaacagcatcctggacatcagcggcttcagcaagcagtacaactgtgccttcatctggcagaaggacggcgtgaagaagctgaacctgtacctgatcatcaactacttcaagggcggcaagctgcggttcaagaagatcaaacctgaagccttcgaagccaacagattctacaccgtgatcaacaaaaagagcggcgagatcgtgcccatggaggtgaacttcaacttcgacgaccccaacctgatcatcctgcctctggcctttggcaagagacagggcagagaattcatctggaacgacctgctgtccctggaaaccggcagcctgaagctggccaacggaagagtgatcgagaagacactgtacaacagaagaacccggcaggatgagcctgccctgttcgtggccctgaccttcgagcggcgggaggtcctggactcctccaatatcaaaccaatgaacctgatcggcgtggcaagaggcgaaaacatccccgccgtgatcgccctgaccgaccccgagggctgcccactgagccggtttaaggatagcctgggaaacccaacccacatcctgagaatcggcgagagctataaggagaagcagcggaccatccaggccaagaaggaggtggagcagcggagagccggcggctacagccggaagtacgccagcaaagccaagaatctggcagacgatatggtgagaaacaccgctagagatctgctgtactacgccgtgacccaggatgccatgctgatcttcgccaacctgagccggggcttcggccggcagggcaagcggaccttcatggccgagagacagtacacacggatggaggactggctgaccgccaagctggcctacgagggcctgagcaagacctacctgtccaagacactggcccagtacacctccaagacatgcagcaactgtgggtttaccatcaccagcgccgactacgacagggtgctggagaagctgaagaagacagcaacaggctggatgaccacaattaacggcaaggagctgaaggtggagggccagattacctactacaacagatacaagagacagaacgtagtcaaggacctgtccgtcgagctggatagactgagcgaagaatctgtgaacaacgacatctcctcctggacaaagggcagaagcggagaagctctgagcctcctgaagaaaagattctcccatagacccgtgcaggagaagttcgtgtgcctgaactgcggcttcgagacacacgcagccgagcaagccgccctgaacatcgccagatcctggctgttcctgcggagccaggagtacaagaaataccagacaaacaagacaaccggcaacaccgataagagagccttcgtcgagacctggcagtccttttaccggaagaagcttaaggaggtgtggaaacctgccgtgcggtctggcggatctggcggaggctccaccagccccaagaaaaagagaaaagtctaagctgccttctgcggggcttgccttctggccatgcccttcttctctcccttgcacctgtacctcttggtctttgaataaagcctgagtaggaaggctagcaaaaaaaaaaaaaaaaaaaaaaaaaaaaaaaaaaaaaaaaaaaaaaaaaaaaaaaaaaaaaaaaaaaaaaaaaaaaaaaa

SEQ ID NO: 13284 - RNA, 5785 nt, synthetic construct
  source 1..5785: mol_type = other RNA
aggaaataagagagaaaagaagagtaagaagaaatataagagccaccatggcccctaagaagaagcgtaaagtgagccggatggaacgcctcgtctacgaggtgcggcagaagtgcagaaacatcgaggacatctgcatctcctgcggatctctgaacgtgaccctggagcacccactgttcatcggcggcatgtgccagaactgtaaaaactgttttctggagtgtgcctatcaatacgacgatgacggctaccagagctactgcaccatctgttgcggcggaagagaggtgctgatgtgtggaaataacaactgctgccggtgcttctgcgtggaatgcgtggacctgctggtgggccccggcgccgcccaggccgctattaaggaagatccttggaactgctacatgtgcggccacaagggcacatacggcctgctgagacggagagaggactggcctagcagactgcagatgttcttcgccaataaccacgaccaggagttcgacccccctaaggtgtaccctcccgtccccgccgagaagagaaagcccatccgggtcctgagcctgttcgatggcatcgccaccggtctgctggtgctgaaggacctgggcatccaggtggataggtacattgcctccgaggtgtgcgaggactccatcaccgtgggaatggtgcgtcatcagggcaagatcatgtacgtgggcgacgtgcggagcgtgacacagaagcatatccaggagtggggccctttcgacctggtgatcggcggcagcccttgcaatgacctgagcatcgtgaacccagcccggaagggcctgtacgagggaaccggcagactgttcttcgagttttacagactgctgcacgacgcccggcctaaggaaggcgacgaccggcccttcttttggctgttcgagaatgtggtggccatgggagtcagcgacaagcgggatattagccggttcctggagagcaaccccgtgatgatcgatgccaaggaagtgagcgccgcccaccgggccagatacttctggggcaatctgcctggcatgaacagacccctggccagcaccgtgaacgacaagctggagctgcaggagtgcctggagcacggccggatcgccaagttcagcaaggtgagaaccatcaccacccgaagcaacagcatcaaacaaggcaaggaccagcactttcctgtgttcatgaacgagaaggaggacatcctgtggtgtaccgagatggagagagtgttcgggttcccagtccactacacagatgtcagcaacatgtctagactggccagacagagactgctgggaagaagctggtccgtccctgtgatcagacacctgttcgcccctctgaaggagtacttcgcctgcgtgagcagcggcaacagcaacgccaacagccggggccccagcttctctagcggcctggtgccactgtccctgagagggagccacatgggccccatggagatctacaaaaccgtgagcgcctggaagcggcagcctgtgcgcgtgctgagcctgtttcggaatatcgataaagtcctgaaaagcctgggattcctggagagcggctctggctccggcggtggcaccctgaagtacgtggaggatgtgacaaacgtggtcagacgggatgtggagaagtggggccccttcgatctggtgtacggcagcacccaacccctgggcagctcttgtgaccggtgccctggctggtacatgtttcagttccaccggatcctgcagtacgccctgccgagacaggagtcccagcggccattcttttggattttcatggacaacttgctgctgaccgaggatgaccaggaaactaccactcggttcctgcagaccgaagccgtgaccctgcaggacgtgagaggccgggactaccagaacgccatgcgggtgtggtccaacatccctggactgaaaagcaagcacgcacctctgacccctaaagaagaggagtacctgcaggcccaggtgcggagcagaagcaagctggacgcccctaaggtggatctgctggtgaagaattgcctcctgcccctgagagagtacttcaagtatttcagccagaatagtctgcccctgggaggcagcggcggcggcaggcaggagcccgtgaccttcgaggacgtggccgtgtacttcacccagaacgagtgggccagcctggacagcgtgcagagggccctgtacagggaggtgatgctggagaactacgccaacgtggccagcctggccttccccttcatcacccccgtgctggtgagccagctggagcagggcgagctgccctggggcctggacccctgggagcccatgggcagggaggccctgaggggcatctgcggcggcccaagcagcggcgcccctcctcccagcggcggcagcccagccggctccccaacctctaccgaggagggcacctctgagtccgccacccccgagagcggccctggcacctccaccgagcccagcgagggcagcgcacccggcagccctgccggcagccccacctccacagaggagggaaccagcaccgagcccagcgaaggcagcgccccaggcaccagcaccgagcctagtgagcaggagattaaacggatcaacaagatcagaagaagacttgtgaaagacagcaacaccaagaaggccggcaagacaggccccatgaaaaccctgctggttagagtgatgacacccgatctgagagagcggctggaaaacctgagaaagaagcctgaaaatatcccccagcccatcagcaatacatctagagccaacctgaataagctgctgaccgattacaccgaaatgaagaaggcgatcctgcatgtgtactgggaagagttccagaaggaccctgtgggcctgatgagccgggtggcccagcctgccagcaagaagatcgatcagaacaagctgaaacctgagatggacgagaagggcaacctgaccaccgccggctttgcctgctctcagtgtggccagcccctgttcgtgtacaagctggagcaggtgtctgagaagggcaaggcttacaccaactacttcggacggtgcaatgtggccgagcacgaaaagctgatcctgctggcccagctgaagcccgagaaggatagcgacgaagccgtgacatatagcctgggaaagtttgggcagagggccctggatttctacagcattcatgtgaccaaggagtccacccaccccgtgaagcccctggcccagatcgccggaaacagatacgcctccggacctgtgggaaaggccctgagcgacgcatgtatgggcacaatcgcctccttcctgtctaagtaccaggacatcatcatcgaacaccagaaggtggtgaagggcaaccagaagagactggagagcctgcgggagctggccggcaaggaaaacctggaataccctagcgtgaccctgccacctcagcctcacaccaaggagggcgttgatgcctacaacgaagtgatcgcccgggtgcgaatgtgggtgaacctgaacctgtggcagaagctgaagctaagcagagatgatgccaagcctctgctgagactgaagggattcccttcctttcctctggtcgagagacaggccaacgaagtggactggtgggacatggtgtgtaacgtgaagaagctgatcaacgagaaaaaggaggatggcaaggtgttttggcagaatctggctggctacaagagacaggaagccctgagaccatacctgagcagcgaggaagatcggaagaagggaaagaaattcgctcggtaccagctgggcgacctgctgctgcacctggaaaagaagcacggcgaggactggggaaaggtgtacgacgaggcctgggagcggattgacaagaaagtggaaggcctgagcaagcacatcaagctggaagaggaacggagaagcgaggacgcccagagcaaggccgccctgaccgactggctgcgggctaaggccagcttcgtgatcgagggcctgaaggaggccgacaaggacgagttctgcagatgcgagctgaagctgcagaagtggtacggggacctgcggggaaagcccttcgccatcgaagccgagaacagcatcctggacatcagcggcttcagcaagcagtacaactgtgccttcatctggcagaaggacggcgtgaagaagctgaacctgtacctgatcatcaactacttcaagggcggcaagctgcggttcaagaagatcaaacctgaagccttcgaagccaacagattctacaccgtgatcaacaaaaagagcggcgagatcgtgcccatggaggtgaacttcaacttcgacgaccccaacctgatcatcctgcctctggcctttggcaagagacagggcagagaattcatctggaacgacctgctgtccctggaaaccggcagcctgaagctggccaacggaagagtgatcgagaagacactgtacaacagaagaacccggcaggatgagcctgccctgttcgtggccctgaccttcgagcggcgggaggtcctggactcctccaatatcaaaccaatgaacctgatcggcgtggcaagaggcgaaaacatccccgccgtgatcgccctgaccgaccccgagggctgcccactgagccggtttaaggatagcctgggaaacccaacccacatcctgagaatcggcgagagctataaggagaagcagcggaccatccaggccaagaaggaggtggagcagcggagagccggcggctacagccggaagtacgccagcaaagccaagaatctggcagacgatatggtgagaaacaccgctagagatctgctgtactacgccgtgacccaggatgccatgctgatcttcgccaacctgagccggggcttcggccggcagggcaagcggaccttcatggccgagagacagtacacacggatggaggactggctgaccgccaagctggcctacgagggcctgagcaagacctacctgtccaagacactggcccagtacacctccaagacatgcagcaactgtgggtttaccatcaccagcgccgactacgacagggtgctggagaagctgaagaagacagcaacaggctggatgaccacaattaacggcaaggagctgaaggtggagggccagattacctactacaacagatacaagagacagaacgtagtcaaggacctgtccgtcgagctggatagactgagcgaagaatctgtgaacaacgacatctcctcctggacaaagggcagaagcggagaagctctgagcctcctgaagaaaagattctcccatagacccgtgcaggagaagttcgtgtgcctgaactgcggcttcgagacacacgcagccgagcaagccgccctgaacatcgccagatcctggctgttcctgcggagccaggagtacaagaaataccagacaaacaagacaaccggcaacaccgataagagagccttcgtcgagacctggcagtccttttaccggaagaagcttaaggaggtgtggaaacctgccgtgcggtctggcggatctggcggaggctccaccagccccaagaaaaagagaaaagtctaagctgccttctgcggggcttgccttctggccatgcccttcttctctcccttgcacctgtacctcttggtctttgaataaagcctgagtaggaaggctagcaaaaaaaaaaaaaaaaaaaaaaaaaaaaaaaaaaaaaaaaaaaaaaaaaaaaaaaaaaaaaaaaaaaaaaaaaaaaaaaa

SEQ ID NO: 13285 - RNA, 5785 nt, synthetic construct
  source 1..5785: mol_type = other RNA
aggaaataagagagaaaagaagagtaagaagaaatataagagccaccatggcccctaagaagaagcgtaaagtgagccggatggaacgcctcgtctacgaggtgcggcagaagtgcagaaacatcgaggacatctgcatctcctgcggatctctgaacgtgaccctggagcacccactgttcatcggcggcatgtgccagaactgtaaaaactgttttctggagtgtgcctatcaatacgacgatgacggctaccagagctactgcaccatctgttgcggcggaagagaggtgctgatgtgtggaaataacaactgctgccggtgcttctgcgtggaatgcgtggacctgctggtgggccccggcgccgcccaggccgctattaaggaagatccttggaactgctacatgtgcggccacaagggcacatacggcctgctgagacggagagaggactggcctagcagactgcagatgttcttcgccaataaccacgaccaggagttcgacccccctaaggtgtaccctcccgtccccgccgagaagagaaagcccatccgggtcctgagcctgttcgatggcatcgccaccggtctgctggtgctgaaggacctgggcatccaggtggataggtacattgcctccgaggtgtgcgaggactccatcaccgtgggaatggtgcgtcatcagggcaagatcatgtacgtgggcgacgtgcggagcgtgacacagaagcatatccaggagtggggccctttcgacctggtgatcggcggcagcccttgcaatgacctgagcatcgtgaacccagcccggaagggcctgtacgagggaaccggcagactgttcttcgagttttacagactgctgcacgacgcccggcctaaggaaggcgacgaccggcccttcttttggctgttcgagaatgtggtggccatgggagtcagcgacaagcgggatattagccggttcctggagagcaaccccgtgatgatcgatgccaaggaagtgagcgccgcccaccgggccagatacttctggggcaatctgcctggcatgaacagacccctggccagcaccgtgaacgacaagctggagctgcaggagtgcctggagcacggccggatcgccaagttcagcaaggtgagaaccatcaccacccgaagcaacagcatcaaacaaggcaaggaccagcactttcctgtgttcatgaacgagaaggaggacatcctgtggtgtaccgagatggagagagtgttcgggttcccagtccactacacagatgtcagcaacatgtctagactggccagacagagactgctgggaagaagctggtccgtccctgtgatcagacacctgttcgcccctctgaaggagtacttcgcctgcgtgagcagcggcaacagcaacgccaacagccggggccccagcttctctagcggcctggtgccactgtccctgagagggagccacatgggccccatggagatctacaaaaccgtgagcgcctggaagcggcagcctgtgcgcgtgctgagcctgtttcggaatatcgataaagtcctgaaaagcctgggattcctggagagcggctctggctccggcggtggcaccctgaagtacgtggaggatgtgacaaacgtggtcagacgggatgtggagaagtggggccccttcgatctggtgtacggcagcacccaacccctgggcagctcttgtgaccggtgccctggctggtacatgtttcagttccaccggatcctgcagtacgccctgccgagacaggagtcccagcggccattcttttggattttcatggacaacttgctgctgaccgaggatgaccaggaaactaccactcggttcctgcagaccgaagccgtgaccctgcaggacgtgagaggccgggactaccagaacgccatgcgggtgtggtccaacatccctggactgaaaagcaagcacgcacctctgacccctaaagaagaggagtacctgcaggcccaggtgcggagcagaagcaagctggacgcccctaaggtggatctgctggtgaagaattgcctcctgcccctgagagagtacttcaagtatttcagccagaatagtctgcccctgggaggcagcggcggcggcccccagaagagcgtgaccttcgaggacgtggccgtgtacttcacccaggccgagtgggacggcctgagccccgcccagaggaccctgtacagggacgtgatgctggagaactacggcaacgtggccagcctgggcttccccctgctgaagcccgccgtgatcagccagctggagggcggcggcgagctgggcggccccagccccctggccgccggcaccggcctgcacgtgctgaggaccgtgggcggcccaagcagcggcgcccctcctcccagcggcggcagcccagccggctccccaacctctaccgaggagggcacctctgagtccgccacccccgagagcggccctggcacctccaccgagcccagcgagggcagcgcacccggcagccctgccggcagccccacctccacagaggagggaaccagcaccgagcccagcgaaggcagcgccccaggcaccagcaccgagcctagtgagcaggagattaaacggatcaacaagatcagaagaagacttgtgaaagacagcaacaccaagaaggccggcaagacaggccccatgaaaaccctgctggttagagtgatgacacccgatctgagagagcggctggaaaacctgagaaagaagcctgaaaatatcccccagcccatcagcaatacatctagagccaacctgaataagctgctgaccgattacaccgaaatgaagaaggcgatcctgcatgtgtactgggaagagttccagaaggaccctgtgggcctgatgagccgggtggcccagcctgccagcaagaagatcgatcagaacaagctgaaacctgagatggacgagaagggcaacctgaccaccgccggctttgcctgctctcagtgtggccagcccctgttcgtgtacaagctggagcaggtgtctgagaagggcaaggcttacaccaactacttcggacggtgcaatgtggccgagcacgaaaagctgatcctgctggcccagctgaagcccgagaaggatagcgacgaagccgtgacatatagcctgggaaagtttgggcagagggccctggatttctacagcattcatgtgaccaaggagtccacccaccccgtgaagcccctggcccagatcgccggaaacagatacgcctccggacctgtgggaaaggccctgagcgacgcatgtatgggcacaatcgcctccttcctgtctaagtaccaggacatcatcatcgaacaccagaaggtggtgaagggcaaccagaagagactggagagcctgcgggagctggccggcaaggaaaacctggaataccctagcgtgaccctgccacctcagcctcacaccaaggagggcgttgatgcctacaacgaagtgatcgcccgggtgcgaatgtgggtgaacctgaacctgtggcagaagctgaagctaagcagagatgatgccaagcctctgctgagactgaagggattcccttcctttcctctggtcgagagacaggccaacgaagtggactggtgggacatggtgtgtaacgtgaagaagctgatcaacgagaaaaaggaggatggcaaggtgttttggcagaatctggctggctacaagagacaggaagccctgagaccatacctgagcagcgaggaagatcggaagaagggaaagaaattcgctcggtaccagctgggcgacctgctgctgcacctggaaaagaagcacggcgaggactggggaaaggtgtacgacgaggcctgggagcggattgacaagaaagtggaaggcctgagcaagcacatcaagctggaagaggaacggagaagcgaggacgcccagagcaaggccgccctgaccgactggctgcgggctaaggccagcttcgtgatcgagggcctgaaggaggccgacaaggacgagttctgcagatgcgagctgaagctgcagaagtggtacggggacctgcggggaaagcccttcgccatcgaagccgagaacagcatcctggacatcagcggcttcagcaagcagtacaactgtgccttcatctggcagaaggacggcgtgaagaagctgaacctgtacctgatcatcaactacttcaagggcggcaagctgcggttcaagaagatcaaacctgaagccttcgaagccaacagattctacaccgtgatcaacaaaaagagcggcgagatcgtgcccatggaggtgaacttcaacttcgacgaccccaacctgatcatcctgcctctggcctttggcaagagacagggcagagaattcatctggaacgacctgctgtccctggaaaccggcagcctgaagctggccaacggaagagtgatcgagaagacactgtacaacagaagaacccggcaggatgagcctgccctgttcgtggccctgaccttcgagcggcgggaggtcctggactcctccaatatcaaaccaatgaacctgatcggcgtggcaagaggcgaaaacatccccgccgtgatcgccctgaccgaccccgagggctgcccactgagccggtttaaggatagcctgggaaacccaacccacatcctgagaatcggcgagagctataaggagaagcagcggaccatccaggccaagaaggaggtggagcagcggagagccggcggctacagccggaagtacgccagcaaagccaagaatctggcagacgatatggtgagaaacaccgctagagatctgctgtactacgccgtgacccaggatgccatgctgatcttcgccaacctgagccggggcttcggccggcagggcaagcggaccttcatggccgagagacagtacacacggatggaggactggctgaccgccaagctggcctacgagggcctgagcaagacctacctgtccaagacactggcccagtacacctccaagacatgcagcaactgtgggtttaccatcaccagcgccgactacgacagggtgctggagaagctgaagaagacagcaacaggctggatgaccacaattaacggcaaggagctgaaggtggagggccagattacctactacaacagatacaagagacagaacgtagtcaaggacctgtccgtcgagctggatagactgagcgaagaatctgtgaacaacgacatctcctcctggacaaagggcagaagcggagaagctctgagcctcctgaagaaaagattctcccatagacccgtgcaggagaagttcgtgtgcctgaactgcggcttcgagacacacgcagccgagcaagccgccctgaacatcgccagatcctggctgttcctgcggagccaggagtacaagaaataccagacaaacaagacaaccggcaacaccgataagagagccttcgtcgagacctggcagtccttttaccggaagaagcttaaggaggtgtggaaacctgccgtgcggtctggcggatctggcggaggctccaccagccccaagaaaaagagaaaagtctaagctgccttctgcggggcttgccttctggccatgcccttcttctctcccttgcacctgtacctcttggtctttgaataaagcctgagtaggaaggctagcaaaaaaaaaaaaaaaaaaaaaaaaaaaaaaaaaaaaaaaaaaaaaaaaaaaaaaaaaaaaaaaaaaaaaaaaaaaaaaaa

SEQ ID NO: 13286 - RNA, 5785 nt, synthetic construct
  source 1..5785: mol_type = other RNA
aggaaataagagagaaaagaagagtaagaagaaatataagagccaccatggcccctaagaagaagcgtaaagtgagccggatggaacgcctcgtctacgaggtgcggcagaagtgcagaaacatcgaggacatctgcatctcctgcggatctctgaacgtgaccctggagcacccactgttcatcggcggcatgtgccagaactgtaaaaactgttttctggagtgtgcctatcaatacgacgatgacggctaccagagctactgcaccatctgttgcggcggaagagaggtgctgatgtgtggaaataacaactgctgccggtgcttctgcgtggaatgcgtggacctgctggtgggccccggcgccgcccaggccgctattaaggaagatccttggaactgctacatgtgcggccacaagggcacatacggcctgctgagacggagagaggactggcctagcagactgcagatgttcttcgccaataaccacgaccaggagttcgacccccctaaggtgtaccctcccgtccccgccgagaagagaaagcccatccgggtcctgagcctgttcgatggcatcgccaccggtctgctggtgctgaaggacctgggcatccaggtggataggtacattgcctccgaggtgtgcgaggactccatcaccgtgggaatggtgcgtcatcagggcaagatcatgtacgtgggcgacgtgcggagcgtgacacagaagcatatccaggagtggggccctttcgacctggtgatcggcggcagcccttgcaatgacctgagcatcgtgaacccagcccggaagggcctgtacgagggaaccggcagactgttcttcgagttttacagactgctgcacgacgcccggcctaaggaaggcgacgaccggcccttcttttggctgttcgagaatgtggtggccatgggagtcagcgacaagcgggatattagccggttcctggagagcaaccccgtgatgatcgatgccaaggaagtgagcgccgcccaccgggccagatacttctggggcaatctgcctggcatgaacagacccctggccagcaccgtgaacgacaagctggagctgcaggagtgcctggagcacggccggatcgccaagttcagcaaggtgagaaccatcaccacccgaagcaacagcatcaaacaaggcaaggaccagcactttcctgtgttcatgaacgagaaggaggacatcctgtggtgtaccgagatggagagagtgttcgggttcccagtccactacacagatgtcagcaacatgtctagactggccagacagagactgctgggaagaagctggtccgtccctgtgatcagacacctgttcgcccctctgaaggagtacttcgcctgcgtgagcagcggcaacagcaacgccaacagccggggccccagcttctctagcggcctggtgccactgtccctgagagggagccacatgggccccatggagatctacaaaaccgtgagcgcctggaagcggcagcctgtgcgcgtgctgagcctgtttcggaatatcgataaagtcctgaaaagcctgggattcctggagagcggctctggctccggcggtggcaccctgaagtacgtggaggatgtgacaaacgtggtcagacgggatgtggagaagtggggccccttcgatctggtgtacggcagcacccaacccctgggcagctcttgtgaccggtgccctggctggtacatgtttcagttccaccggatcctgcagtacgccctgccgagacaggagtcccagcggccattcttttggattttcatggacaacttgctgctgaccgaggatgaccaggaaactaccactcggttcctgcagaccgaagccgtgaccctgcaggacgtgagaggccgggactaccagaacgccatgcgggtgtggtccaacatccctggactgaaaagcaagcacgcacctctgacccctaaagaagaggagtacctgcaggcccaggtgcggagcagaagcaagctggacgcccctaaggtggatctgctggtgaagaattgcctcctgcccctgagagagtacttcaagtatttcagccagaatagtctgcccctgggaggcagcggcggcggcaagcccgaggacgtgagcttcgccgaggtggccgtgtacttcagcctggacgagtggggctacctgtggcccgcccagagggccctgtacagggacgtgatgagggagacctacggccacttcggcgagctgggcttccccggccccaagcccgccctgatcagctggatggagcaggagagcgaggcctggagccccgccgcccaggaccccgaggagggcgagagcgtgggcggcgccgtgggcggcccaagcagcggcgcccctcctcccagcggcggcagcccagccggctccccaacctctaccgaggagggcacctctgagtccgccacccccgagagcggccctggcacctccaccgagcccagcgagggcagcgcacccggcagccctgccggcagccccacctccacagaggagggaaccagcaccgagcccagcgaaggcagcgccccaggcaccagcaccgagcctagtgagcaggagattaaacggatcaacaagatcagaagaagacttgtgaaagacagcaacaccaagaaggccggcaagacaggccccatgaaaaccctgctggttagagtgatgacacccgatctgagagagcggctggaaaacctgagaaagaagcctgaaaatatcccccagcccatcagcaatacatctagagccaacctgaataagctgctgaccgattacaccgaaatgaagaaggcgatcctgcatgtgtactgggaagagttccagaaggaccctgtgggcctgatgagccgggtggcccagcctgccagcaagaagatcgatcagaacaagctgaaacctgagatggacgagaagggcaacctgaccaccgccggctttgcctgctctcagtgtggccagcccctgttcgtgtacaagctggagcaggtgtctgagaagggcaaggcttacaccaactacttcggacggtgcaatgtggccgagcacgaaaagctgatcctgctggcccagctgaagcccgagaaggatagcgacgaagccgtgacatatagcctgggaaagtttgggcagagggccctggatttctacagcattcatgtgaccaaggagtccacccaccccgtgaagcccctggcccagatcgccggaaacagatacgcctccggacctgtgggaaaggccctgagcgacgcatgtatgggcacaatcgcctccttcctgtctaagtaccaggacatcatcatcgaacaccagaaggtggtgaagggcaaccagaagagactggagagcctgcgggagctggccggcaaggaaaacctggaataccctagcgtgaccctgccacctcagcctcacaccaaggagggcgttgatgcctacaacgaagtgatcgcccgggtgcgaatgtgggtgaacctgaacctgtggcagaagctgaagctaagcagagatgatgccaagcctctgctgagactgaagggattcccttcctttcctctggtcgagagacaggccaacgaagtggactggtgggacatggtgtgtaacgtgaagaagctgatcaacgagaaaaaggaggatggcaaggtgttttggcagaatctggctggctacaagagacaggaagccctgagaccatacctgagcagcgaggaagatcggaagaagggaaagaaattcgctcggtaccagctgggcgacctgctgctgcacctggaaaagaagcacggcgaggactggggaaaggtgtacgacgaggcctgggagcggattgacaagaaagtggaaggcctgagcaagcacatcaagctggaagaggaacggagaagcgaggacgcccagagcaaggccgccctgaccgactggctgcgggctaaggccagcttcgtgatcgagggcctgaaggaggccgacaaggacgagttctgcagatgcgagctgaagctgcagaagtggtacggggacctgcggggaaagcccttcgccatcgaagccgagaacagcatcctggacatcagcggcttcagcaagcagtacaactgtgccttcatctggcagaaggacggcgtgaagaagctgaacctgtacctgatcatcaactacttcaagggcggcaagctgcggttcaagaagatcaaacctgaagccttcgaagccaacagattctacaccgtgatcaacaaaaagagcggcgagatcgtgcccatggaggtgaacttcaacttcgacgaccccaacctgatcatcctgcctctggcctttggcaagagacagggcagagaattcatctggaacgacctgctgtccctggaaaccggcagcctgaagctggccaacggaagagtgatcgagaagacactgtacaacagaagaacccggcaggatgagcctgccctgttcgtggccctgaccttcgagcggcgggaggtcctggactcctccaatatcaaaccaatgaacctgatcggcgtggcaagaggcgaaaacatccccgccgtgatcgccctgaccgaccccgagggctgcccactgagccggtttaaggatagcctgggaaacccaacccacatcctgagaatcggcgagagctataaggagaagcagcggaccatccaggccaagaaggaggtggagcagcggagagccggcggctacagccggaagtacgccagcaaagccaagaatctggcagacgatatggtgagaaacaccgctagagatctgctgtactacgccgtgacccaggatgccatgctgatcttcgccaacctgagccggggcttcggccggcagggcaagcggaccttcatggccgagagacagtacacacggatggaggactggctgaccgccaagctggcctacgagggcctgagcaagacctacctgtccaagacactggcccagtacacctccaagacatgcagcaactgtgggtttaccatcaccagcgccgactacgacagggtgctggagaagctgaagaagacagcaacaggctggatgaccacaattaacggcaaggagctgaaggtggagggccagattacctactacaacagatacaagagacagaacgtagtcaaggacctgtccgtcgagctggatagactgagcgaagaatctgtgaacaacgacatctcctcctggacaaagggcagaagcggagaagctctgagcctcctgaagaaaagattctcccatagacccgtgcaggagaagttcgtgtgcctgaactgcggcttcgagacacacgcagccgagcaagccgccctgaacatcgccagatcctggctgttcctgcggagccaggagtacaagaaataccagacaaacaagacaaccggcaacaccgataagagagccttcgtcgagacctggcagtccttttaccggaagaagcttaaggaggtgtggaaacctgccgtgcggtctggcggatctggcggaggctccaccagccccaagaaaaagagaaaagtctaagctgccttctgcggggcttgccttctggccatgcccttcttctctcccttgcacctgtacctcttggtctttgaataaagcctgagtaggaaggctagcaaaaaaaaaaaaaaaaaaaaaaaaaaaaaaaaaaaaaaaaaaaaaaaaaaaaaaaaaaaaaaaaaaaaaaaaaaaaaaaa

SEQ ID NO: 13287 - RNA, 5785 nt, synthetic construct
  source 1..5785: mol_type = other RNA
aggaaataagagagaaaagaagagtaagaagaaatataagagccaccatggcccctaagaagaagcgtaaagtgagccggatggaacgcctcgtctacgaggtgcggcagaagtgcagaaacatcgaggacatctgcatctcctgcggatctctgaacgtgaccctggagcacccactgttcatcggcggcatgtgccagaactgtaaaaactgttttctggagtgtgcctatcaatacgacgatgacggctaccagagctactgcaccatctgttgcggcggaagagaggtgctgatgtgtggaaataacaactgctgccggtgcttctgcgtggaatgcgtggacctgctggtgggccccggcgccgcccaggccgctattaaggaagatccttggaactgctacatgtgcggccacaagggcacatacggcctgctgagacggagagaggactggcctagcagactgcagatgttcttcgccaataaccacgaccaggagttcgacccccctaaggtgtaccctcccgtccccgccgagaagagaaagcccatccgggtcctgagcctgttcgatggcatcgccaccggtctgctggtgctgaaggacctgggcatccaggtggataggtacattgcctccgaggtgtgcgaggactccatcaccgtgggaatggtgcgtcatcagggcaagatcatgtacgtgggcgacgtgcggagcgtgacacagaagcatatccaggagtggggccctttcgacctggtgatcggcggcagcccttgcaatgacctgagcatcgtgaacccagcccggaagggcctgtacgagggaaccggcagactgttcttcgagttttacagactgctgcacgacgcccggcctaaggaaggcgacgaccggcccttcttttggctgttcgagaatgtggtggccatgggagtcagcgacaagcgggatattagccggttcctggagagcaaccccgtgatgatcgatgccaaggaagtgagcgccgcccaccgggccagatacttctggggcaatctgcctggcatgaacagacccctggccagcaccgtgaacgacaagctggagctgcaggagtgcctggagcacggccggatcgccaagttcagcaaggtgagaaccatcaccacccgaagcaacagcatcaaacaaggcaaggaccagcactttcctgtgttcatgaacgagaaggaggacatcctgtggtgtaccgagatggagagagtgttcgggttcccagtccactacacagatgtcagcaacatgtctagactggccagacagagactgctgggaagaagctggtccgtccctgtgatcagacacctgttcgcccctctgaaggagtacttcgcctgcgtgagcagcggcaacagcaacgccaacagccggggccccagcttctctagcggcctggtgccactgtccctgagagggagccacatgggccccatggagatctacaaaaccgtgagcgcctggaagcggcagcctgtgcgcgtgctgagcctgtttcggaatatcgataaagtcctgaaaagcctgggattcctggagagcggctctggctccggcggtggcaccctgaagtacgtggaggatgtgacaaacgtggtcagacgggatgtggagaagtggggccccttcgatctggtgtacggcagcacccaacccctgggcagctcttgtgaccggtgccctggctggtacatgtttcagttccaccggatcctgcagtacgccctgccgagacaggagtcccagcggccattcttttggattttcatggacaacttgctgctgaccgaggatgaccaggaaactaccactcggttcctgcagaccgaagccgtgaccctgcaggacgtgagaggccgggactaccagaacgccatgcgggtgtggtccaacatccctggactgaaaagcaagcacgcacctctgacccctaaagaagaggagtacctgcaggcccaggtgcggagcagaagcaagctggacgcccctaaggtggatctgctggtgaagaattgcctcctgcccctgagagagtacttcaagtatttcagccagaatagtctgcccctgggaggcagcggcggcggcagccagggcagcgtgaccttcagggacgtggccatcgacttcagccaggaggagtggaagtggctgcagcccgcccagagggacctgtacaggtgcgtgatgctggagaactacggccacctggtgagcctgggcctgagcatcagcaagcccgacgtggtgagcctgctggagcagggcaaggagccctggctgggcaagagggaggtgaagagggacctgttcagcgtgagcgagagcagcggcggcccaagcagcggcgcccctcctcccagcggcggcagcccagccggctccccaacctctaccgaggagggcacctctgagtccgccacccccgagagcggccctggcacctccaccgagcccagcgagggcagcgcacccggcagccctgccggcagccccacctccacagaggagggaaccagcaccgagcccagcgaaggcagcgccccaggcaccagcaccgagcctagtgagcaggagattaaacggatcaacaagatcagaagaagacttgtgaaagacagcaacaccaagaaggccggcaagacaggccccatgaaaaccctgctggttagagtgatgacacccgatctgagagagcggctggaaaacctgagaaagaagcctgaaaatatcccccagcccatcagcaatacatctagagccaacctgaataagctgctgaccgattacaccgaaatgaagaaggcgatcctgcatgtgtactgggaagagttccagaaggaccctgtgggcctgatgagccgggtggcccagcctgccagcaagaagatcgatcagaacaagctgaaacctgagatggacgagaagggcaacctgaccaccgccggctttgcctgctctcagtgtggccagcccctgttcgtgtacaagctggagcaggtgtctgagaagggcaaggcttacaccaactacttcggacggtgcaatgtggccgagcacgaaaagctgatcctgctggcccagctgaagcccgagaaggatagcgacgaagccgtgacatatagcctgggaaagtttgggcagagggccctggatttctacagcattcatgtgaccaaggagtccacccaccccgtgaagcccctggcccagatcgccggaaacagatacgcctccggacctgtgggaaaggccctgagcgacgcatgtatgggcacaatcgcctccttcctgtctaagtaccaggacatcatcatcgaacaccagaaggtggtgaagggcaaccagaagagactggagagcctgcgggagctggccggcaaggaaaacctggaataccctagcgtgaccctgccacctcagcctcacaccaaggagggcgttgatgcctacaacgaagtgatcgcccgggtgcgaatgtgggtgaacctgaacctgtggcagaagctgaagctaagcagagatgatgccaagcctctgctgagactgaagggattcccttcctttcctctggtcgagagacaggccaacgaagtggactggtgggacatggtgtgtaacgtgaagaagctgatcaacgagaaaaaggaggatggcaaggtgttttggcagaatctggctggctacaagagacaggaagccctgagaccatacctgagcagcgaggaagatcggaagaagggaaagaaattcgctcggtaccagctgggcgacctgctgctgcacctggaaaagaagcacggcgaggactggggaaaggtgtacgacgaggcctgggagcggattgacaagaaagtggaaggcctgagcaagcacatcaagctggaagaggaacggagaagcgaggacgcccagagcaaggccgccctgaccgactggctgcgggctaaggccagcttcgtgatcgagggcctgaaggaggccgacaaggacgagttctgcagatgcgagctgaagctgcagaagtggtacggggacctgcggggaaagcccttcgccatcgaagccgagaacagcatcctggacatcagcggcttcagcaagcagtacaactgtgccttcatctggcagaaggacggcgtgaagaagctgaacctgtacctgatcatcaactacttcaagggcggcaagctgcggttcaagaagatcaaacctgaagccttcgaagccaacagattctacaccgtgatcaacaaaaagagcggcgagatcgtgcccatggaggtgaacttcaacttcgacgaccccaacctgatcatcctgcctctggcctttggcaagagacagggcagagaattcatctggaacgacctgctgtccctggaaaccggcagcctgaagctggccaacggaagagtgatcgagaagacactgtacaacagaagaacccggcaggatgagcctgccctgttcgtggccctgaccttcgagcggcgggaggtcctggactcctccaatatcaaaccaatgaacctgatcggcgtggcaagaggcgaaaacatccccgccgtgatcgccctgaccgaccccgagggctgcccactgagccggtttaaggatagcctgggaaacccaacccacatcctgagaatcggcgagagctataaggagaagcagcggaccatccaggccaagaaggaggtggagcagcggagagccggcggctacagccggaagtacgccagcaaagccaagaatctggcagacgatatggtgagaaacaccgctagagatctgctgtactacgccgtgacccaggatgccatgctgatcttcgccaacctgagccggggcttcggccggcagggcaagcggaccttcatggccgagagacagtacacacggatggaggactggctgaccgccaagctggcctacgagggcctgagcaagacctacctgtccaagacactggcccagtacacctccaagacatgcagcaactgtgggtttaccatcaccagcgccgactacgacagggtgctggagaagctgaagaagacagcaacaggctggatgaccacaattaacggcaaggagctgaaggtggagggccagattacctactacaacagatacaagagacagaacgtagtcaaggacctgtccgtcgagctggatagactgagcgaagaatctgtgaacaacgacatctcctcctggacaaagggcagaagcggagaagctctgagcctcctgaagaaaagattctcccatagacccgtgcaggagaagttcgtgtgcctgaactgcggcttcgagacacacgcagccgagcaagccgccctgaacatcgccagatcctggctgttcctgcggagccaggagtacaagaaataccagacaaacaagacaaccggcaacaccgataagagagccttcgtcgagacctggcagtccttttaccggaagaagcttaaggaggtgtggaaacctgccgtgcggtctggcggatctggcggaggctccaccagccccaagaaaaagagaaaagtctaagctgccttctgcggggcttgccttctggccatgcccttcttctctcccttgcacctgtacctcttggtctttgaataaagcctgagtaggaaggctagcaaaaaaaaaaaaaaaaaaaaaaaaaaaaaaaaaaaaaaaaaaaaaaaaaaaaaaaaaaaaaaaaaaaaaaaaaaaaaaaa

SEQ ID NO: 13288 - RNA, 5785 nt, synthetic construct
  source 1..5785: mol_type = other RNA
aggaaataagagagaaaagaagagtaagaagaaatataagagccaccatggcccctaagaagaagcgtaaagtgagccggatggaacgcctcgtctacgaggtgcggcagaagtgcagaaacatcgaggacatctgcatctcctgcggatctctgaacgtgaccctggagcacccactgttcatcggcggcatgtgccagaactgtaaaaactgttttctggagtgtgcctatcaatacgacgatgacggctaccagagctactgcaccatctgttgcggcggaagagaggtgctgatgtgtggaaataacaactgctgccggtgcttctgcgtggaatgcgtggacctgctggtgggccccggcgccgcccaggccgctattaaggaagatccttggaactgctacatgtgcggccacaagggcacatacggcctgctgagacggagagaggactggcctagcagactgcagatgttcttcgccaataaccacgaccaggagttcgacccccctaaggtgtaccctcccgtccccgccgagaagagaaagcccatccgggtcctgagcctgttcgatggcatcgccaccggtctgctggtgctgaaggacctgggcatccaggtggataggtacattgcctccgaggtgtgcgaggactccatcaccgtgggaatggtgcgtcatcagggcaagatcatgtacgtgggcgacgtgcggagcgtgacacagaagcatatccaggagtggggccctttcgacctggtgatcggcggcagcccttgcaatgacctgagcatcgtgaacccagcccggaagggcctgtacgagggaaccggcagactgttcttcgagttttacagactgctgcacgacgcccggcctaaggaaggcgacgaccggcccttcttttggctgttcgagaatgtggtggccatgggagtcagcgacaagcgggatattagccggttcctggagagcaaccccgtgatgatcgatgccaaggaagtgagcgccgcccaccgggccagatacttctggggcaatctgcctggcatgaacagacccctggccagcaccgtgaacgacaagctggagctgcaggagtgcctggagcacggccggatcgccaagttcagcaaggtgagaaccatcaccacccgaagcaacagcatcaaacaaggcaaggaccagcactttcctgtgttcatgaacgagaaggaggacatcctgtggtgtaccgagatggagagagtgttcgggttcccagtccactacacagatgtcagcaacatgtctagactggccagacagagactgctgggaagaagctggtccgtccctgtgatcagacacctgttcgcccctctgaaggagtacttcgcctgcgtgagcagcggcaacagcaacgccaacagccggggccccagcttctctagcggcctggtgccactgtccctgagagggagccacatgggccccatggagatctacaaaaccgtgagcgcctggaagcggcagcctgtgcgcgtgctgagcctgtttcggaatatcgataaagtcctgaaaagcctgggattcctggagagcggctctggctccggcggtggcaccctgaagtacgtggaggatgtgacaaacgtggtcagacgggatgtggagaagtggggccccttcgatctggtgtacggcagcacccaacccctgggcagctcttgtgaccggtgccctggctggtacatgtttcagttccaccggatcctgcagtacgccctgccgagacaggagtcccagcggccattcttttggattttcatggacaacttgctgctgaccgaggatgaccaggaaactaccactcggttcctgcagaccgaagccgtgaccctgcaggacgtgagaggccgggactaccagaacgccatgcgggtgtggtccaacatccctggactgaaaagcaagcacgcacctctgacccctaaagaagaggagtacctgcaggcccaggtgcggagcagaagcaagctggacgcccctaaggtggatctgctggtgaagaattgcctcctgcccctgagagagtacttcaagtatttcagccagaatagtctgcccctgggaggcagcggcggcggcatgggcccccagggcgccaggaggcaggccttcctggccttcggcgacgtgaccgtggacttcacccagaaggagtggaggctgctgagccccacccagagggccctgtacagggaggtgaccctggagaactacagccacctggtgagcctgggcatcctgcacagcaagcccgagctgatcaggaggctggagcagggcgaggccccctggggcgaggagaggaggaggaggcccggccccggcggcccaagcagcggcgcccctcctcccagcggcggcagcccagccggctccccaacctctaccgaggagggcacctctgagtccgccacccccgagagcggccctggcacctccaccgagcccagcgagggcagcgcacccggcagccctgccggcagccccacctccacagaggagggaaccagcaccgagcccagcgaaggcagcgccccaggcaccagcaccgagcctagtgagcaggagattaaacggatcaacaagatcagaagaagacttgtgaaagacagcaacaccaagaaggccggcaagacaggccccatgaaaaccctgctggttagagtgatgacacccgatctgagagagcggctggaaaacctgagaaagaagcctgaaaatatcccccagcccatcagcaatacatctagagccaacctgaataagctgctgaccgattacaccgaaatgaagaaggcgatcctgcatgtgtactgggaagagttccagaaggaccctgtgggcctgatgagccgggtggcccagcctgccagcaagaagatcgatcagaacaagctgaaacctgagatggacgagaagggcaacctgaccaccgccggctttgcctgctctcagtgtggccagcccctgttcgtgtacaagctggagcaggtgtctgagaagggcaaggcttacaccaactacttcggacggtgcaatgtggccgagcacgaaaagctgatcctgctggcccagctgaagcccgagaaggatagcgacgaagccgtgacatatagcctgggaaagtttgggcagagggccctggatttctacagcattcatgtgaccaaggagtccacccaccccgtgaagcccctggcccagatcgccggaaacagatacgcctccggacctgtgggaaaggccctgagcgacgcatgtatgggcacaatcgcctccttcctgtctaagtaccaggacatcatcatcgaacaccagaaggtggtgaagggcaaccagaagagactggagagcctgcgggagctggccggcaaggaaaacctggaataccctagcgtgaccctgccacctcagcctcacaccaaggagggcgttgatgcctacaacgaagtgatcgcccgggtgcgaatgtgggtgaacctgaacctgtggcagaagctgaagctaagcagagatgatgccaagcctctgctgagactgaagggattcccttcctttcctctggtcgagagacaggccaacgaagtggactggtgggacatggtgtgtaacgtgaagaagctgatcaacgagaaaaaggaggatggcaaggtgttttggcagaatctggctggctacaagagacaggaagccctgagaccatacctgagcagcgaggaagatcggaagaagggaaagaaattcgctcggtaccagctgggcgacctgctgctgcacctggaaaagaagcacggcgaggactggggaaaggtgtacgacgaggcctgggagcggattgacaagaaagtggaaggcctgagcaagcacatcaagctggaagaggaacggagaagcgaggacgcccagagcaaggccgccctgaccgactggctgcgggctaaggccagcttcgtgatcgagggcctgaaggaggccgacaaggacgagttctgcagatgcgagctgaagctgcagaagtggtacggggacctgcggggaaagcccttcgccatcgaagccgagaacagcatcctggacatcagcggcttcagcaagcagtacaactgtgccttcatctggcagaaggacggcgtgaagaagctgaacctgtacctgatcatcaactacttcaagggcggcaagctgcggttcaagaagatcaaacctgaagccttcgaagccaacagattctacaccgtgatcaacaaaaagagcggcgagatcgtgcccatggaggtgaacttcaacttcgacgaccccaacctgatcatcctgcctctggcctttggcaagagacagggcagagaattcatctggaacgacctgctgtccctggaaaccggcagcctgaagctggccaacggaagagtgatcgagaagacactgtacaacagaagaacccggcaggatgagcctgccctgttcgtggccctgaccttcgagcggcgggaggtcctggactcctccaatatcaaaccaatgaacctgatcggcgtggcaagaggcgaaaacatccccgccgtgatcgccctgaccgaccccgagggctgcccactgagccggtttaaggatagcctgggaaacccaacccacatcctgagaatcggcgagagctataaggagaagcagcggaccatccaggccaagaaggaggtggagcagcggagagccggcggctacagccggaagtacgccagcaaagccaagaatctggcagacgatatggtgagaaacaccgctagagatctgctgtactacgccgtgacccaggatgccatgctgatcttcgccaacctgagccggggcttcggccggcagggcaagcggaccttcatggccgagagacagtacacacggatggaggactggctgaccgccaagctggcctacgagggcctgagcaagacctacctgtccaagacactggcccagtacacctccaagacatgcagcaactgtgggtttaccatcaccagcgccgactacgacagggtgctggagaagctgaagaagacagcaacaggctggatgaccacaattaacggcaaggagctgaaggtggagggccagattacctactacaacagatacaagagacagaacgtagtcaaggacctgtccgtcgagctggatagactgagcgaagaatctgtgaacaacgacatctcctcctggacaaagggcagaagcggagaagctctgagcctcctgaagaaaagattctcccatagacccgtgcaggagaagttcgtgtgcctgaactgcggcttcgagacacacgcagccgagcaagccgccctgaacatcgccagatcctggctgttcctgcggagccaggagtacaagaaataccagacaaacaagacaaccggcaacaccgataagagagccttcgtcgagacctggcagtccttttaccggaagaagcttaaggaggtgtggaaacctgccgtgcggtctggcggatctggcggaggctccaccagccccaagaaaaagagaaaagtctaagctgccttctgcggggcttgccttctggccatgcccttcttctctcccttgcacctgtacctcttggtctttgaataaagcctgagtaggaaggctagcaaaaaaaaaaaaaaaaaaaaaaaaaaaaaaaaaaaaaaaaaaaaaaaaaaaaaaaaaaaaaaaaaaaaaaaaaaaaaaaa

SEQ ID NO: 13289 - RNA, 5785 nt, synthetic construct
  source 1..5785: mol_type = other RNA
aggaaataagagagaaaagaagagtaagaagaaatataagagccaccatggcccctaagaagaagcgtaaagtgagccggatggaacgcctcgtctacgaggtgcggcagaagtgcagaaacatcgaggacatctgcatctcctgcggatctctgaacgtgaccctggagcacccactgttcatcggcggcatgtgccagaactgtaaaaactgttttctggagtgtgcctatcaatacgacgatgacggctaccagagctactgcaccatctgttgcggcggaagagaggtgctgatgtgtggaaataacaactgctgccggtgcttctgcgtggaatgcgtggacctgctggtgggccccggcgccgcccaggccgctattaaggaagatccttggaactgctacatgtgcggccacaagggcacatacggcctgctgagacggagagaggactggcctagcagactgcagatgttcttcgccaataaccacgaccaggagttcgacccccctaaggtgtaccctcccgtccccgccgagaagagaaagcccatccgggtcctgagcctgttcgatggcatcgccaccggtctgctggtgctgaaggacctgggcatccaggtggataggtacattgcctccgaggtgtgcgaggactccatcaccgtgggaatggtgcgtcatcagggcaagatcatgtacgtgggcgacgtgcggagcgtgacacagaagcatatccaggagtggggccctttcgacctggtgatcggcggcagcccttgcaatgacctgagcatcgtgaacccagcccggaagggcctgtacgagggaaccggcagactgttcttcgagttttacagactgctgcacgacgcccggcctaaggaaggcgacgaccggcccttcttttggctgttcgagaatgtggtggccatgggagtcagcgacaagcgggatattagccggttcctggagagcaaccccgtgatgatcgatgccaaggaagtgagcgccgcccaccgggccagatacttctggggcaatctgcctggcatgaacagacccctggccagcaccgtgaacgacaagctggagctgcaggagtgcctggagcacggccggatcgccaagttcagcaaggtgagaaccatcaccacccgaagcaacagcatcaaacaaggcaaggaccagcactttcctgtgttcatgaacgagaaggaggacatcctgtggtgtaccgagatggagagagtgttcgggttcccagtccactacacagatgtcagcaacatgtctagactggccagacagagactgctgggaagaagctggtccgtccctgtgatcagacacctgttcgcccctctgaaggagtacttcgcctgcgtgagcagcggcaacagcaacgccaacagccggggccccagcttctctagcggcctggtgccactgtccctgagagggagccacatgggccccatggagatctacaaaaccgtgagcgcctggaagcggcagcctgtgcgcgtgctgagcctgtttcggaatatcgataaagtcctgaaaagcctgggattcctggagagcggctctggctccggcggtggcaccctgaagtacgtggaggatgtgacaaacgtggtcagacgggatgtggagaagtggggccccttcgatctggtgtacggcagcacccaacccctgggcagctcttgtgaccggtgccctggctggtacatgtttcagttccaccggatcctgcagtacgccctgccgagacaggagtcccagcggccattcttttggattttcatggacaacttgctgctgaccgaggatgaccaggaaactaccactcggttcctgcagaccgaagccgtgaccctgcaggacgtgagaggccgggactaccagaacgccatgcgggtgtggtccaacatccctggactgaaaagcaagcacgcacctctgacccctaaagaagaggagtacctgcaggcccaggtgcggagcagaagcaagctggacgcccctaaggtggatctgctggtgaagaattgcctcctgcccctgagagagtacttcaagtatttcagccagaatagtctgcccctgggaggcagcggcggcggcagccaggtgagcgtgaccttcgaggacgtggccgtgctgttcagcagggacgagtggaggaggctgggccccagccagaagaacctgtaccaggacgtgatgctggagaactacagcaacctggtgagcctgggcctgcccttcagcaagcccaaggtgatcagcctgctgcagcagggcgaggacccctggaaggtggagaaggagagccccggcagcttccccggctgcaagagcagccccggcggcccaagcagcggcgcccctcctcccagcggcggcagcccagccggctccccaacctctaccgaggagggcacctctgagtccgccacccccgagagcggccctggcacctccaccgagcccagcgagggcagcgcacccggcagccctgccggcagccccacctccacagaggagggaaccagcaccgagcccagcgaaggcagcgccccaggcaccagcaccgagcctagtgagcaggagattaaacggatcaacaagatcagaagaagacttgtgaaagacagcaacaccaagaaggccggcaagacaggccccatgaaaaccctgctggttagagtgatgacacccgatctgagagagcggctggaaaacctgagaaagaagcctgaaaatatcccccagcccatcagcaatacatctagagccaacctgaataagctgctgaccgattacaccgaaatgaagaaggcgatcctgcatgtgtactgggaagagttccagaaggaccctgtgggcctgatgagccgggtggcccagcctgccagcaagaagatcgatcagaacaagctgaaacctgagatggacgagaagggcaacctgaccaccgccggctttgcctgctctcagtgtggccagcccctgttcgtgtacaagctggagcaggtgtctgagaagggcaaggcttacaccaactacttcggacggtgcaatgtggccgagcacgaaaagctgatcctgctggcccagctgaagcccgagaaggatagcgacgaagccgtgacatatagcctgggaaagtttgggcagagggccctggatttctacagcattcatgtgaccaaggagtccacccaccccgtgaagcccctggcccagatcgccggaaacagatacgcctccggacctgtgggaaaggccctgagcgacgcatgtatgggcacaatcgcctccttcctgtctaagtaccaggacatcatcatcgaacaccagaaggtggtgaagggcaaccagaagagactggagagcctgcgggagctggccggcaaggaaaacctggaataccctagcgtgaccctgccacctcagcctcacaccaaggagggcgttgatgcctacaacgaagtgatcgcccgggtgcgaatgtgggtgaacctgaacctgtggcagaagctgaagctaagcagagatgatgccaagcctctgctgagactgaagggattcccttcctttcctctggtcgagagacaggccaacgaagtggactggtgggacatggtgtgtaacgtgaagaagctgatcaacgagaaaaaggaggatggcaaggtgttttggcagaatctggctggctacaagagacaggaagccctgagaccatacctgagcagcgaggaagatcggaagaagggaaagaaattcgctcggtaccagctgggcgacctgctgctgcacctggaaaagaagcacggcgaggactggggaaaggtgtacgacgaggcctgggagcggattgacaagaaagtggaaggcctgagcaagcacatcaagctggaagaggaacggagaagcgaggacgcccagagcaaggccgccctgaccgactggctgcgggctaaggccagcttcgtgatcgagggcctgaaggaggccgacaaggacgagttctgcagatgcgagctgaagctgcagaagtggtacggggacctgcggggaaagcccttcgccatcgaagccgagaacagcatcctggacatcagcggcttcagcaagcagtacaactgtgccttcatctggcagaaggacggcgtgaagaagctgaacctgtacctgatcatcaactacttcaagggcggcaagctgcggttcaagaagatcaaacctgaagccttcgaagccaacagattctacaccgtgatcaacaaaaagagcggcgagatcgtgcccatggaggtgaacttcaacttcgacgaccccaacctgatcatcctgcctctggcctttggcaagagacagggcagagaattcatctggaacgacctgctgtccctggaaaccggcagcctgaagctggccaacggaagagtgatcgagaagacactgtacaacagaagaacccggcaggatgagcctgccctgttcgtggccctgaccttcgagcggcgggaggtcctggactcctccaatatcaaaccaatgaacctgatcggcgtggcaagaggcgaaaacatccccgccgtgatcgccctgaccgaccccgagggctgcccactgagccggtttaaggatagcctgggaaacccaacccacatcctgagaatcggcgagagctataaggagaagcagcggaccatccaggccaagaaggaggtggagcagcggagagccggcggctacagccggaagtacgccagcaaagccaagaatctggcagacgatatggtgagaaacaccgctagagatctgctgtactacgccgtgacccaggatgccatgctgatcttcgccaacctgagccggggcttcggccggcagggcaagcggaccttcatggccgagagacagtacacacggatggaggactggctgaccgccaagctggcctacgagggcctgagcaagacctacctgtccaagacactggcccagtacacctccaagacatgcagcaactgtgggtttaccatcaccagcgccgactacgacagggtgctggagaagctgaagaagacagcaacaggctggatgaccacaattaacggcaaggagctgaaggtggagggccagattacctactacaacagatacaagagacagaacgtagtcaaggacctgtccgtcgagctggatagactgagcgaagaatctgtgaacaacgacatctcctcctggacaaagggcagaagcggagaagctctgagcctcctgaagaaaagattctcccatagacccgtgcaggagaagttcgtgtgcctgaactgcggcttcgagacacacgcagccgagcaagccgccctgaacatcgccagatcctggctgttcctgcggagccaggagtacaagaaataccagacaaacaagacaaccggcaacaccgataagagagccttcgtcgagacctggcagtccttttaccggaagaagcttaaggaggtgtggaaacctgccgtgcggtctggcggatctggcggaggctccaccagccccaagaaaaagagaaaagtctaagctgccttctgcggggcttgccttctggccatgcccttcttctctcccttgcacctgtacctcttggtctttgaataaagcctgagtaggaaggctagcaaaaaaaaaaaaaaaaaaaaaaaaaaaaaaaaaaaaaaaaaaaaaaaaaaaaaaaaaaaaaaaaaaaaaaaaaaaaaaaa

SEQ ID NO: 13290 - RNA, 5785 nt, synthetic construct
  source 1..5785: mol_type = other RNA
aggaaataagagagaaaagaagagtaagaagaaatataagagccaccatggcccctaagaagaagcgtaaagtgagccggatggaacgcctcgtctacgaggtgcggcagaagtgcagaaacatcgaggacatctgcatctcctgcggatctctgaacgtgaccctggagcacccactgttcatcggcggcatgtgccagaactgtaaaaactgttttctggagtgtgcctatcaatacgacgatgacggctaccagagctactgcaccatctgttgcggcggaagagaggtgctgatgtgtggaaataacaactgctgccggtgcttctgcgtggaatgcgtggacctgctggtgggccccggcgccgcccaggccgctattaaggaagatccttggaactgctacatgtgcggccacaagggcacatacggcctgctgagacggagagaggactggcctagcagactgcagatgttcttcgccaataaccacgaccaggagttcgacccccctaaggtgtaccctcccgtccccgccgagaagagaaagcccatccgggtcctgagcctgttcgatggcatcgccaccggtctgctggtgctgaaggacctgggcatccaggtggataggtacattgcctccgaggtgtgcgaggactccatcaccgtgggaatggtgcgtcatcagggcaagatcatgtacgtgggcgacgtgcggagcgtgacacagaagcatatccaggagtggggccctttcgacctggtgatcggcggcagcccttgcaatgacctgagcatcgtgaacccagcccggaagggcctgtacgagggaaccggcagactgttcttcgagttttacagactgctgcacgacgcccggcctaaggaaggcgacgaccggcccttcttttggctgttcgagaatgtggtggccatgggagtcagcgacaagcgggatattagccggttcctggagagcaaccccgtgatgatcgatgccaaggaagtgagcgccgcccaccgggccagatacttctggggcaatctgcctggcatgaacagacccctggccagcaccgtgaacgacaagctggagctgcaggagtgcctggagcacggccggatcgccaagttcagcaaggtgagaaccatcaccacccgaagcaacagcatcaaacaaggcaaggaccagcactttcctgtgttcatgaacgagaaggaggacatcctgtggtgtaccgagatggagagagtgttcgggttcccagtccactacacagatgtcagcaacatgtctagactggccagacagagactgctgggaagaagctggtccgtccctgtgatcagacacctgttcgcccctctgaaggagtacttcgcctgcgtgagcagcggcaacagcaacgccaacagccggggccccagcttctctagcggcctggtgccactgtccctgagagggagccacatgggccccatggagatctacaaaaccgtgagcgcctggaagcggcagcctgtgcgcgtgctgagcctgtttcggaatatcgataaagtcctgaaaagcctgggattcctggagagcggctctggctccggcggtggcaccctgaagtacgtggaggatgtgacaaacgtggtcagacgggatgtggagaagtggggccccttcgatctggtgtacggcagcacccaacccctgggcagctcttgtgaccggtgccctggctggtacatgtttcagttccaccggatcctgcagtacgccctgccgagacaggagtcccagcggccattcttttggattttcatggacaacttgctgctgaccgaggatgaccaggaaactaccactcggttcctgcagaccgaagccgtgaccctgcaggacgtgagaggccgggactaccagaacgccatgcgggtgtggtccaacatccctggactgaaaagcaagcacgcacctctgacccctaaagaagaggagtacctgcaggcccaggtgcggagcagaagcaagctggacgcccctaaggtggatctgctggtgaagaattgcctcctgcccctgagagagtacttcaagtatttcagccagaatagtctgcccctgggaggcagcggcggcggcaagcccggcaccgtgagcttcgccgacgtggccgtgtacttcagcagggaggagtggggctacctgaggcccgcccagagggccctgtacagggacgtgatgagggagacctactgccacctgggcgccctgggcgtgggcggcagcaagcccgccctgatcagctgggtggaggaggaggccgagctgtgggaccccgccgccagggaccccgaggtgaccaagggcctgaccgagaccgacggcggcccaagcagcggcgcccctcctcccagcggcggcagcccagccggctccccaacctctaccgaggagggcacctctgagtccgccacccccgagagcggccctggcacctccaccgagcccagcgagggcagcgcacccggcagccctgccggcagccccacctccacagaggagggaaccagcaccgagcccagcgaaggcagcgccccaggcaccagcaccgagcctagtgagcaggagattaaacggatcaacaagatcagaagaagacttgtgaaagacagcaacaccaagaaggccggcaagacaggccccatgaaaaccctgctggttagagtgatgacacccgatctgagagagcggctggaaaacctgagaaagaagcctgaaaatatcccccagcccatcagcaatacatctagagccaacctgaataagctgctgaccgattacaccgaaatgaagaaggcgatcctgcatgtgtactgggaagagttccagaaggaccctgtgggcctgatgagccgggtggcccagcctgccagcaagaagatcgatcagaacaagctgaaacctgagatggacgagaagggcaacctgaccaccgccggctttgcctgctctcagtgtggccagcccctgttcgtgtacaagctggagcaggtgtctgagaagggcaaggcttacaccaactacttcggacggtgcaatgtggccgagcacgaaaagctgatcctgctggcccagctgaagcccgagaaggatagcgacgaagccgtgacatatagcctgggaaagtttgggcagagggccctggatttctacagcattcatgtgaccaaggagtccacccaccccgtgaagcccctggcccagatcgccggaaacagatacgcctccggacctgtgggaaaggccctgagcgacgcatgtatgggcacaatcgcctccttcctgtctaagtaccaggacatcatcatcgaacaccagaaggtggtgaagggcaaccagaagagactggagagcctgcgggagctggccggcaaggaaaacctggaataccctagcgtgaccctgccacctcagcctcacaccaaggagggcgttgatgcctacaacgaagtgatcgcccgggtgcgaatgtgggtgaacctgaacctgtggcagaagctgaagctaagcagagatgatgccaagcctctgctgagactgaagggattcccttcctttcctctggtcgagagacaggccaacgaagtggactggtgggacatggtgtgtaacgtgaagaagctgatcaacgagaaaaaggaggatggcaaggtgttttggcagaatctggctggctacaagagacaggaagccctgagaccatacctgagcagcgaggaagatcggaagaagggaaagaaattcgctcggtaccagctgggcgacctgctgctgcacctggaaaagaagcacggcgaggactggggaaaggtgtacgacgaggcctgggagcggattgacaagaaagtggaaggcctgagcaagcacatcaagctggaagaggaacggagaagcgaggacgcccagagcaaggccgccctgaccgactggctgcgggctaaggccagcttcgtgatcgagggcctgaaggaggccgacaaggacgagttctgcagatgcgagctgaagctgcagaagtggtacggggacctgcggggaaagcccttcgccatcgaagccgagaacagcatcctggacatcagcggcttcagcaagcagtacaactgtgccttcatctggcagaaggacggcgtgaagaagctgaacctgtacctgatcatcaactacttcaagggcggcaagctgcggttcaagaagatcaaacctgaagccttcgaagccaacagattctacaccgtgatcaacaaaaagagcggcgagatcgtgcccatggaggtgaacttcaacttcgacgaccccaacctgatcatcctgcctctggcctttggcaagagacagggcagagaattcatctggaacgacctgctgtccctggaaaccggcagcctgaagctggccaacggaagagtgatcgagaagacactgtacaacagaagaacccggcaggatgagcctgccctgttcgtggccctgaccttcgagcggcgggaggtcctggactcctccaatatcaaaccaatgaacctgatcggcgtggcaagaggcgaaaacatccccgccgtgatcgccctgaccgaccccgagggctgcccactgagccggtttaaggatagcctgggaaacccaacccacatcctgagaatcggcgagagctataaggagaagcagcggaccatccaggccaagaaggaggtggagcagcggagagccggcggctacagccggaagtacgccagcaaagccaagaatctggcagacgatatggtgagaaacaccgctagagatctgctgtactacgccgtgacccaggatgccatgctgatcttcgccaacctgagccggggcttcggccggcagggcaagcggaccttcatggccgagagacagtacacacggatggaggactggctgaccgccaagctggcctacgagggcctgagcaagacctacctgtccaagacactggcccagtacacctccaagacatgcagcaactgtgggtttaccatcaccagcgccgactacgacagggtgctggagaagctgaagaagacagcaacaggctggatgaccacaattaacggcaaggagctgaaggtggagggccagattacctactacaacagatacaagagacagaacgtagtcaaggacctgtccgtcgagctggatagactgagcgaagaatctgtgaacaacgacatctcctcctggacaaagggcagaagcggagaagctctgagcctcctgaagaaaagattctcccatagacccgtgcaggagaagttcgtgtgcctgaactgcggcttcgagacacacgcagccgagcaagccgccctgaacatcgccagatcctggctgttcctgcggagccaggagtacaagaaataccagacaaacaagacaaccggcaacaccgataagagagccttcgtcgagacctggcagtccttttaccggaagaagcttaaggaggtgtggaaacctgccgtgcggtctggcggatctggcggaggctccaccagccccaagaaaaagagaaaagtctaagctgccttctgcggggcttgccttctggccatgcccttcttctctcccttgcacctgtacctcttggtctttgaataaagcctgagtaggaaggctagcaaaaaaaaaaaaaaaaaaaaaaaaaaaaaaaaaaaaaaaaaaaaaaaaaaaaaaaaaaaaaaaaaaaaaaaaaaaaaaaa

SEQ ID NO: 13291 - RNA, 5785 nt, synthetic construct
  source 1..5785: mol_type = other RNA
aggaaataagagagaaaagaagagtaagaagaaatataagagccaccatggcccctaagaagaagcgtaaagtgagccggatggaacgcctcgtctacgaggtgcggcagaagtgcagaaacatcgaggacatctgcatctcctgcggatctctgaacgtgaccctggagcacccactgttcatcggcggcatgtgccagaactgtaaaaactgttttctggagtgtgcctatcaatacgacgatgacggctaccagagctactgcaccatctgttgcggcggaagagaggtgctgatgtgtggaaataacaactgctgccggtgcttctgcgtggaatgcgtggacctgctggtgggccccggcgccgcccaggccgctattaaggaagatccttggaactgctacatgtgcggccacaagggcacatacggcctgctgagacggagagaggactggcctagcagactgcagatgttcttcgccaataaccacgaccaggagttcgacccccctaaggtgtaccctcccgtccccgccgagaagagaaagcccatccgggtcctgagcctgttcgatggcatcgccaccggtctgctggtgctgaaggacctgggcatccaggtggataggtacattgcctccgaggtgtgcgaggactccatcaccgtgggaatggtgcgtcatcagggcaagatcatgtacgtgggcgacgtgcggagcgtgacacagaagcatatccaggagtggggccctttcgacctggtgatcggcggcagcccttgcaatgacctgagcatcgtgaacccagcccggaagggcctgtacgagggaaccggcagactgttcttcgagttttacagactgctgcacgacgcccggcctaaggaaggcgacgaccggcccttcttttggctgttcgagaatgtggtggccatgggagtcagcgacaagcgggatattagccggttcctggagagcaaccccgtgatgatcgatgccaaggaagtgagcgccgcccaccgggccagatacttctggggcaatctgcctggcatgaacagacccctggccagcaccgtgaacgacaagctggagctgcaggagtgcctggagcacggccggatcgccaagttcagcaaggtgagaaccatcaccacccgaagcaacagcatcaaacaaggcaaggaccagcactttcctgtgttcatgaacgagaaggaggacatcctgtggtgtaccgagatggagagagtgttcgggttcccagtccactacacagatgtcagcaacatgtctagactggccagacagagactgctgggaagaagctggtccgtccctgtgatcagacacctgttcgcccctctgaaggagtacttcgcctgcgtgagcagcggcaacagcaacgccaacagccggggccccagcttctctagcggcctggtgccactgtccctgagagggagccacatgggccccatggagatctacaaaaccgtgagcgcctggaagcggcagcctgtgcgcgtgctgagcctgtttcggaatatcgataaagtcctgaaaagcctgggattcctggagagcggctctggctccggcggtggcaccctgaagtacgtggaggatgtgacaaacgtggtcagacgggatgtggagaagtggggccccttcgatctggtgtacggcagcacccaacccctgggcagctcttgtgaccggtgccctggctggtacatgtttcagttccaccggatcctgcagtacgccctgccgagacaggagtcccagcggccattcttttggattttcatggacaacttgctgctgaccgaggatgaccaggaaactaccactcggttcctgcagaccgaagccgtgaccctgcaggacgtgagaggccgggactaccagaacgccatgcgggtgtggtccaacatccctggactgaaaagcaagcacgcacctctgacccctaaagaagaggagtacctgcaggcccaggtgcggagcagaagcaagctggacgcccctaaggtggatctgctggtgaagaattgcctcctgcccctgagagagtacttcaagtatttcagccagaatagtctgcccctgggaggcagcggcggcggcatgttcagcgacgtgagcgtggacttcagccaggaggagtgggagtgcctggaccccggccagagggacctgtacagggacgtgatgctggagaactacagcaacctgctgagcatgggcctgtacatccccaagccccaggtgatcagcctgctggagcagggcaaggagccctggatggtgggcagggagctgaccaggggcctgtgcagcgacctggagagcatgtgcgagaccaagctgggcggcccaagcagcggcgcccctcctcccagcggcggcagcccagccggctccccaacctctaccgaggagggcacctctgagtccgccacccccgagagcggccctggcacctccaccgagcccagcgagggcagcgcacccggcagccctgccggcagccccacctccacagaggagggaaccagcaccgagcccagcgaaggcagcgccccaggcaccagcaccgagcctagtgagcaggagattaaacggatcaacaagatcagaagaagacttgtgaaagacagcaacaccaagaaggccggcaagacaggccccatgaaaaccctgctggttagagtgatgacacccgatctgagagagcggctggaaaacctgagaaagaagcctgaaaatatcccccagcccatcagcaatacatctagagccaacctgaataagctgctgaccgattacaccgaaatgaagaaggcgatcctgcatgtgtactgggaagagttccagaaggaccctgtgggcctgatgagccgggtggcccagcctgccagcaagaagatcgatcagaacaagctgaaacctgagatggacgagaagggcaacctgaccaccgccggctttgcctgctctcagtgtggccagcccctgttcgtgtacaagctggagcaggtgtctgagaagggcaaggcttacaccaactacttcggacggtgcaatgtggccgagcacgaaaagctgatcctgctggcccagctgaagcccgagaaggatagcgacgaagccgtgacatatagcctgggaaagtttgggcagagggccctggatttctacagcattcatgtgaccaaggagtccacccaccccgtgaagcccctggcccagatcgccggaaacagatacgcctccggacctgtgggaaaggccctgagcgacgcatgtatgggcacaatcgcctccttcctgtctaagtaccaggacatcatcatcgaacaccagaaggtggtgaagggcaaccagaagagactggagagcctgcgggagctggccggcaaggaaaacctggaataccctagcgtgaccctgccacctcagcctcacaccaaggagggcgttgatgcctacaacgaagtgatcgcccgggtgcgaatgtgggtgaacctgaacctgtggcagaagctgaagctaagcagagatgatgccaagcctctgctgagactgaagggattcccttcctttcctctggtcgagagacaggccaacgaagtggactggtgggacatggtgtgtaacgtgaagaagctgatcaacgagaaaaaggaggatggcaaggtgttttggcagaatctggctggctacaagagacaggaagccctgagaccatacctgagcagcgaggaagatcggaagaagggaaagaaattcgctcggtaccagctgggcgacctgctgctgcacctggaaaagaagcacggcgaggactggggaaaggtgtacgacgaggcctgggagcggattgacaagaaagtggaaggcctgagcaagcacatcaagctggaagaggaacggagaagcgaggacgcccagagcaaggccgccctgaccgactggctgcgggctaaggccagcttcgtgatcgagggcctgaaggaggccgacaaggacgagttctgcagatgcgagctgaagctgcagaagtggtacggggacctgcggggaaagcccttcgccatcgaagccgagaacagcatcctggacatcagcggcttcagcaagcagtacaactgtgccttcatctggcagaaggacggcgtgaagaagctgaacctgtacctgatcatcaactacttcaagggcggcaagctgcggttcaagaagatcaaacctgaagccttcgaagccaacagattctacaccgtgatcaacaaaaagagcggcgagatcgtgcccatggaggtgaacttcaacttcgacgaccccaacctgatcatcctgcctctggcctttggcaagagacagggcagagaattcatctggaacgacctgctgtccctggaaaccggcagcctgaagctggccaacggaagagtgatcgagaagacactgtacaacagaagaacccggcaggatgagcctgccctgttcgtggccctgaccttcgagcggcgggaggtcctggactcctccaatatcaaaccaatgaacctgatcggcgtggcaagaggcgaaaacatccccgccgtgatcgccctgaccgaccccgagggctgcccactgagccggtttaaggatagcctgggaaacccaacccacatcctgagaatcggcgagagctataaggagaagcagcggaccatccaggccaagaaggaggtggagcagcggagagccggcggctacagccggaagtacgccagcaaagccaagaatctggcagacgatatggtgagaaacaccgctagagatctgctgtactacgccgtgacccaggatgccatgctgatcttcgccaacctgagccggggcttcggccggcagggcaagcggaccttcatggccgagagacagtacacacggatggaggactggctgaccgccaagctggcctacgagggcctgagcaagacctacctgtccaagacactggcccagtacacctccaagacatgcagcaactgtgggtttaccatcaccagcgccgactacgacagggtgctggagaagctgaagaagacagcaacaggctggatgaccacaattaacggcaaggagctgaaggtggagggccagattacctactacaacagatacaagagacagaacgtagtcaaggacctgtccgtcgagctggatagactgagcgaagaatctgtgaacaacgacatctcctcctggacaaagggcagaagcggagaagctctgagcctcctgaagaaaagattctcccatagacccgtgcaggagaagttcgtgtgcctgaactgcggcttcgagacacacgcagccgagcaagccgccctgaacatcgccagatcctggctgttcctgcggagccaggagtacaagaaataccagacaaacaagacaaccggcaacaccgataagagagccttcgtcgagacctggcagtccttttaccggaagaagcttaaggaggtgtggaaacctgccgtgcggtctggcggatctggcggaggctccaccagccccaagaaaaagagaaaagtctaagctgccttctgcggggcttgccttctggccatgcccttcttctctcccttgcacctgtacctcttggtctttgaataaagcctgagtaggaaggctagcaaaaaaaaaaaaaaaaaaaaaaaaaaaaaaaaaaaaaaaaaaaaaaaaaaaaaaaaaaaaaaaaaaaaaaaaaaaaaaaa

SEQ ID NO: 13292 - RNA, 5785 nt, synthetic construct
  source 1..5785: mol_type = other RNA
aggaaataagagagaaaagaagagtaagaagaaatataagagccaccatggcccctaagaagaagcgtaaagtgagccggatggaacgcctcgtctacgaggtgcggcagaagtgcagaaacatcgaggacatctgcatctcctgcggatctctgaacgtgaccctggagcacccactgttcatcggcggcatgtgccagaactgtaaaaactgttttctggagtgtgcctatcaatacgacgatgacggctaccagagctactgcaccatctgttgcggcggaagagaggtgctgatgtgtggaaataacaactgctgccggtgcttctgcgtggaatgcgtggacctgctggtgggccccggcgccgcccaggccgctattaaggaagatccttggaactgctacatgtgcggccacaagggcacatacggcctgctgagacggagagaggactggcctagcagactgcagatgttcttcgccaataaccacgaccaggagttcgacccccctaaggtgtaccctcccgtccccgccgagaagagaaagcccatccgggtcctgagcctgttcgatggcatcgccaccggtctgctggtgctgaaggacctgggcatccaggtggataggtacattgcctccgaggtgtgcgaggactccatcaccgtgggaatggtgcgtcatcagggcaagatcatgtacgtgggcgacgtgcggagcgtgacacagaagcatatccaggagtggggccctttcgacctggtgatcggcggcagcccttgcaatgacctgagcatcgtgaacccagcccggaagggcctgtacgagggaaccggcagactgttcttcgagttttacagactgctgcacgacgcccggcctaaggaaggcgacgaccggcccttcttttggctgttcgagaatgtggtggccatgggagtcagcgacaagcgggatattagccggttcctggagagcaaccccgtgatgatcgatgccaaggaagtgagcgccgcccaccgggccagatacttctggggcaatctgcctggcatgaacagacccctggccagcaccgtgaacgacaagctggagctgcaggagtgcctggagcacggccggatcgccaagttcagcaaggtgagaaccatcaccacccgaagcaacagcatcaaacaaggcaaggaccagcactttcctgtgttcatgaacgagaaggaggacatcctgtggtgtaccgagatggagagagtgttcgggttcccagtccactacacagatgtcagcaacatgtctagactggccagacagagactgctgggaagaagctggtccgtccctgtgatcagacacctgttcgcccctctgaaggagtacttcgcctgcgtgagcagcggcaacagcaacgccaacagccggggccccagcttctctagcggcctggtgccactgtccctgagagggagccacatgggccccatggagatctacaaaaccgtgagcgcctggaagcggcagcctgtgcgcgtgctgagcctgtttcggaatatcgataaagtcctgaaaagcctgggattcctggagagcggctctggctccggcggtggcaccctgaagtacgtggaggatgtgacaaacgtggtcagacgggatgtggagaagtggggccccttcgatctggtgtacggcagcacccaacccctgggcagctcttgtgaccggtgccctggctggtacatgtttcagttccaccggatcctgcagtacgccctgccgagacaggagtcccagcggccattcttttggattttcatggacaacttgctgctgaccgaggatgaccaggaaactaccactcggttcctgcagaccgaagccgtgaccctgcaggacgtgagaggccgggactaccagaacgccatgcgggtgtggtccaacatccctggactgaaaagcaagcacgcacctctgacccctaaagaagaggagtacctgcaggcccaggtgcggagcagaagcaagctggacgcccctaaggtggatctgctggtgaagaattgcctcctgcccctgagagagtacttcaagtatttcagccagaatagtctgcccctgggaggcagcggcggcggcaagcagggcggcgtgaccttcgaggacgtggccgtgtacttcagccaggaggagtggagcctgctgaacgaggcccagaggaggctgtaccacgacgtgatgctggagaacttcgccctgatcagcagcctgggctgctgctgcagggccgaggccgtggagacccccttcgagcagagcatcagcgtgggcgtgagccaggccaagacccccaaggagcccaggagcagccagaagacccacggcggcccaagcagcggcgcccctcctcccagcggcggcagcccagccggctccccaacctctaccgaggagggcacctctgagtccgccacccccgagagcggccctggcacctccaccgagcccagcgagggcagcgcacccggcagccctgccggcagccccacctccacagaggagggaaccagcaccgagcccagcgaaggcagcgccccaggcaccagcaccgagcctagtgagcaggagattaaacggatcaacaagatcagaagaagacttgtgaaagacagcaacaccaagaaggccggcaagacaggccccatgaaaaccctgctggttagagtgatgacacccgatctgagagagcggctggaaaacctgagaaagaagcctgaaaatatcccccagcccatcagcaatacatctagagccaacctgaataagctgctgaccgattacaccgaaatgaagaaggcgatcctgcatgtgtactgggaagagttccagaaggaccctgtgggcctgatgagccgggtggcccagcctgccagcaagaagatcgatcagaacaagctgaaacctgagatggacgagaagggcaacctgaccaccgccggctttgcctgctctcagtgtggccagcccctgttcgtgtacaagctggagcaggtgtctgagaagggcaaggcttacaccaactacttcggacggtgcaatgtggccgagcacgaaaagctgatcctgctggcccagctgaagcccgagaaggatagcgacgaagccgtgacatatagcctgggaaagtttgggcagagggccctggatttctacagcattcatgtgaccaaggagtccacccaccccgtgaagcccctggcccagatcgccggaaacagatacgcctccggacctgtgggaaaggccctgagcgacgcatgtatgggcacaatcgcctccttcctgtctaagtaccaggacatcatcatcgaacaccagaaggtggtgaagggcaaccagaagagactggagagcctgcgggagctggccggcaaggaaaacctggaataccctagcgtgaccctgccacctcagcctcacaccaaggagggcgttgatgcctacaacgaagtgatcgcccgggtgcgaatgtgggtgaacctgaacctgtggcagaagctgaagctaagcagagatgatgccaagcctctgctgagactgaagggattcccttcctttcctctggtcgagagacaggccaacgaagtggactggtgggacatggtgtgtaacgtgaagaagctgatcaacgagaaaaaggaggatggcaaggtgttttggcagaatctggctggctacaagagacaggaagccctgagaccatacctgagcagcgaggaagatcggaagaagggaaagaaattcgctcggtaccagctgggcgacctgctgctgcacctggaaaagaagcacggcgaggactggggaaaggtgtacgacgaggcctgggagcggattgacaagaaagtggaaggcctgagcaagcacatcaagctggaagaggaacggagaagcgaggacgcccagagcaaggccgccctgaccgactggctgcgggctaaggccagcttcgtgatcgagggcctgaaggaggccgacaaggacgagttctgcagatgcgagctgaagctgcagaagtggtacggggacctgcggggaaagcccttcgccatcgaagccgagaacagcatcctggacatcagcggcttcagcaagcagtacaactgtgccttcatctggcagaaggacggcgtgaagaagctgaacctgtacctgatcatcaactacttcaagggcggcaagctgcggttcaagaagatcaaacctgaagccttcgaagccaacagattctacaccgtgatcaacaaaaagagcggcgagatcgtgcccatggaggtgaacttcaacttcgacgaccccaacctgatcatcctgcctctggcctttggcaagagacagggcagagaattcatctggaacgacctgctgtccctggaaaccggcagcctgaagctggccaacggaagagtgatcgagaagacactgtacaacagaagaacccggcaggatgagcctgccctgttcgtggccctgaccttcgagcggcgggaggtcctggactcctccaatatcaaaccaatgaacctgatcggcgtggcaagaggcgaaaacatccccgccgtgatcgccctgaccgaccccgagggctgcccactgagccggtttaaggatagcctgggaaacccaacccacatcctgagaatcggcgagagctataaggagaagcagcggaccatccaggccaagaaggaggtggagcagcggagagccggcggctacagccggaagtacgccagcaaagccaagaatctggcagacgatatggtgagaaacaccgctagagatctgctgtactacgccgtgacccaggatgccatgctgatcttcgccaacctgagccggggcttcggccggcagggcaagcggaccttcatggccgagagacagtacacacggatggaggactggctgaccgccaagctggcctacgagggcctgagcaagacctacctgtccaagacactggcccagtacacctccaagacatgcagcaactgtgggtttaccatcaccagcgccgactacgacagggtgctggagaagctgaagaagacagcaacaggctggatgaccacaattaacggcaaggagctgaaggtggagggccagattacctactacaacagatacaagagacagaacgtagtcaaggacctgtccgtcgagctggatagactgagcgaagaatctgtgaacaacgacatctcctcctggacaaagggcagaagcggagaagctctgagcctcctgaagaaaagattctcccatagacccgtgcaggagaagttcgtgtgcctgaactgcggcttcgagacacacgcagccgagcaagccgccctgaacatcgccagatcctggctgttcctgcggagccaggagtacaagaaataccagacaaacaagacaaccggcaacaccgataagagagccttcgtcgagacctggcagtccttttaccggaagaagcttaaggaggtgtggaaacctgccgtgcggtctggcggatctggcggaggctccaccagccccaagaaaaagagaaaagtctaagctgccttctgcggggcttgccttctggccatgcccttcttctctcccttgcacctgtacctcttggtctttgaataaagcctgagtaggaaggctagcaaaaaaaaaaaaaaaaaaaaaaaaaaaaaaaaaaaaaaaaaaaaaaaaaaaaaaaaaaaaaaaaaaaaaaaaaaaaaaaa

SEQ ID NO: 13293 - RNA, 5785 nt, synthetic construct
  source 1..5785: mol_type = other RNA
aggaaataagagagaaaagaagagtaagaagaaatataagagccaccatggcccctaagaagaagcgtaaagtgagccggatggaacgcctcgtctacgaggtgcggcagaagtgcagaaacatcgaggacatctgcatctcctgcggatctctgaacgtgaccctggagcacccactgttcatcggcggcatgtgccagaactgtaaaaactgttttctggagtgtgcctatcaatacgacgatgacggctaccagagctactgcaccatctgttgcggcggaagagaggtgctgatgtgtggaaataacaactgctgccggtgcttctgcgtggaatgcgtggacctgctggtgggccccggcgccgcccaggccgctattaaggaagatccttggaactgctacatgtgcggccacaagggcacatacggcctgctgagacggagagaggactggcctagcagactgcagatgttcttcgccaataaccacgaccaggagttcgacccccctaaggtgtaccctcccgtccccgccgagaagagaaagcccatccgggtcctgagcctgttcgatggcatcgccaccggtctgctggtgctgaaggacctgggcatccaggtggataggtacattgcctccgaggtgtgcgaggactccatcaccgtgggaatggtgcgtcatcagggcaagatcatgtacgtgggcgacgtgcggagcgtgacacagaagcatatccaggagtggggccctttcgacctggtgatcggcggcagcccttgcaatgacctgagcatcgtgaacccagcccggaagggcctgtacgagggaaccggcagactgttcttcgagttttacagactgctgcacgacgcccggcctaaggaaggcgacgaccggcccttcttttggctgttcgagaatgtggtggccatgggagtcagcgacaagcgggatattagccggttcctggagagcaaccccgtgatgatcgatgccaaggaagtgagcgccgcccaccgggccagatacttctggggcaatctgcctggcatgaacagacccctggccagcaccgtgaacgacaagctggagctgcaggagtgcctggagcacggccggatcgccaagttcagcaaggtgagaaccatcaccacccgaagcaacagcatcaaacaaggcaaggaccagcactttcctgtgttcatgaacgagaaggaggacatcctgtggtgtaccgagatggagagagtgttcgggttcccagtccactacacagatgtcagcaacatgtctagactggccagacagagactgctgggaagaagctggtccgtccctgtgatcagacacctgttcgcccctctgaaggagtacttcgcctgcgtgagcagcggcaacagcaacgccaacagccggggccccagcttctctagcggcctggtgccactgtccctgagagggagccacatgggccccatggagatctacaaaaccgtgagcgcctggaagcggcagcctgtgcgcgtgctgagcctgtttcggaatatcgataaagtcctgaaaagcctgggattcctggagagcggctctggctccggcggtggcaccctgaagtacgtggaggatgtgacaaacgtggtcagacgggatgtggagaagtggggccccttcgatctggtgtacggcagcacccaacccctgggcagctcttgtgaccggtgccctggctggtacatgtttcagttccaccggatcctgcagtacgccctgccgagacaggagtcccagcggccattcttttggattttcatggacaacttgctgctgaccgaggatgaccaggaaactaccactcggttcctgcagaccgaagccgtgaccctgcaggacgtgagaggccgggactaccagaacgccatgcgggtgtggtccaacatccctggactgaaaagcaagcacgcacctctgacccctaaagaagaggagtacctgcaggcccaggtgcggagcagaagcaagctggacgcccctaaggtggatctgctggtgaagaattgcctcctgcccctgagagagtacttcaagtatttcagccagaatagtctgcccctgggaggcagcggcggcggctgcagccacaggagctgcagggaggaccccggcaccagcgagagcagggagatggaccccgtggccttcaaggacgtggccgtgaacttcacccaggaggagtgggccctgctggacatcagccagaggaagctgtacagggaggtgatgctggagaccttcaggaacctgaccagcatcggcaagaagtggaaggaccagaacatcgagttcgagtaccagaaccccaggaggaacttcaggggcggcccaagcagcggcgcccctcctcccagcggcggcagcccagccggctccccaacctctaccgaggagggcacctctgagtccgccacccccgagagcggccctggcacctccaccgagcccagcgagggcagcgcacccggcagccctgccggcagccccacctccacagaggagggaaccagcaccgagcccagcgaaggcagcgccccaggcaccagcaccgagcctagtgagcaggagattaaacggatcaacaagatcagaagaagacttgtgaaagacagcaacaccaagaaggccggcaagacaggccccatgaaaaccctgctggttagagtgatgacacccgatctgagagagcggctggaaaacctgagaaagaagcctgaaaatatcccccagcccatcagcaatacatctagagccaacctgaataagctgctgaccgattacaccgaaatgaagaaggcgatcctgcatgtgtactgggaagagttccagaaggaccctgtgggcctgatgagccgggtggcccagcctgccagcaagaagatcgatcagaacaagctgaaacctgagatggacgagaagggcaacctgaccaccgccggctttgcctgctctcagtgtggccagcccctgttcgtgtacaagctggagcaggtgtctgagaagggcaaggcttacaccaactacttcggacggtgcaatgtggccgagcacgaaaagctgatcctgctggcccagctgaagcccgagaaggatagcgacgaagccgtgacatatagcctgggaaagtttgggcagagggccctggatttctacagcattcatgtgaccaaggagtccacccaccccgtgaagcccctggcccagatcgccggaaacagatacgcctccggacctgtgggaaaggccctgagcgacgcatgtatgggcacaatcgcctccttcctgtctaagtaccaggacatcatcatcgaacaccagaaggtggtgaagggcaaccagaagagactggagagcctgcgggagctggccggcaaggaaaacctggaataccctagcgtgaccctgccacctcagcctcacaccaaggagggcgttgatgcctacaacgaagtgatcgcccgggtgcgaatgtgggtgaacctgaacctgtggcagaagctgaagctaagcagagatgatgccaagcctctgctgagactgaagggattcccttcctttcctctggtcgagagacaggccaacgaagtggactggtgggacatggtgtgtaacgtgaagaagctgatcaacgagaaaaaggaggatggcaaggtgttttggcagaatctggctggctacaagagacaggaagccctgagaccatacctgagcagcgaggaagatcggaagaagggaaagaaattcgctcggtaccagctgggcgacctgctgctgcacctggaaaagaagcacggcgaggactggggaaaggtgtacgacgaggcctgggagcggattgacaagaaagtggaaggcctgagcaagcacatcaagctggaagaggaacggagaagcgaggacgcccagagcaaggccgccctgaccgactggctgcgggctaaggccagcttcgtgatcgagggcctgaaggaggccgacaaggacgagttctgcagatgcgagctgaagctgcagaagtggtacggggacctgcggggaaagcccttcgccatcgaagccgagaacagcatcctggacatcagcggcttcagcaagcagtacaactgtgccttcatctggcagaaggacggcgtgaagaagctgaacctgtacctgatcatcaactacttcaagggcggcaagctgcggttcaagaagatcaaacctgaagccttcgaagccaacagattctacaccgtgatcaacaaaaagagcggcgagatcgtgcccatggaggtgaacttcaacttcgacgaccccaacctgatcatcctgcctctggcctttggcaagagacagggcagagaattcatctggaacgacctgctgtccctggaaaccggcagcctgaagctggccaacggaagagtgatcgagaagacactgtacaacagaagaacccggcaggatgagcctgccctgttcgtggccctgaccttcgagcggcgggaggtcctggactcctccaatatcaaaccaatgaacctgatcggcgtggcaagaggcgaaaacatccccgccgtgatcgccctgaccgaccccgagggctgcccactgagccggtttaaggatagcctgggaaacccaacccacatcctgagaatcggcgagagctataaggagaagcagcggaccatccaggccaagaaggaggtggagcagcggagagccggcggctacagccggaagtacgccagcaaagccaagaatctggcagacgatatggtgagaaacaccgctagagatctgctgtactacgccgtgacccaggatgccatgctgatcttcgccaacctgagccggggcttcggccggcagggcaagcggaccttcatggccgagagacagtacacacggatggaggactggctgaccgccaagctggcctacgagggcctgagcaagacctacctgtccaagacactggcccagtacacctccaagacatgcagcaactgtgggtttaccatcaccagcgccgactacgacagggtgctggagaagctgaagaagacagcaacaggctggatgaccacaattaacggcaaggagctgaaggtggagggccagattacctactacaacagatacaagagacagaacgtagtcaaggacctgtccgtcgagctggatagactgagcgaagaatctgtgaacaacgacatctcctcctggacaaagggcagaagcggagaagctctgagcctcctgaagaaaagattctcccatagacccgtgcaggagaagttcgtgtgcctgaactgcggcttcgagacacacgcagccgagcaagccgccctgaacatcgccagatcctggctgttcctgcggagccaggagtacaagaaataccagacaaacaagacaaccggcaacaccgataagagagccttcgtcgagacctggcagtccttttaccggaagaagcttaaggaggtgtggaaacctgccgtgcggtctggcggatctggcggaggctccaccagccccaagaaaaagagaaaagtctaagctgccttctgcggggcttgccttctggccatgcccttcttctctcccttgcacctgtacctcttggtctttgaataaagcctgagtaggaaggctagcaaaaaaaaaaaaaaaaaaaaaaaaaaaaaaaaaaaaaaaaaaaaaaaaaaaaaaaaaaaaaaaaaaaaaaaaaaaaaaaa

SEQ ID NO: 13294 - RNA, 5785 nt, synthetic construct
  source 1..5785: mol_type = other RNA
aggaaataagagagaaaagaagagtaagaagaaatataagagccaccatggcccctaagaagaagcgtaaagtgagccggatggaacgcctcgtctacgaggtgcggcagaagtgcagaaacatcgaggacatctgcatctcctgcggatctctgaacgtgaccctggagcacccactgttcatcggcggcatgtgccagaactgtaaaaactgttttctggagtgtgcctatcaatacgacgatgacggctaccagagctactgcaccatctgttgcggcggaagagaggtgctgatgtgtggaaataacaactgctgccggtgcttctgcgtggaatgcgtggacctgctggtgggccccggcgccgcccaggccgctattaaggaagatccttggaactgctacatgtgcggccacaagggcacatacggcctgctgagacggagagaggactggcctagcagactgcagatgttcttcgccaataaccacgaccaggagttcgacccccctaaggtgtaccctcccgtccccgccgagaagagaaagcccatccgggtcctgagcctgttcgatggcatcgccaccggtctgctggtgctgaaggacctgggcatccaggtggataggtacattgcctccgaggtgtgcgaggactccatcaccgtgggaatggtgcgtcatcagggcaagatcatgtacgtgggcgacgtgcggagcgtgacacagaagcatatccaggagtggggccctttcgacctggtgatcggcggcagcccttgcaatgacctgagcatcgtgaacccagcccggaagggcctgtacgagggaaccggcagactgttcttcgagttttacagactgctgcacgacgcccggcctaaggaaggcgacgaccggcccttcttttggctgttcgagaatgtggtggccatgggagtcagcgacaagcgggatattagccggttcctggagagcaaccccgtgatgatcgatgccaaggaagtgagcgccgcccaccgggccagatacttctggggcaatctgcctggcatgaacagacccctggccagcaccgtgaacgacaagctggagctgcaggagtgcctggagcacggccggatcgccaagttcagcaaggtgagaaccatcaccacccgaagcaacagcatcaaacaaggcaaggaccagcactttcctgtgttcatgaacgagaaggaggacatcctgtggtgtaccgagatggagagagtgttcgggttcccagtccactacacagatgtcagcaacatgtctagactggccagacagagactgctgggaagaagctggtccgtccctgtgatcagacacctgttcgcccctctgaaggagtacttcgcctgcgtgagcagcggcaacagcaacgccaacagccggggccccagcttctctagcggcctggtgccactgtccctgagagggagccacatgggccccatggagatctacaaaaccgtgagcgcctggaagcggcagcctgtgcgcgtgctgagcctgtttcggaatatcgataaagtcctgaaaagcctgggattcctggagagcggctctggctccggcggtggcaccctgaagtacgtggaggatgtgacaaacgtggtcagacgggatgtggagaagtggggccccttcgatctggtgtacggcagcacccaacccctgggcagctcttgtgaccggtgccctggctggtacatgtttcagttccaccggatcctgcagtacgccctgccgagacaggagtcccagcggccattcttttggattttcatggacaacttgctgctgaccgaggatgaccaggaaactaccactcggttcctgcagaccgaagccgtgaccctgcaggacgtgagaggccgggactaccagaacgccatgcgggtgtggtccaacatccctggactgaaaagcaagcacgcacctctgacccctaaagaagaggagtacctgcaggcccaggtgcggagcagaagcaagctggacgcccctaaggtggatctgctggtgaagaattgcctcctgcccctgagagagtacttcaagtatttcagccagaatagtctgcccctgggaggcagcggcggcggcagccagggcagcatcaccttcaaggacgtggccgtggacttcacccaggaggagtggtgcctgctggaccccagccagaaggagctgtacagggaggtgatgctggagaacgtgcagaacctgctgttcgtggagaccaacttcgaggtgaaggagatcagcaccaagcagagcctgttcgtggagggcagcggcccccccaggggcaagaacaagggcccctgcgacttcctgctgagggagggcggcccaagcagcggcgcccctcctcccagcggcggcagcccagccggctccccaacctctaccgaggagggcacctctgagtccgccacccccgagagcggccctggcacctccaccgagcccagcgagggcagcgcacccggcagccctgccggcagccccacctccacagaggagggaaccagcaccgagcccagcgaaggcagcgccccaggcaccagcaccgagcctagtgagcaggagattaaacggatcaacaagatcagaagaagacttgtgaaagacagcaacaccaagaaggccggcaagacaggccccatgaaaaccctgctggttagagtgatgacacccgatctgagagagcggctggaaaacctgagaaagaagcctgaaaatatcccccagcccatcagcaatacatctagagccaacctgaataagctgctgaccgattacaccgaaatgaagaaggcgatcctgcatgtgtactgggaagagttccagaaggaccctgtgggcctgatgagccgggtggcccagcctgccagcaagaagatcgatcagaacaagctgaaacctgagatggacgagaagggcaacctgaccaccgccggctttgcctgctctcagtgtggccagcccctgttcgtgtacaagctggagcaggtgtctgagaagggcaaggcttacaccaactacttcggacggtgcaatgtggccgagcacgaaaagctgatcctgctggcccagctgaagcccgagaaggatagcgacgaagccgtgacatatagcctgggaaagtttgggcagagggccctggatttctacagcattcatgtgaccaaggagtccacccaccccgtgaagcccctggcccagatcgccggaaacagatacgcctccggacctgtgggaaaggccctgagcgacgcatgtatgggcacaatcgcctccttcctgtctaagtaccaggacatcatcatcgaacaccagaaggtggtgaagggcaaccagaagagactggagagcctgcgggagctggccggcaaggaaaacctggaataccctagcgtgaccctgccacctcagcctcacaccaaggagggcgttgatgcctacaacgaagtgatcgcccgggtgcgaatgtgggtgaacctgaacctgtggcagaagctgaagctaagcagagatgatgccaagcctctgctgagactgaagggattcccttcctttcctctggtcgagagacaggccaacgaagtggactggtgggacatggtgtgtaacgtgaagaagctgatcaacgagaaaaaggaggatggcaaggtgttttggcagaatctggctggctacaagagacaggaagccctgagaccatacctgagcagcgaggaagatcggaagaagggaaagaaattcgctcggtaccagctgggcgacctgctgctgcacctggaaaagaagcacggcgaggactggggaaaggtgtacgacgaggcctgggagcggattgacaagaaagtggaaggcctgagcaagcacatcaagctggaagaggaacggagaagcgaggacgcccagagcaaggccgccctgaccgactggctgcgggctaaggccagcttcgtgatcgagggcctgaaggaggccgacaaggacgagttctgcagatgcgagctgaagctgcagaagtggtacggggacctgcggggaaagcccttcgccatcgaagccgagaacagcatcctggacatcagcggcttcagcaagcagtacaactgtgccttcatctggcagaaggacggcgtgaagaagctgaacctgtacctgatcatcaactacttcaagggcggcaagctgcggttcaagaagatcaaacctgaagccttcgaagccaacagattctacaccgtgatcaacaaaaagagcggcgagatcgtgcccatggaggtgaacttcaacttcgacgaccccaacctgatcatcctgcctctggcctttggcaagagacagggcagagaattcatctggaacgacctgctgtccctggaaaccggcagcctgaagctggccaacggaagagtgatcgagaagacactgtacaacagaagaacccggcaggatgagcctgccctgttcgtggccctgaccttcgagcggcgggaggtcctggactcctccaatatcaaaccaatgaacctgatcggcgtggcaagaggcgaaaacatccccgccgtgatcgccctgaccgaccccgagggctgcccactgagccggtttaaggatagcctgggaaacccaacccacatcctgagaatcggcgagagctataaggagaagcagcggaccatccaggccaagaaggaggtggagcagcggagagccggcggctacagccggaagtacgccagcaaagccaagaatctggcagacgatatggtgagaaacaccgctagagatctgctgtactacgccgtgacccaggatgccatgctgatcttcgccaacctgagccggggcttcggccggcagggcaagcggaccttcatggccgagagacagtacacacggatggaggactggctgaccgccaagctggcctacgagggcctgagcaagacctacctgtccaagacactggcccagtacacctccaagacatgcagcaactgtgggtttaccatcaccagcgccgactacgacagggtgctggagaagctgaagaagacagcaacaggctggatgaccacaattaacggcaaggagctgaaggtggagggccagattacctactacaacagatacaagagacagaacgtagtcaaggacctgtccgtcgagctggatagactgagcgaagaatctgtgaacaacgacatctcctcctggacaaagggcagaagcggagaagctctgagcctcctgaagaaaagattctcccatagacccgtgcaggagaagttcgtgtgcctgaactgcggcttcgagacacacgcagccgagcaagccgccctgaacatcgccagatcctggctgttcctgcggagccaggagtacaagaaataccagacaaacaagacaaccggcaacaccgataagagagccttcgtcgagacctggcagtccttttaccggaagaagcttaaggaggtgtggaaacctgccgtgcggtctggcggatctggcggaggctccaccagccccaagaaaaagagaaaagtctaagctgccttctgcggggcttgccttctggccatgcccttcttctctcccttgcacctgtacctcttggtctttgaataaagcctgagtaggaaggctagcaaaaaaaaaaaaaaaaaaaaaaaaaaaaaaaaaaaaaaaaaaaaaaaaaaaaaaaaaaaaaaaaaaaaaaaaaaaaaaaa

SEQ ID NO: 13295 - RNA, 5785 nt, synthetic construct
  source 1..5785: mol_type = other RNA
aggaaataagagagaaaagaagagtaagaagaaatataagagccaccatggcccctaagaagaagcgtaaagtgagccggatggaacgcctcgtctacgaggtgcggcagaagtgcagaaacatcgaggacatctgcatctcctgcggatctctgaacgtgaccctggagcacccactgttcatcggcggcatgtgccagaactgtaaaaactgttttctggagtgtgcctatcaatacgacgatgacggctaccagagctactgcaccatctgttgcggcggaagagaggtgctgatgtgtggaaataacaactgctgccggtgcttctgcgtggaatgcgtggacctgctggtgggccccggcgccgcccaggccgctattaaggaagatccttggaactgctacatgtgcggccacaagggcacatacggcctgctgagacggagagaggactggcctagcagactgcagatgttcttcgccaataaccacgaccaggagttcgacccccctaaggtgtaccctcccgtccccgccgagaagagaaagcccatccgggtcctgagcctgttcgatggcatcgccaccggtctgctggtgctgaaggacctgggcatccaggtggataggtacattgcctccgaggtgtgcgaggactccatcaccgtgggaatggtgcgtcatcagggcaagatcatgtacgtgggcgacgtgcggagcgtgacacagaagcatatccaggagtggggccctttcgacctggtgatcggcggcagcccttgcaatgacctgagcatcgtgaacccagcccggaagggcctgtacgagggaaccggcagactgttcttcgagttttacagactgctgcacgacgcccggcctaaggaaggcgacgaccggcccttcttttggctgttcgagaatgtggtggccatgggagtcagcgacaagcgggatattagccggttcctggagagcaaccccgtgatgatcgatgccaaggaagtgagcgccgcccaccgggccagatacttctggggcaatctgcctggcatgaacagacccctggccagcaccgtgaacgacaagctggagctgcaggagtgcctggagcacggccggatcgccaagttcagcaaggtgagaaccatcaccacccgaagcaacagcatcaaacaaggcaaggaccagcactttcctgtgttcatgaacgagaaggaggacatcctgtggtgtaccgagatggagagagtgttcgggttcccagtccactacacagatgtcagcaacatgtctagactggccagacagagactgctgggaagaagctggtccgtccctgtgatcagacacctgttcgcccctctgaaggagtacttcgcctgcgtgagcagcggcaacagcaacgccaacagccggggccccagcttctctagcggcctggtgccactgtccctgagagggagccacatgggccccatggagatctacaaaaccgtgagcgcctggaagcggcagcctgtgcgcgtgctgagcctgtttcggaatatcgataaagtcctgaaaagcctgggattcctggagagcggctctggctccggcggtggcaccctgaagtacgtggaggatgtgacaaacgtggtcagacgggatgtggagaagtggggccccttcgatctggtgtacggcagcacccaacccctgggcagctcttgtgaccggtgccctggctggtacatgtttcagttccaccggatcctgcagtacgccctgccgagacaggagtcccagcggccattcttttggattttcatggacaacttgctgctgaccgaggatgaccaggaaactaccactcggttcctgcagaccgaagccgtgaccctgcaggacgtgagaggccgggactaccagaacgccatgcgggtgtggtccaacatccctggactgaaaagcaagcacgcacctctgacccctaaagaagaggagtacctgcaggcccaggtgcggagcagaagcaagctggacgcccctaaggtggatctgctggtgaagaattgcctcctgcccctgagagagtacttcaagtatttcagccagaatagtctgcccctgggaggcagcggcggcggccccctggagagcgtgaccttcgaggacgtggccatcaacttcacccaggaggagtgggccctgctggacaccagccagaggaacctgttcaggaacgtgatgctggagaacatcagccacctggtgagcatcggctaccagatcagcaagagcgacgtgatcagccagctgaagcagggcaaggagctgaggaagagcaccgtgagcaagcagtgcggcaagagcctgagccagggcagcttcggcggcccaagcagcggcgcccctcctcccagcggcggcagcccagccggctccccaacctctaccgaggagggcacctctgagtccgccacccccgagagcggccctggcacctccaccgagcccagcgagggcagcgcacccggcagccctgccggcagccccacctccacagaggagggaaccagcaccgagcccagcgaaggcagcgccccaggcaccagcaccgagcctagtgagcaggagattaaacggatcaacaagatcagaagaagacttgtgaaagacagcaacaccaagaaggccggcaagacaggccccatgaaaaccctgctggttagagtgatgacacccgatctgagagagcggctggaaaacctgagaaagaagcctgaaaatatcccccagcccatcagcaatacatctagagccaacctgaataagctgctgaccgattacaccgaaatgaagaaggcgatcctgcatgtgtactgggaagagttccagaaggaccctgtgggcctgatgagccgggtggcccagcctgccagcaagaagatcgatcagaacaagctgaaacctgagatggacgagaagggcaacctgaccaccgccggctttgcctgctctcagtgtggccagcccctgttcgtgtacaagctggagcaggtgtctgagaagggcaaggcttacaccaactacttcggacggtgcaatgtggccgagcacgaaaagctgatcctgctggcccagctgaagcccgagaaggatagcgacgaagccgtgacatatagcctgggaaagtttgggcagagggccctggatttctacagcattcatgtgaccaaggagtccacccaccccgtgaagcccctggcccagatcgccggaaacagatacgcctccggacctgtgggaaaggccctgagcgacgcatgtatgggcacaatcgcctccttcctgtctaagtaccaggacatcatcatcgaacaccagaaggtggtgaagggcaaccagaagagactggagagcctgcgggagctggccggcaaggaaaacctggaataccctagcgtgaccctgccacctcagcctcacaccaaggagggcgttgatgcctacaacgaagtgatcgcccgggtgcgaatgtgggtgaacctgaacctgtggcagaagctgaagctaagcagagatgatgccaagcctctgctgagactgaagggattcccttcctttcctctggtcgagagacaggccaacgaagtggactggtgggacatggtgtgtaacgtgaagaagctgatcaacgagaaaaaggaggatggcaaggtgttttggcagaatctggctggctacaagagacaggaagccctgagaccatacctgagcagcgaggaagatcggaagaagggaaagaaattcgctcggtaccagctgggcgacctgctgctgcacctggaaaagaagcacggcgaggactggggaaaggtgtacgacgaggcctgggagcggattgacaagaaagtggaaggcctgagcaagcacatcaagctggaagaggaacggagaagcgaggacgcccagagcaaggccgccctgaccgactggctgcgggctaaggccagcttcgtgatcgagggcctgaaggaggccgacaaggacgagttctgcagatgcgagctgaagctgcagaagtggtacggggacctgcggggaaagcccttcgccatcgaagccgagaacagcatcctggacatcagcggcttcagcaagcagtacaactgtgccttcatctggcagaaggacggcgtgaagaagctgaacctgtacctgatcatcaactacttcaagggcggcaagctgcggttcaagaagatcaaacctgaagccttcgaagccaacagattctacaccgtgatcaacaaaaagagcggcgagatcgtgcccatggaggtgaacttcaacttcgacgaccccaacctgatcatcctgcctctggcctttggcaagagacagggcagagaattcatctggaacgacctgctgtccctggaaaccggcagcctgaagctggccaacggaagagtgatcgagaagacactgtacaacagaagaacccggcaggatgagcctgccctgttcgtggccctgaccttcgagcggcgggaggtcctggactcctccaatatcaaaccaatgaacctgatcggcgtggcaagaggcgaaaacatccccgccgtgatcgccctgaccgaccccgagggctgcccactgagccggtttaaggatagcctgggaaacccaacccacatcctgagaatcggcgagagctataaggagaagcagcggaccatccaggccaagaaggaggtggagcagcggagagccggcggctacagccggaagtacgccagcaaagccaagaatctggcagacgatatggtgagaaacaccgctagagatctgctgtactacgccgtgacccaggatgccatgctgatcttcgccaacctgagccggggcttcggccggcagggcaagcggaccttcatggccgagagacagtacacacggatggaggactggctgaccgccaagctggcctacgagggcctgagcaagacctacctgtccaagacactggcccagtacacctccaagacatgcagcaactgtgggtttaccatcaccagcgccgactacgacagggtgctggagaagctgaagaagacagcaacaggctggatgaccacaattaacggcaaggagctgaaggtggagggccagattacctactacaacagatacaagagacagaacgtagtcaaggacctgtccgtcgagctggatagactgagcgaagaatctgtgaacaacgacatctcctcctggacaaagggcagaagcggagaagctctgagcctcctgaagaaaagattctcccatagacccgtgcaggagaagttcgtgtgcctgaactgcggcttcgagacacacgcagccgagcaagccgccctgaacatcgccagatcctggctgttcctgcggagccaggagtacaagaaataccagacaaacaagacaaccggcaacaccgataagagagccttcgtcgagacctggcagtccttttaccggaagaagcttaaggaggtgtggaaacctgccgtgcggtctggcggatctggcggaggctccaccagccccaagaaaaagagaaaagtctaagctgccttctgcggggcttgccttctggccatgcccttcttctctcccttgcacctgtacctcttggtctttgaataaagcctgagtaggaaggctagcaaaaaaaaaaaaaaaaaaaaaaaaaaaaaaaaaaaaaaaaaaaaaaaaaaaaaaaaaaaaaaaaaaaaaaaaaaaaaaaa

SEQ ID NO: 13296 - RNA, 5785 nt, synthetic construct
  source 1..5785: mol_type = other RNA
aggaaataagagagaaaagaagagtaagaagaaatataagagccaccatggcccctaagaagaagcgtaaagtgagccggatggaacgcctcgtctacgaggtgcggcagaagtgcagaaacatcgaggacatctgcatctcctgcggatctctgaacgtgaccctggagcacccactgttcatcggcggcatgtgccagaactgtaaaaactgttttctggagtgtgcctatcaatacgacgatgacggctaccagagctactgcaccatctgttgcggcggaagagaggtgctgatgtgtggaaataacaactgctgccggtgcttctgcgtggaatgcgtggacctgctggtgggccccggcgccgcccaggccgctattaaggaagatccttggaactgctacatgtgcggccacaagggcacatacggcctgctgagacggagagaggactggcctagcagactgcagatgttcttcgccaataaccacgaccaggagttcgacccccctaaggtgtaccctcccgtccccgccgagaagagaaagcccatccgggtcctgagcctgttcgatggcatcgccaccggtctgctggtgctgaaggacctgggcatccaggtggataggtacattgcctccgaggtgtgcgaggactccatcaccgtgggaatggtgcgtcatcagggcaagatcatgtacgtgggcgacgtgcggagcgtgacacagaagcatatccaggagtggggccctttcgacctggtgatcggcggcagcccttgcaatgacctgagcatcgtgaacccagcccggaagggcctgtacgagggaaccggcagactgttcttcgagttttacagactgctgcacgacgcccggcctaaggaaggcgacgaccggcccttcttttggctgttcgagaatgtggtggccatgggagtcagcgacaagcgggatattagccggttcctggagagcaaccccgtgatgatcgatgccaaggaagtgagcgccgcccaccgggccagatacttctggggcaatctgcctggcatgaacagacccctggccagcaccgtgaacgacaagctggagctgcaggagtgcctggagcacggccggatcgccaagttcagcaaggtgagaaccatcaccacccgaagcaacagcatcaaacaaggcaaggaccagcactttcctgtgttcatgaacgagaaggaggacatcctgtggtgtaccgagatggagagagtgttcgggttcccagtccactacacagatgtcagcaacatgtctagactggccagacagagactgctgggaagaagctggtccgtccctgtgatcagacacctgttcgcccctctgaaggagtacttcgcctgcgtgagcagcggcaacagcaacgccaacagccggggccccagcttctctagcggcctggtgccactgtccctgagagggagccacatgggccccatggagatctacaaaaccgtgagcgcctggaagcggcagcctgtgcgcgtgctgagcctgtttcggaatatcgataaagtcctgaaaagcctgggattcctggagagcggctctggctccggcggtggcaccctgaagtacgtggaggatgtgacaaacgtggtcagacgggatgtggagaagtggggccccttcgatctggtgtacggcagcacccaacccctgggcagctcttgtgaccggtgccctggctggtacatgtttcagttccaccggatcctgcagtacgccctgccgagacaggagtcccagcggccattcttttggattttcatggacaacttgctgctgaccgaggatgaccaggaaactaccactcggttcctgcagaccgaagccgtgaccctgcaggacgtgagaggccgggactaccagaacgccatgcgggtgtggtccaacatccctggactgaaaagcaagcacgcacctctgacccctaaagaagaggagtacctgcaggcccaggtgcggagcagaagcaagctggacgcccctaaggtggatctgctggtgaagaattgcctcctgcccctgagagagtacttcaagtatttcagccagaatagtctgcccctgggaggcagcggcggcggcatgagcctgggcagcgagctgttcagggacgtggccatcgtgttcagccaggaggagtggcagtgcctggcccccgcccagagggacctgtacagggacgtgatgctggagacctacaacaacctggtgagcctgggcctggccatcagcaagcccgacgtgatcagcttcctggagcagggcaaggagccctggatggtggagagggtggtgagcggcggcctgtgccccgtgctggagagcggcggcccaagcagcggcgcccctcctcccagcggcggcagcccagccggctccccaacctctaccgaggagggcacctctgagtccgccacccccgagagcggccctggcacctccaccgagcccagcgagggcagcgcacccggcagccctgccggcagccccacctccacagaggagggaaccagcaccgagcccagcgaaggcagcgccccaggcaccagcaccgagcctagtgagcaggagattaaacggatcaacaagatcagaagaagacttgtgaaagacagcaacaccaagaaggccggcaagacaggccccatgaaaaccctgctggttagagtgatgacacccgatctgagagagcggctggaaaacctgagaaagaagcctgaaaatatcccccagcccatcagcaatacatctagagccaacctgaataagctgctgaccgattacaccgaaatgaagaaggcgatcctgcatgtgtactgggaagagttccagaaggaccctgtgggcctgatgagccgggtggcccagcctgccagcaagaagatcgatcagaacaagctgaaacctgagatggacgagaagggcaacctgaccaccgccggctttgcctgctctcagtgtggccagcccctgttcgtgtacaagctggagcaggtgtctgagaagggcaaggcttacaccaactacttcggacggtgcaatgtggccgagcacgaaaagctgatcctgctggcccagctgaagcccgagaaggatagcgacgaagccgtgacatatagcctgggaaagtttgggcagagggccctggatttctacagcattcatgtgaccaaggagtccacccaccccgtgaagcccctggcccagatcgccggaaacagatacgcctccggacctgtgggaaaggccctgagcgacgcatgtatgggcacaatcgcctccttcctgtctaagtaccaggacatcatcatcgaacaccagaaggtggtgaagggcaaccagaagagactggagagcctgcgggagctggccggcaaggaaaacctggaataccctagcgtgaccctgccacctcagcctcacaccaaggagggcgttgatgcctacaacgaagtgatcgcccgggtgcgaatgtgggtgaacctgaacctgtggcagaagctgaagctaagcagagatgatgccaagcctctgctgagactgaagggattcccttcctttcctctggtcgagagacaggccaacgaagtggactggtgggacatggtgtgtaacgtgaagaagctgatcaacgagaaaaaggaggatggcaaggtgttttggcagaatctggctggctacaagagacaggaagccctgagaccatacctgagcagcgaggaagatcggaagaagggaaagaaattcgctcggtaccagctgggcgacctgctgctgcacctggaaaagaagcacggcgaggactggggaaaggtgtacgacgaggcctgggagcggattgacaagaaagtggaaggcctgagcaagcacatcaagctggaagaggaacggagaagcgaggacgcccagagcaaggccgccctgaccgactggctgcgggctaaggccagcttcgtgatcgagggcctgaaggaggccgacaaggacgagttctgcagatgcgagctgaagctgcagaagtggtacggggacctgcggggaaagcccttcgccatcgaagccgagaacagcatcctggacatcagcggcttcagcaagcagtacaactgtgccttcatctggcagaaggacggcgtgaagaagctgaacctgtacctgatcatcaactacttcaagggcggcaagctgcggttcaagaagatcaaacctgaagccttcgaagccaacagattctacaccgtgatcaacaaaaagagcggcgagatcgtgcccatggaggtgaacttcaacttcgacgaccccaacctgatcatcctgcctctggcctttggcaagagacagggcagagaattcatctggaacgacctgctgtccctggaaaccggcagcctgaagctggccaacggaagagtgatcgagaagacactgtacaacagaagaacccggcaggatgagcctgccctgttcgtggccctgaccttcgagcggcgggaggtcctggactcctccaatatcaaaccaatgaacctgatcggcgtggcaagaggcgaaaacatccccgccgtgatcgccctgaccgaccccgagggctgcccactgagccggtttaaggatagcctgggaaacccaacccacatcctgagaatcggcgagagctataaggagaagcagcggaccatccaggccaagaaggaggtggagcagcggagagccggcggctacagccggaagtacgccagcaaagccaagaatctggcagacgatatggtgagaaacaccgctagagatctgctgtactacgccgtgacccaggatgccatgctgatcttcgccaacctgagccggggcttcggccggcagggcaagcggaccttcatggccgagagacagtacacacggatggaggactggctgaccgccaagctggcctacgagggcctgagcaagacctacctgtccaagacactggcccagtacacctccaagacatgcagcaactgtgggtttaccatcaccagcgccgactacgacagggtgctggagaagctgaagaagacagcaacaggctggatgaccacaattaacggcaaggagctgaaggtggagggccagattacctactacaacagatacaagagacagaacgtagtcaaggacctgtccgtcgagctggatagactgagcgaagaatctgtgaacaacgacatctcctcctggacaaagggcagaagcggagaagctctgagcctcctgaagaaaagattctcccatagacccgtgcaggagaagttcgtgtgcctgaactgcggcttcgagacacacgcagccgagcaagccgccctgaacatcgccagatcctggctgttcctgcggagccaggagtacaagaaataccagacaaacaagacaaccggcaacaccgataagagagccttcgtcgagacctggcagtccttttaccggaagaagcttaaggaggtgtggaaacctgccgtgcggtctggcggatctggcggaggctccaccagccccaagaaaaagagaaaagtctaagctgccttctgcggggcttgccttctggccatgcccttcttctctcccttgcacctgtacctcttggtctttgaataaagcctgagtaggaaggctagcaaaaaaaaaaaaaaaaaaaaaaaaaaaaaaaaaaaaaaaaaaaaaaaaaaaaaaaaaaaaaaaaaaaaaaaaaaaaaaaa

SEQ ID NO: 13297 - RNA, 5785 nt, synthetic construct
  source 1..5785: mol_type = other RNA
aggaaataagagagaaaagaagagtaagaagaaatataagagccaccatggcccctaagaagaagcgtaaagtgagccggatggaacgcctcgtctacgaggtgcggcagaagtgcagaaacatcgaggacatctgcatctcctgcggatctctgaacgtgaccctggagcacccactgttcatcggcggcatgtgccagaactgtaaaaactgttttctggagtgtgcctatcaatacgacgatgacggctaccagagctactgcaccatctgttgcggcggaagagaggtgctgatgtgtggaaataacaactgctgccggtgcttctgcgtggaatgcgtggacctgctggtgggccccggcgccgcccaggccgctattaaggaagatccttggaactgctacatgtgcggccacaagggcacatacggcctgctgagacggagagaggactggcctagcagactgcagatgttcttcgccaataaccacgaccaggagttcgacccccctaaggtgtaccctcccgtccccgccgagaagagaaagcccatccgggtcctgagcctgttcgatggcatcgccaccggtctgctggtgctgaaggacctgggcatccaggtggataggtacattgcctccgaggtgtgcgaggactccatcaccgtgggaatggtgcgtcatcagggcaagatcatgtacgtgggcgacgtgcggagcgtgacacagaagcatatccaggagtggggccctttcgacctggtgatcggcggcagcccttgcaatgacctgagcatcgtgaacccagcccggaagggcctgtacgagggaaccggcagactgttcttcgagttttacagactgctgcacgacgcccggcctaaggaaggcgacgaccggcccttcttttggctgttcgagaatgtggtggccatgggagtcagcgacaagcgggatattagccggttcctggagagcaaccccgtgatgatcgatgccaaggaagtgagcgccgcccaccgggccagatacttctggggcaatctgcctggcatgaacagacccctggccagcaccgtgaacgacaagctggagctgcaggagtgcctggagcacggccggatcgccaagttcagcaaggtgagaaccatcaccacccgaagcaacagcatcaaacaaggcaaggaccagcactttcctgtgttcatgaacgagaaggaggacatcctgtggtgtaccgagatggagagagtgttcgggttcccagtccactacacagatgtcagcaacatgtctagactggccagacagagactgctgggaagaagctggtccgtccctgtgatcagacacctgttcgcccctctgaaggagtacttcgcctgcgtgagcagcggcaacagcaacgccaacagccggggccccagcttctctagcggcctggtgccactgtccctgagagggagccacatgggccccatggagatctacaaaaccgtgagcgcctggaagcggcagcctgtgcgcgtgctgagcctgtttcggaatatcgataaagtcctgaaaagcctgggattcctggagagcggctctggctccggcggtggcaccctgaagtacgtggaggatgtgacaaacgtggtcagacgggatgtggagaagtggggccccttcgatctggtgtacggcagcacccaacccctgggcagctcttgtgaccggtgccctggctggtacatgtttcagttccaccggatcctgcagtacgccctgccgagacaggagtcccagcggccattcttttggattttcatggacaacttgctgctgaccgaggatgaccaggaaactaccactcggttcctgcagaccgaagccgtgaccctgcaggacgtgagaggccgggactaccagaacgccatgcgggtgtggtccaacatccctggactgaaaagcaagcacgcacctctgacccctaaagaagaggagtacctgcaggcccaggtgcggagcagaagcaagctggacgcccctaaggtggatctgctggtgaagaattgcctcctgcccctgagagagtacttcaagtatttcagccagaatagtctgcccctgggaggcagcggcggcggcatgctgcagaccgtgtggttccaggagcccgtgaccttcgaggacgtggccgtgtacttcacccagaacgagtgggccagcctgcaccccacccagagggccctgtacagggaggtgatgctggagaactacgccaacgtgaccagcctgagcgccttccccttccccaagcccgacctgatcttccagctggagcagggcgaggccgcctggggccccgacccctggaccctggccggcggcggcggcccaagcagcggcgcccctcctcccagcggcggcagcccagccggctccccaacctctaccgaggagggcacctctgagtccgccacccccgagagcggccctggcacctccaccgagcccagcgagggcagcgcacccggcagccctgccggcagccccacctccacagaggagggaaccagcaccgagcccagcgaaggcagcgccccaggcaccagcaccgagcctagtgagcaggagattaaacggatcaacaagatcagaagaagacttgtgaaagacagcaacaccaagaaggccggcaagacaggccccatgaaaaccctgctggttagagtgatgacacccgatctgagagagcggctggaaaacctgagaaagaagcctgaaaatatcccccagcccatcagcaatacatctagagccaacctgaataagctgctgaccgattacaccgaaatgaagaaggcgatcctgcatgtgtactgggaagagttccagaaggaccctgtgggcctgatgagccgggtggcccagcctgccagcaagaagatcgatcagaacaagctgaaacctgagatggacgagaagggcaacctgaccaccgccggctttgcctgctctcagtgtggccagcccctgttcgtgtacaagctggagcaggtgtctgagaagggcaaggcttacaccaactacttcggacggtgcaatgtggccgagcacgaaaagctgatcctgctggcccagctgaagcccgagaaggatagcgacgaagccgtgacatatagcctgggaaagtttgggcagagggccctggatttctacagcattcatgtgaccaaggagtccacccaccccgtgaagcccctggcccagatcgccggaaacagatacgcctccggacctgtgggaaaggccctgagcgacgcatgtatgggcacaatcgcctccttcctgtctaagtaccaggacatcatcatcgaacaccagaaggtggtgaagggcaaccagaagagactggagagcctgcgggagctggccggcaaggaaaacctggaataccctagcgtgaccctgccacctcagcctcacaccaaggagggcgttgatgcctacaacgaagtgatcgcccgggtgcgaatgtgggtgaacctgaacctgtggcagaagctgaagctaagcagagatgatgccaagcctctgctgagactgaagggattcccttcctttcctctggtcgagagacaggccaacgaagtggactggtgggacatggtgtgtaacgtgaagaagctgatcaacgagaaaaaggaggatggcaaggtgttttggcagaatctggctggctacaagagacaggaagccctgagaccatacctgagcagcgaggaagatcggaagaagggaaagaaattcgctcggtaccagctgggcgacctgctgctgcacctggaaaagaagcacggcgaggactggggaaaggtgtacgacgaggcctgggagcggattgacaagaaagtggaaggcctgagcaagcacatcaagctggaagaggaacggagaagcgaggacgcccagagcaaggccgccctgaccgactggctgcgggctaaggccagcttcgtgatcgagggcctgaaggaggccgacaaggacgagttctgcagatgcgagctgaagctgcagaagtggtacggggacctgcggggaaagcccttcgccatcgaagccgagaacagcatcctggacatcagcggcttcagcaagcagtacaactgtgccttcatctggcagaaggacggcgtgaagaagctgaacctgtacctgatcatcaactacttcaagggcggcaagctgcggttcaagaagatcaaacctgaagccttcgaagccaacagattctacaccgtgatcaacaaaaagagcggcgagatcgtgcccatggaggtgaacttcaacttcgacgaccccaacctgatcatcctgcctctggcctttggcaagagacagggcagagaattcatctggaacgacctgctgtccctggaaaccggcagcctgaagctggccaacggaagagtgatcgagaagacactgtacaacagaagaacccggcaggatgagcctgccctgttcgtggccctgaccttcgagcggcgggaggtcctggactcctccaatatcaaaccaatgaacctgatcggcgtggcaagaggcgaaaacatccccgccgtgatcgccctgaccgaccccgagggctgcccactgagccggtttaaggatagcctgggaaacccaacccacatcctgagaatcggcgagagctataaggagaagcagcggaccatccaggccaagaaggaggtggagcagcggagagccggcggctacagccggaagtacgccagcaaagccaagaatctggcagacgatatggtgagaaacaccgctagagatctgctgtactacgccgtgacccaggatgccatgctgatcttcgccaacctgagccggggcttcggccggcagggcaagcggaccttcatggccgagagacagtacacacggatggaggactggctgaccgccaagctggcctacgagggcctgagcaagacctacctgtccaagacactggcccagtacacctccaagacatgcagcaactgtgggtttaccatcaccagcgccgactacgacagggtgctggagaagctgaagaagacagcaacaggctggatgaccacaattaacggcaaggagctgaaggtggagggccagattacctactacaacagatacaagagacagaacgtagtcaaggacctgtccgtcgagctggatagactgagcgaagaatctgtgaacaacgacatctcctcctggacaaagggcagaagcggagaagctctgagcctcctgaagaaaagattctcccatagacccgtgcaggagaagttcgtgtgcctgaactgcggcttcgagacacacgcagccgagcaagccgccctgaacatcgccagatcctggctgttcctgcggagccaggagtacaagaaataccagacaaacaagacaaccggcaacaccgataagagagccttcgtcgagacctggcagtccttttaccggaagaagcttaaggaggtgtggaaacctgccgtgcggtctggcggatctggcggaggctccaccagccccaagaaaaagagaaaagtctaagctgccttctgcggggcttgccttctggccatgcccttcttctctcccttgcacctgtacctcttggtctttgaataaagcctgagtaggaaggctagcaaaaaaaaaaaaaaaaaaaaaaaaaaaaaaaaaaaaaaaaaaaaaaaaaaaaaaaaaaaaaaaaaaaaaaaaaaaaaaaa

SEQ ID NO: 13298 - RNA, 5785 nt, synthetic construct
  source 1..5785: mol_type = other RNA
aggaaataagagagaaaagaagagtaagaagaaatataagagccaccatggcccctaagaagaagcgtaaagtgagccggatggaacgcctcgtctacgaggtgcggcagaagtgcagaaacatcgaggacatctgcatctcctgcggatctctgaacgtgaccctggagcacccactgttcatcggcggcatgtgccagaactgtaaaaactgttttctggagtgtgcctatcaatacgacgatgacggctaccagagctactgcaccatctgttgcggcggaagagaggtgctgatgtgtggaaataacaactgctgccggtgcttctgcgtggaatgcgtggacctgctggtgggccccggcgccgcccaggccgctattaaggaagatccttggaactgctacatgtgcggccacaagggcacatacggcctgctgagacggagagaggactggcctagcagactgcagatgttcttcgccaataaccacgaccaggagttcgacccccctaaggtgtaccctcccgtccccgccgagaagagaaagcccatccgggtcctgagcctgttcgatggcatcgccaccggtctgctggtgctgaaggacctgggcatccaggtggataggtacattgcctccgaggtgtgcgaggactccatcaccgtgggaatggtgcgtcatcagggcaagatcatgtacgtgggcgacgtgcggagcgtgacacagaagcatatccaggagtggggccctttcgacctggtgatcggcggcagcccttgcaatgacctgagcatcgtgaacccagcccggaagggcctgtacgagggaaccggcagactgttcttcgagttttacagactgctgcacgacgcccggcctaaggaaggcgacgaccggcccttcttttggctgttcgagaatgtggtggccatgggagtcagcgacaagcgggatattagccggttcctggagagcaaccccgtgatgatcgatgccaaggaagtgagcgccgcccaccgggccagatacttctggggcaatctgcctggcatgaacagacccctggccagcaccgtgaacgacaagctggagctgcaggagtgcctggagcacggccggatcgccaagttcagcaaggtgagaaccatcaccacccgaagcaacagcatcaaacaaggcaaggaccagcactttcctgtgttcatgaacgagaaggaggacatcctgtggtgtaccgagatggagagagtgttcgggttcccagtccactacacagatgtcagcaacatgtctagactggccagacagagactgctgggaagaagctggtccgtccctgtgatcagacacctgttcgcccctctgaaggagtacttcgcctgcgtgagcagcggcaacagcaacgccaacagccggggccccagcttctctagcggcctggtgccactgtccctgagagggagccacatgggccccatggagatctacaaaaccgtgagcgcctggaagcggcagcctgtgcgcgtgctgagcctgtttcggaatatcgataaagtcctgaaaagcctgggattcctggagagcggctctggctccggcggtggcaccctgaagtacgtggaggatgtgacaaacgtggtcagacgggatgtggagaagtggggccccttcgatctggtgtacggcagcacccaacccctgggcagctcttgtgaccggtgccctggctggtacatgtttcagttccaccggatcctgcagtacgccctgccgagacaggagtcccagcggccattcttttggattttcatggacaacttgctgctgaccgaggatgaccaggaaactaccactcggttcctgcagaccgaagccgtgaccctgcaggacgtgagaggccgggactaccagaacgccatgcgggtgtggtccaacatccctggactgaaaagcaagcacgcacctctgacccctaaagaagaggagtacctgcaggcccaggtgcggagcagaagcaagctggacgcccctaaggtggatctgctggtgaagaattgcctcctgcccctgagagagtacttcaagtatttcagccagaatagtctgcccctgggaggcagcggcggcggcttccaggagctggtgaccttcgaggacgtgtgcgtggacttcaccagcgaggagctgagctgcctgagcaccagccagaggaccctgtacagggaggtgatgctggagaactacaggaacctggtgagcctgggccaccagttcagcaagcccgagctgatcagcaggctggaggaggaggagttccaggccatggccgccgacagcagcgccgtggccggcgacagcggcgccgtggccggcggcggcccaagcagcggcgcccctcctcccagcggcggcagcccagccggctccccaacctctaccgaggagggcacctctgagtccgccacccccgagagcggccctggcacctccaccgagcccagcgagggcagcgcacccggcagccctgccggcagccccacctccacagaggagggaaccagcaccgagcccagcgaaggcagcgccccaggcaccagcaccgagcctagtgagcaggagattaaacggatcaacaagatcagaagaagacttgtgaaagacagcaacaccaagaaggccggcaagacaggccccatgaaaaccctgctggttagagtgatgacacccgatctgagagagcggctggaaaacctgagaaagaagcctgaaaatatcccccagcccatcagcaatacatctagagccaacctgaataagctgctgaccgattacaccgaaatgaagaaggcgatcctgcatgtgtactgggaagagttccagaaggaccctgtgggcctgatgagccgggtggcccagcctgccagcaagaagatcgatcagaacaagctgaaacctgagatggacgagaagggcaacctgaccaccgccggctttgcctgctctcagtgtggccagcccctgttcgtgtacaagctggagcaggtgtctgagaagggcaaggcttacaccaactacttcggacggtgcaatgtggccgagcacgaaaagctgatcctgctggcccagctgaagcccgagaaggatagcgacgaagccgtgacatatagcctgggaaagtttgggcagagggccctggatttctacagcattcatgtgaccaaggagtccacccaccccgtgaagcccctggcccagatcgccggaaacagatacgcctccggacctgtgggaaaggccctgagcgacgcatgtatgggcacaatcgcctccttcctgtctaagtaccaggacatcatcatcgaacaccagaaggtggtgaagggcaaccagaagagactggagagcctgcgggagctggccggcaaggaaaacctggaataccctagcgtgaccctgccacctcagcctcacaccaaggagggcgttgatgcctacaacgaagtgatcgcccgggtgcgaatgtgggtgaacctgaacctgtggcagaagctgaagctaagcagagatgatgccaagcctctgctgagactgaagggattcccttcctttcctctggtcgagagacaggccaacgaagtggactggtgggacatggtgtgtaacgtgaagaagctgatcaacgagaaaaaggaggatggcaaggtgttttggcagaatctggctggctacaagagacaggaagccctgagaccatacctgagcagcgaggaagatcggaagaagggaaagaaattcgctcggtaccagctgggcgacctgctgctgcacctggaaaagaagcacggcgaggactggggaaaggtgtacgacgaggcctgggagcggattgacaagaaagtggaaggcctgagcaagcacatcaagctggaagaggaacggagaagcgaggacgcccagagcaaggccgccctgaccgactggctgcgggctaaggccagcttcgtgatcgagggcctgaaggaggccgacaaggacgagttctgcagatgcgagctgaagctgcagaagtggtacggggacctgcggggaaagcccttcgccatcgaagccgagaacagcatcctggacatcagcggcttcagcaagcagtacaactgtgccttcatctggcagaaggacggcgtgaagaagctgaacctgtacctgatcatcaactacttcaagggcggcaagctgcggttcaagaagatcaaacctgaagccttcgaagccaacagattctacaccgtgatcaacaaaaagagcggcgagatcgtgcccatggaggtgaacttcaacttcgacgaccccaacctgatcatcctgcctctggcctttggcaagagacagggcagagaattcatctggaacgacctgctgtccctggaaaccggcagcctgaagctggccaacggaagagtgatcgagaagacactgtacaacagaagaacccggcaggatgagcctgccctgttcgtggccctgaccttcgagcggcgggaggtcctggactcctccaatatcaaaccaatgaacctgatcggcgtggcaagaggcgaaaacatccccgccgtgatcgccctgaccgaccccgagggctgcccactgagccggtttaaggatagcctgggaaacccaacccacatcctgagaatcggcgagagctataaggagaagcagcggaccatccaggccaagaaggaggtggagcagcggagagccggcggctacagccggaagtacgccagcaaagccaagaatctggcagacgatatggtgagaaacaccgctagagatctgctgtactacgccgtgacccaggatgccatgctgatcttcgccaacctgagccggggcttcggccggcagggcaagcggaccttcatggccgagagacagtacacacggatggaggactggctgaccgccaagctggcctacgagggcctgagcaagacctacctgtccaagacactggcccagtacacctccaagacatgcagcaactgtgggtttaccatcaccagcgccgactacgacagggtgctggagaagctgaagaagacagcaacaggctggatgaccacaattaacggcaaggagctgaaggtggagggccagattacctactacaacagatacaagagacagaacgtagtcaaggacctgtccgtcgagctggatagactgagcgaagaatctgtgaacaacgacatctcctcctggacaaagggcagaagcggagaagctctgagcctcctgaagaaaagattctcccatagacccgtgcaggagaagttcgtgtgcctgaactgcggcttcgagacacacgcagccgagcaagccgccctgaacatcgccagatcctggctgttcctgcggagccaggagtacaagaaataccagacaaacaagacaaccggcaacaccgataagagagccttcgtcgagacctggcagtccttttaccggaagaagcttaaggaggtgtggaaacctgccgtgcggtctggcggatctggcggaggctccaccagccccaagaaaaagagaaaagtctaagctgccttctgcggggcttgccttctggccatgcccttcttctctcccttgcacctgtacctcttggtctttgaataaagcctgagtaggaaggctagcaaaaaaaaaaaaaaaaaaaaaaaaaaaaaaaaaaaaaaaaaaaaaaaaaaaaaaaaaaaaaaaaaaaaaaaaaaaaaaaa

SEQ ID NO: 13299 - RNA, 5785 nt, synthetic construct
  source 1..5785: mol_type = other RNA
aggaaataagagagaaaagaagagtaagaagaaatataagagccaccatggcccctaagaagaagcgtaaagtgagccggatggaacgcctcgtctacgaggtgcggcagaagtgcagaaacatcgaggacatctgcatctcctgcggatctctgaacgtgaccctggagcacccactgttcatcggcggcatgtgccagaactgtaaaaactgttttctggagtgtgcctatcaatacgacgatgacggctaccagagctactgcaccatctgttgcggcggaagagaggtgctgatgtgtggaaataacaactgctgccggtgcttctgcgtggaatgcgtggacctgctggtgggccccggcgccgcccaggccgctattaaggaagatccttggaactgctacatgtgcggccacaagggcacatacggcctgctgagacggagagaggactggcctagcagactgcagatgttcttcgccaataaccacgaccaggagttcgacccccctaaggtgtaccctcccgtccccgccgagaagagaaagcccatccgggtcctgagcctgttcgatggcatcgccaccggtctgctggtgctgaaggacctgggcatccaggtggataggtacattgcctccgaggtgtgcgaggactccatcaccgtgggaatggtgcgtcatcagggcaagatcatgtacgtgggcgacgtgcggagcgtgacacagaagcatatccaggagtggggccctttcgacctggtgatcggcggcagcccttgcaatgacctgagcatcgtgaacccagcccggaagggcctgtacgagggaaccggcagactgttcttcgagttttacagactgctgcacgacgcccggcctaaggaaggcgacgaccggcccttcttttggctgttcgagaatgtggtggccatgggagtcagcgacaagcgggatattagccggttcctggagagcaaccccgtgatgatcgatgccaaggaagtgagcgccgcccaccgggccagatacttctggggcaatctgcctggcatgaacagacccctggccagcaccgtgaacgacaagctggagctgcaggagtgcctggagcacggccggatcgccaagttcagcaaggtgagaaccatcaccacccgaagcaacagcatcaaacaaggcaaggaccagcactttcctgtgttcatgaacgagaaggaggacatcctgtggtgtaccgagatggagagagtgttcgggttcccagtccactacacagatgtcagcaacatgtctagactggccagacagagactgctgggaagaagctggtccgtccctgtgatcagacacctgttcgcccctctgaaggagtacttcgcctgcgtgagcagcggcaacagcaacgccaacagccggggccccagcttctctagcggcctggtgccactgtccctgagagggagccacatgggccccatggagatctacaaaaccgtgagcgcctggaagcggcagcctgtgcgcgtgctgagcctgtttcggaatatcgataaagtcctgaaaagcctgggattcctggagagcggctctggctccggcggtggcaccctgaagtacgtggaggatgtgacaaacgtggtcagacgggatgtggagaagtggggccccttcgatctggtgtacggcagcacccaacccctgggcagctcttgtgaccggtgccctggctggtacatgtttcagttccaccggatcctgcagtacgccctgccgagacaggagtcccagcggccattcttttggattttcatggacaacttgctgctgaccgaggatgaccaggaaactaccactcggttcctgcagaccgaagccgtgaccctgcaggacgtgagaggccgggactaccagaacgccatgcgggtgtggtccaacatccctggactgaaaagcaagcacgcacctctgacccctaaagaagaggagtacctgcaggcccaggtgcggagcagaagcaagctggacgcccctaaggtggatctgctggtgaagaattgcctcctgcccctgagagagtacttcaagtatttcagccagaatagtctgcccctgggaggcagcggcggcggcatgaacatggagggcctggtgatgttccaggacctgagcatcgacttcagccaggaggagtgggagtgcctggacgccgcccagaaggacctgtacagggacgtgatgatggagaactacagcagcctggtgagcctgggcctgagcatccccaagcccgacgtgatcagcctgctggagcagggcaaggagccctggatggtgagcagggacatgctgggcggctggtgccccgacagcgagggcggcccaagcagcggcgcccctcctcccagcggcggcagcccagccggctccccaacctctaccgaggagggcacctctgagtccgccacccccgagagcggccctggcacctccaccgagcccagcgagggcagcgcacccggcagccctgccggcagccccacctccacagaggagggaaccagcaccgagcccagcgaaggcagcgccccaggcaccagcaccgagcctagtgagcaggagattaaacggatcaacaagatcagaagaagacttgtgaaagacagcaacaccaagaaggccggcaagacaggccccatgaaaaccctgctggttagagtgatgacacccgatctgagagagcggctggaaaacctgagaaagaagcctgaaaatatcccccagcccatcagcaatacatctagagccaacctgaataagctgctgaccgattacaccgaaatgaagaaggcgatcctgcatgtgtactgggaagagttccagaaggaccctgtgggcctgatgagccgggtggcccagcctgccagcaagaagatcgatcagaacaagctgaaacctgagatggacgagaagggcaacctgaccaccgccggctttgcctgctctcagtgtggccagcccctgttcgtgtacaagctggagcaggtgtctgagaagggcaaggcttacaccaactacttcggacggtgcaatgtggccgagcacgaaaagctgatcctgctggcccagctgaagcccgagaaggatagcgacgaagccgtgacatatagcctgggaaagtttgggcagagggccctggatttctacagcattcatgtgaccaaggagtccacccaccccgtgaagcccctggcccagatcgccggaaacagatacgcctccggacctgtgggaaaggccctgagcgacgcatgtatgggcacaatcgcctccttcctgtctaagtaccaggacatcatcatcgaacaccagaaggtggtgaagggcaaccagaagagactggagagcctgcgggagctggccggcaaggaaaacctggaataccctagcgtgaccctgccacctcagcctcacaccaaggagggcgttgatgcctacaacgaagtgatcgcccgggtgcgaatgtgggtgaacctgaacctgtggcagaagctgaagctaagcagagatgatgccaagcctctgctgagactgaagggattcccttcctttcctctggtcgagagacaggccaacgaagtggactggtgggacatggtgtgtaacgtgaagaagctgatcaacgagaaaaaggaggatggcaaggtgttttggcagaatctggctggctacaagagacaggaagccctgagaccatacctgagcagcgaggaagatcggaagaagggaaagaaattcgctcggtaccagctgggcgacctgctgctgcacctggaaaagaagcacggcgaggactggggaaaggtgtacgacgaggcctgggagcggattgacaagaaagtggaaggcctgagcaagcacatcaagctggaagaggaacggagaagcgaggacgcccagagcaaggccgccctgaccgactggctgcgggctaaggccagcttcgtgatcgagggcctgaaggaggccgacaaggacgagttctgcagatgcgagctgaagctgcagaagtggtacggggacctgcggggaaagcccttcgccatcgaagccgagaacagcatcctggacatcagcggcttcagcaagcagtacaactgtgccttcatctggcagaaggacggcgtgaagaagctgaacctgtacctgatcatcaactacttcaagggcggcaagctgcggttcaagaagatcaaacctgaagccttcgaagccaacagattctacaccgtgatcaacaaaaagagcggcgagatcgtgcccatggaggtgaacttcaacttcgacgaccccaacctgatcatcctgcctctggcctttggcaagagacagggcagagaattcatctggaacgacctgctgtccctggaaaccggcagcctgaagctggccaacggaagagtgatcgagaagacactgtacaacagaagaacccggcaggatgagcctgccctgttcgtggccctgaccttcgagcggcgggaggtcctggactcctccaatatcaaaccaatgaacctgatcggcgtggcaagaggcgaaaacatccccgccgtgatcgccctgaccgaccccgagggctgcccactgagccggtttaaggatagcctgggaaacccaacccacatcctgagaatcggcgagagctataaggagaagcagcggaccatccaggccaagaaggaggtggagcagcggagagccggcggctacagccggaagtacgccagcaaagccaagaatctggcagacgatatggtgagaaacaccgctagagatctgctgtactacgccgtgacccaggatgccatgctgatcttcgccaacctgagccggggcttcggccggcagggcaagcggaccttcatggccgagagacagtacacacggatggaggactggctgaccgccaagctggcctacgagggcctgagcaagacctacctgtccaagacactggcccagtacacctccaagacatgcagcaactgtgggtttaccatcaccagcgccgactacgacagggtgctggagaagctgaagaagacagcaacaggctggatgaccacaattaacggcaaggagctgaaggtggagggccagattacctactacaacagatacaagagacagaacgtagtcaaggacctgtccgtcgagctggatagactgagcgaagaatctgtgaacaacgacatctcctcctggacaaagggcagaagcggagaagctctgagcctcctgaagaaaagattctcccatagacccgtgcaggagaagttcgtgtgcctgaactgcggcttcgagacacacgcagccgagcaagccgccctgaacatcgccagatcctggctgttcctgcggagccaggagtacaagaaataccagacaaacaagacaaccggcaacaccgataagagagccttcgtcgagacctggcagtccttttaccggaagaagcttaaggaggtgtggaaacctgccgtgcggtctggcggatctggcggaggctccaccagccccaagaaaaagagaaaagtctaagctgccttctgcggggcttgccttctggccatgcccttcttctctcccttgcacctgtacctcttggtctttgaataaagcctgagtaggaaggctagcaaaaaaaaaaaaaaaaaaaaaaaaaaaaaaaaaaaaaaaaaaaaaaaaaaaaaaaaaaaaaaaaaaaaaaaaaaaaaaaa

SEQ ID NO: 13300 - RNA, 5785 nt, synthetic construct
  source 1..5785: mol_type = other RNA
aggaaataagagagaaaagaagagtaagaagaaatataagagccaccatggcccctaagaagaagcgtaaagtgagccggatggaacgcctcgtctacgaggtgcggcagaagtgcagaaacatcgaggacatctgcatctcctgcggatctctgaacgtgaccctggagcacccactgttcatcggcggcatgtgccagaactgtaaaaactgttttctggagtgtgcctatcaatacgacgatgacggctaccagagctactgcaccatctgttgcggcggaagagaggtgctgatgtgtggaaataacaactgctgccggtgcttctgcgtggaatgcgtggacctgctggtgggccccggcgccgcccaggccgctattaaggaagatccttggaactgctacatgtgcggccacaagggcacatacggcctgctgagacggagagaggactggcctagcagactgcagatgttcttcgccaataaccacgaccaggagttcgacccccctaaggtgtaccctcccgtccccgccgagaagagaaagcccatccgggtcctgagcctgttcgatggcatcgccaccggtctgctggtgctgaaggacctgggcatccaggtggataggtacattgcctccgaggtgtgcgaggactccatcaccgtgggaatggtgcgtcatcagggcaagatcatgtacgtgggcgacgtgcggagcgtgacacagaagcatatccaggagtggggccctttcgacctggtgatcggcggcagcccttgcaatgacctgagcatcgtgaacccagcccggaagggcctgtacgagggaaccggcagactgttcttcgagttttacagactgctgcacgacgcccggcctaaggaaggcgacgaccggcccttcttttggctgttcgagaatgtggtggccatgggagtcagcgacaagcgggatattagccggttcctggagagcaaccccgtgatgatcgatgccaaggaagtgagcgccgcccaccgggccagatacttctggggcaatctgcctggcatgaacagacccctggccagcaccgtgaacgacaagctggagctgcaggagtgcctggagcacggccggatcgccaagttcagcaaggtgagaaccatcaccacccgaagcaacagcatcaaacaaggcaaggaccagcactttcctgtgttcatgaacgagaaggaggacatcctgtggtgtaccgagatggagagagtgttcgggttcccagtccactacacagatgtcagcaacatgtctagactggccagacagagactgctgggaagaagctggtccgtccctgtgatcagacacctgttcgcccctctgaaggagtacttcgcctgcgtgagcagcggcaacagcaacgccaacagccggggccccagcttctctagcggcctggtgccactgtccctgagagggagccacatgggccccatggagatctacaaaaccgtgagcgcctggaagcggcagcctgtgcgcgtgctgagcctgtttcggaatatcgataaagtcctgaaaagcctgggattcctggagagcggctctggctccggcggtggcaccctgaagtacgtggaggatgtgacaaacgtggtcagacgggatgtggagaagtggggccccttcgatctggtgtacggcagcacccaacccctgggcagctcttgtgaccggtgccctggctggtacatgtttcagttccaccggatcctgcagtacgccctgccgagacaggagtcccagcggccattcttttggattttcatggacaacttgctgctgaccgaggatgaccaggaaactaccactcggttcctgcagaccgaagccgtgaccctgcaggacgtgagaggccgggactaccagaacgccatgcgggtgtggtccaacatccctggactgaaaagcaagcacgcacctctgacccctaaagaagaggagtacctgcaggcccaggtgcggagcagaagcaagctggacgcccctaaggtggatctgctggtgaagaattgcctcctgcccctgagagagtacttcaagtatttcagccagaatagtctgcccctgggaggcagcggcggcggcagccagggcagcgtgaccttcagggacgtggccgtggacttcagcagggaggagtgggagtggctgcagcccgcccagagggacctgtacaggcacgtgatgctggagaactacggccacctggtgagcctgggcctgaacatcagcaagccccacgtggtgagcctgctggagcagggcaaggagccctggctgggcaaggacgccagcaggggcctgttcagcgccagcgagagcaacggcggcggcccaagcagcggcgcccctcctcccagcggcggcagcccagccggctccccaacctctaccgaggagggcacctctgagtccgccacccccgagagcggccctggcacctccaccgagcccagcgagggcagcgcacccggcagccctgccggcagccccacctccacagaggagggaaccagcaccgagcccagcgaaggcagcgccccaggcaccagcaccgagcctagtgagcaggagattaaacggatcaacaagatcagaagaagacttgtgaaagacagcaacaccaagaaggccggcaagacaggccccatgaaaaccctgctggttagagtgatgacacccgatctgagagagcggctggaaaacctgagaaagaagcctgaaaatatcccccagcccatcagcaatacatctagagccaacctgaataagctgctgaccgattacaccgaaatgaagaaggcgatcctgcatgtgtactgggaagagttccagaaggaccctgtgggcctgatgagccgggtggcccagcctgccagcaagaagatcgatcagaacaagctgaaacctgagatggacgagaagggcaacctgaccaccgccggctttgcctgctctcagtgtggccagcccctgttcgtgtacaagctggagcaggtgtctgagaagggcaaggcttacaccaactacttcggacggtgcaatgtggccgagcacgaaaagctgatcctgctggcccagctgaagcccgagaaggatagcgacgaagccgtgacatatagcctgggaaagtttgggcagagggccctggatttctacagcattcatgtgaccaaggagtccacccaccccgtgaagcccctggcccagatcgccggaaacagatacgcctccggacctgtgggaaaggccctgagcgacgcatgtatgggcacaatcgcctccttcctgtctaagtaccaggacatcatcatcgaacaccagaaggtggtgaagggcaaccagaagagactggagagcctgcgggagctggccggcaaggaaaacctggaataccctagcgtgaccctgccacctcagcctcacaccaaggagggcgttgatgcctacaacgaagtgatcgcccgggtgcgaatgtgggtgaacctgaacctgtggcagaagctgaagctaagcagagatgatgccaagcctctgctgagactgaagggattcccttcctttcctctggtcgagagacaggccaacgaagtggactggtgggacatggtgtgtaacgtgaagaagctgatcaacgagaaaaaggaggatggcaaggtgttttggcagaatctggctggctacaagagacaggaagccctgagaccatacctgagcagcgaggaagatcggaagaagggaaagaaattcgctcggtaccagctgggcgacctgctgctgcacctggaaaagaagcacggcgaggactggggaaaggtgtacgacgaggcctgggagcggattgacaagaaagtggaaggcctgagcaagcacatcaagctggaagaggaacggagaagcgaggacgcccagagcaaggccgccctgaccgactggctgcgggctaaggccagcttcgtgatcgagggcctgaaggaggccgacaaggacgagttctgcagatgcgagctgaagctgcagaagtggtacggggacctgcggggaaagcccttcgccatcgaagccgagaacagcatcctggacatcagcggcttcagcaagcagtacaactgtgccttcatctggcagaaggacggcgtgaagaagctgaacctgtacctgatcatcaactacttcaagggcggcaagctgcggttcaagaagatcaaacctgaagccttcgaagccaacagattctacaccgtgatcaacaaaaagagcggcgagatcgtgcccatggaggtgaacttcaacttcgacgaccccaacctgatcatcctgcctctggcctttggcaagagacagggcagagaattcatctggaacgacctgctgtccctggaaaccggcagcctgaagctggccaacggaagagtgatcgagaagacactgtacaacagaagaacccggcaggatgagcctgccctgttcgtggccctgaccttcgagcggcgggaggtcctggactcctccaatatcaaaccaatgaacctgatcggcgtggcaagaggcgaaaacatccccgccgtgatcgccctgaccgaccccgagggctgcccactgagccggtttaaggatagcctgggaaacccaacccacatcctgagaatcggcgagagctataaggagaagcagcggaccatccaggccaagaaggaggtggagcagcggagagccggcggctacagccggaagtacgccagcaaagccaagaatctggcagacgatatggtgagaaacaccgctagagatctgctgtactacgccgtgacccaggatgccatgctgatcttcgccaacctgagccggggcttcggccggcagggcaagcggaccttcatggccgagagacagtacacacggatggaggactggctgaccgccaagctggcctacgagggcctgagcaagacctacctgtccaagacactggcccagtacacctccaagacatgcagcaactgtgggtttaccatcaccagcgccgactacgacagggtgctggagaagctgaagaagacagcaacaggctggatgaccacaattaacggcaaggagctgaaggtggagggccagattacctactacaacagatacaagagacagaacgtagtcaaggacctgtccgtcgagctggatagactgagcgaagaatctgtgaacaacgacatctcctcctggacaaagggcagaagcggagaagctctgagcctcctgaagaaaagattctcccatagacccgtgcaggagaagttcgtgtgcctgaactgcggcttcgagacacacgcagccgagcaagccgccctgaacatcgccagatcctggctgttcctgcggagccaggagtacaagaaataccagacaaacaagacaaccggcaacaccgataagagagccttcgtcgagacctggcagtccttttaccggaagaagcttaaggaggtgtggaaacctgccgtgcggtctggcggatctggcggaggctccaccagccccaagaaaaagagaaaagtctaagctgccttctgcggggcttgccttctggccatgcccttcttctctcccttgcacctgtacctcttggtctttgaataaagcctgagtaggaaggctagcaaaaaaaaaaaaaaaaaaaaaaaaaaaaaaaaaaaaaaaaaaaaaaaaaaaaaaaaaaaaaaaaaaaaaaaaaaaaaaaa

SEQ ID NO: 13301 - RNA, 5785 nt, synthetic construct
  source 1..5785: mol_type = other RNA
aggaaataagagagaaaagaagagtaagaagaaatataagagccaccatggcccctaagaagaagcgtaaagtgagccggatggaacgcctcgtctacgaggtgcggcagaagtgcagaaacatcgaggacatctgcatctcctgcggatctctgaacgtgaccctggagcacccactgttcatcggcggcatgtgccagaactgtaaaaactgttttctggagtgtgcctatcaatacgacgatgacggctaccagagctactgcaccatctgttgcggcggaagagaggtgctgatgtgtggaaataacaactgctgccggtgcttctgcgtggaatgcgtggacctgctggtgggccccggcgccgcccaggccgctattaaggaagatccttggaactgctacatgtgcggccacaagggcacatacggcctgctgagacggagagaggactggcctagcagactgcagatgttcttcgccaataaccacgaccaggagttcgacccccctaaggtgtaccctcccgtccccgccgagaagagaaagcccatccgggtcctgagcctgttcgatggcatcgccaccggtctgctggtgctgaaggacctgggcatccaggtggataggtacattgcctccgaggtgtgcgaggactccatcaccgtgggaatggtgcgtcatcagggcaagatcatgtacgtgggcgacgtgcggagcgtgacacagaagcatatccaggagtggggccctttcgacctggtgatcggcggcagcccttgcaatgacctgagcatcgtgaacccagcccggaagggcctgtacgagggaaccggcagactgttcttcgagttttacagactgctgcacgacgcccggcctaaggaaggcgacgaccggcccttcttttggctgttcgagaatgtggtggccatgggagtcagcgacaagcgggatattagccggttcctggagagcaaccccgtgatgatcgatgccaaggaagtgagcgccgcccaccgggccagatacttctggggcaatctgcctggcatgaacagacccctggccagcaccgtgaacgacaagctggagctgcaggagtgcctggagcacggccggatcgccaagttcagcaaggtgagaaccatcaccacccgaagcaacagcatcaaacaaggcaaggaccagcactttcctgtgttcatgaacgagaaggaggacatcctgtggtgtaccgagatggagagagtgttcgggttcccagtccactacacagatgtcagcaacatgtctagactggccagacagagactgctgggaagaagctggtccgtccctgtgatcagacacctgttcgcccctctgaaggagtacttcgcctgcgtgagcagcggcaacagcaacgccaacagccggggccccagcttctctagcggcctggtgccactgtccctgagagggagccacatgggccccatggagatctacaaaaccgtgagcgcctggaagcggcagcctgtgcgcgtgctgagcctgtttcggaatatcgataaagtcctgaaaagcctgggattcctggagagcggctctggctccggcggtggcaccctgaagtacgtggaggatgtgacaaacgtggtcagacgggatgtggagaagtggggccccttcgatctggtgtacggcagcacccaacccctgggcagctcttgtgaccggtgccctggctggtacatgtttcagttccaccggatcctgcagtacgccctgccgagacaggagtcccagcggccattcttttggattttcatggacaacttgctgctgaccgaggatgaccaggaaactaccactcggttcctgcagaccgaagccgtgaccctgcaggacgtgagaggccgggactaccagaacgccatgcgggtgtggtccaacatccctggactgaaaagcaagcacgcacctctgacccctaaagaagaggagtacctgcaggcccaggtgcggagcagaagcaagctggacgcccctaaggtggatctgctggtgaagaattgcctcctgcccctgagagagtacttcaagtatttcagccagaatagtctgcccctgggaggcagcggcggcggcatggccgccggccagagggaggccaggccccaggtgagcctgaccttcgaggacgtggccgtgctgttcaccagggacgagtggaggaagctggcccccagccagaggaacctgtacagggacgtgatgctggagaactacaggaacctggtgagcctgggcctgcccttcaccaagcccaaggtgatcagcctgctgcagcagggcgaggacccctggaaggtggagaaggacagcagcggcggcggcccaagcagcggcgcccctcctcccagcggcggcagcccagccggctccccaacctctaccgaggagggcacctctgagtccgccacccccgagagcggccctggcacctccaccgagcccagcgagggcagcgcacccggcagccctgccggcagccccacctccacagaggagggaaccagcaccgagcccagcgaaggcagcgccccaggcaccagcaccgagcctagtgagcaggagattaaacggatcaacaagatcagaagaagacttgtgaaagacagcaacaccaagaaggccggcaagacaggccccatgaaaaccctgctggttagagtgatgacacccgatctgagagagcggctggaaaacctgagaaagaagcctgaaaatatcccccagcccatcagcaatacatctagagccaacctgaataagctgctgaccgattacaccgaaatgaagaaggcgatcctgcatgtgtactgggaagagttccagaaggaccctgtgggcctgatgagccgggtggcccagcctgccagcaagaagatcgatcagaacaagctgaaacctgagatggacgagaagggcaacctgaccaccgccggctttgcctgctctcagtgtggccagcccctgttcgtgtacaagctggagcaggtgtctgagaagggcaaggcttacaccaactacttcggacggtgcaatgtggccgagcacgaaaagctgatcctgctggcccagctgaagcccgagaaggatagcgacgaagccgtgacatatagcctgggaaagtttgggcagagggccctggatttctacagcattcatgtgaccaaggagtccacccaccccgtgaagcccctggcccagatcgccggaaacagatacgcctccggacctgtgggaaaggccctgagcgacgcatgtatgggcacaatcgcctccttcctgtctaagtaccaggacatcatcatcgaacaccagaaggtggtgaagggcaaccagaagagactggagagcctgcgggagctggccggcaaggaaaacctggaataccctagcgtgaccctgccacctcagcctcacaccaaggagggcgttgatgcctacaacgaagtgatcgcccgggtgcgaatgtgggtgaacctgaacctgtggcagaagctgaagctaagcagagatgatgccaagcctctgctgagactgaagggattcccttcctttcctctggtcgagagacaggccaacgaagtggactggtgggacatggtgtgtaacgtgaagaagctgatcaacgagaaaaaggaggatggcaaggtgttttggcagaatctggctggctacaagagacaggaagccctgagaccatacctgagcagcgaggaagatcggaagaagggaaagaaattcgctcggtaccagctgggcgacctgctgctgcacctggaaaagaagcacggcgaggactggggaaaggtgtacgacgaggcctgggagcggattgacaagaaagtggaaggcctgagcaagcacatcaagctggaagaggaacggagaagcgaggacgcccagagcaaggccgccctgaccgactggctgcgggctaaggccagcttcgtgatcgagggcctgaaggaggccgacaaggacgagttctgcagatgcgagctgaagctgcagaagtggtacggggacctgcggggaaagcccttcgccatcgaagccgagaacagcatcctggacatcagcggcttcagcaagcagtacaactgtgccttcatctggcagaaggacggcgtgaagaagctgaacctgtacctgatcatcaactacttcaagggcggcaagctgcggttcaagaagatcaaacctgaagccttcgaagccaacagattctacaccgtgatcaacaaaaagagcggcgagatcgtgcccatggaggtgaacttcaacttcgacgaccccaacctgatcatcctgcctctggcctttggcaagagacagggcagagaattcatctggaacgacctgctgtccctggaaaccggcagcctgaagctggccaacggaagagtgatcgagaagacactgtacaacagaagaacccggcaggatgagcctgccctgttcgtggccctgaccttcgagcggcgggaggtcctggactcctccaatatcaaaccaatgaacctgatcggcgtggcaagaggcgaaaacatccccgccgtgatcgccctgaccgaccccgagggctgcccactgagccggtttaaggatagcctgggaaacccaacccacatcctgagaatcggcgagagctataaggagaagcagcggaccatccaggccaagaaggaggtggagcagcggagagccggcggctacagccggaagtacgccagcaaagccaagaatctggcagacgatatggtgagaaacaccgctagagatctgctgtactacgccgtgacccaggatgccatgctgatcttcgccaacctgagccggggcttcggccggcagggcaagcggaccttcatggccgagagacagtacacacggatggaggactggctgaccgccaagctggcctacgagggcctgagcaagacctacctgtccaagacactggcccagtacacctccaagacatgcagcaactgtgggtttaccatcaccagcgccgactacgacagggtgctggagaagctgaagaagacagcaacaggctggatgaccacaattaacggcaaggagctgaaggtggagggccagattacctactacaacagatacaagagacagaacgtagtcaaggacctgtccgtcgagctggatagactgagcgaagaatctgtgaacaacgacatctcctcctggacaaagggcagaagcggagaagctctgagcctcctgaagaaaagattctcccatagacccgtgcaggagaagttcgtgtgcctgaactgcggcttcgagacacacgcagccgagcaagccgccctgaacatcgccagatcctggctgttcctgcggagccaggagtacaagaaataccagacaaacaagacaaccggcaacaccgataagagagccttcgtcgagacctggcagtccttttaccggaagaagcttaaggaggtgtggaaacctgccgtgcggtctggcggatctggcggaggctccaccagccccaagaaaaagagaaaagtctaagctgccttctgcggggcttgccttctggccatgcccttcttctctcccttgcacctgtacctcttggtctttgaataaagcctgagtaggaaggctagcaaaaaaaaaaaaaaaaaaaaaaaaaaaaaaaaaaaaaaaaaaaaaaaaaaaaaaaaaaaaaaaaaaaaaaaaaaaaaaaa

SEQ ID NO: 13302 - RNA, 5785 nt, synthetic construct
  source 1..5785: mol_type = other RNA
aggaaataagagagaaaagaagagtaagaagaaatataagagccaccatggcccctaagaagaagcgtaaagtgagccggatggaacgcctcgtctacgaggtgcggcagaagtgcagaaacatcgaggacatctgcatctcctgcggatctctgaacgtgaccctggagcacccactgttcatcggcggcatgtgccagaactgtaaaaactgttttctggagtgtgcctatcaatacgacgatgacggctaccagagctactgcaccatctgttgcggcggaagagaggtgctgatgtgtggaaataacaactgctgccggtgcttctgcgtggaatgcgtggacctgctggtgggccccggcgccgcccaggccgctattaaggaagatccttggaactgctacatgtgcggccacaagggcacatacggcctgctgagacggagagaggactggcctagcagactgcagatgttcttcgccaataaccacgaccaggagttcgacccccctaaggtgtaccctcccgtccccgccgagaagagaaagcccatccgggtcctgagcctgttcgatggcatcgccaccggtctgctggtgctgaaggacctgggcatccaggtggataggtacattgcctccgaggtgtgcgaggactccatcaccgtgggaatggtgcgtcatcagggcaagatcatgtacgtgggcgacgtgcggagcgtgacacagaagcatatccaggagtggggccctttcgacctggtgatcggcggcagcccttgcaatgacctgagcatcgtgaacccagcccggaagggcctgtacgagggaaccggcagactgttcttcgagttttacagactgctgcacgacgcccggcctaaggaaggcgacgaccggcccttcttttggctgttcgagaatgtggtggccatgggagtcagcgacaagcgggatattagccggttcctggagagcaaccccgtgatgatcgatgccaaggaagtgagcgccgcccaccgggccagatacttctggggcaatctgcctggcatgaacagacccctggccagcaccgtgaacgacaagctggagctgcaggagtgcctggagcacggccggatcgccaagttcagcaaggtgagaaccatcaccacccgaagcaacagcatcaaacaaggcaaggaccagcactttcctgtgttcatgaacgagaaggaggacatcctgtggtgtaccgagatggagagagtgttcgggttcccagtccactacacagatgtcagcaacatgtctagactggccagacagagactgctgggaagaagctggtccgtccctgtgatcagacacctgttcgcccctctgaaggagtacttcgcctgcgtgagcagcggcaacagcaacgccaacagccggggccccagcttctctagcggcctggtgccactgtccctgagagggagccacatgggccccatggagatctacaaaaccgtgagcgcctggaagcggcagcctgtgcgcgtgctgagcctgtttcggaatatcgataaagtcctgaaaagcctgggattcctggagagcggctctggctccggcggtggcaccctgaagtacgtggaggatgtgacaaacgtggtcagacgggatgtggagaagtggggccccttcgatctggtgtacggcagcacccaacccctgggcagctcttgtgaccggtgccctggctggtacatgtttcagttccaccggatcctgcagtacgccctgccgagacaggagtcccagcggccattcttttggattttcatggacaacttgctgctgaccgaggatgaccaggaaactaccactcggttcctgcagaccgaagccgtgaccctgcaggacgtgagaggccgggactaccagaacgccatgcgggtgtggtccaacatccctggactgaaaagcaagcacgcacctctgacccctaaagaagaggagtacctgcaggcccaggtgcggagcagaagcaagctggacgcccctaaggtggatctgctggtgaagaattgcctcctgcccctgagagagtacttcaagtatttcagccagaatagtctgcccctgggaggcagcggcggcggcagcagccagaccctgctgaccttcagggacgtggccatcgagttcagccaggaggagtggggctgcctgaaccacagccagagggagctgtacagggacgtgatgctggagacctacggccacctgctgttcctgggcctggtgagcaagcccgacctggtgatcgtgctggagcagaagaaggagctgtggggcgtgaagaggaaggagaccgtggccagccaccccgccgtgagcagccagggcggcccaagcagcggcgcccctcctcccagcggcggcagcccagccggctccccaacctctaccgaggagggcacctctgagtccgccacccccgagagcggccctggcacctccaccgagcccagcgagggcagcgcacccggcagccctgccggcagccccacctccacagaggagggaaccagcaccgagcccagcgaaggcagcgccccaggcaccagcaccgagcctagtgagcaggagattaaacggatcaacaagatcagaagaagacttgtgaaagacagcaacaccaagaaggccggcaagacaggccccatgaaaaccctgctggttagagtgatgacacccgatctgagagagcggctggaaaacctgagaaagaagcctgaaaatatcccccagcccatcagcaatacatctagagccaacctgaataagctgctgaccgattacaccgaaatgaagaaggcgatcctgcatgtgtactgggaagagttccagaaggaccctgtgggcctgatgagccgggtggcccagcctgccagcaagaagatcgatcagaacaagctgaaacctgagatggacgagaagggcaacctgaccaccgccggctttgcctgctctcagtgtggccagcccctgttcgtgtacaagctggagcaggtgtctgagaagggcaaggcttacaccaactacttcggacggtgcaatgtggccgagcacgaaaagctgatcctgctggcccagctgaagcccgagaaggatagcgacgaagccgtgacatatagcctgggaaagtttgggcagagggccctggatttctacagcattcatgtgaccaaggagtccacccaccccgtgaagcccctggcccagatcgccggaaacagatacgcctccggacctgtgggaaaggccctgagcgacgcatgtatgggcacaatcgcctccttcctgtctaagtaccaggacatcatcatcgaacaccagaaggtggtgaagggcaaccagaagagactggagagcctgcgggagctggccggcaaggaaaacctggaataccctagcgtgaccctgccacctcagcctcacaccaaggagggcgttgatgcctacaacgaagtgatcgcccgggtgcgaatgtgggtgaacctgaacctgtggcagaagctgaagctaagcagagatgatgccaagcctctgctgagactgaagggattcccttcctttcctctggtcgagagacaggccaacgaagtggactggtgggacatggtgtgtaacgtgaagaagctgatcaacgagaaaaaggaggatggcaaggtgttttggcagaatctggctggctacaagagacaggaagccctgagaccatacctgagcagcgaggaagatcggaagaagggaaagaaattcgctcggtaccagctgggcgacctgctgctgcacctggaaaagaagcacggcgaggactggggaaaggtgtacgacgaggcctgggagcggattgacaagaaagtggaaggcctgagcaagcacatcaagctggaagaggaacggagaagcgaggacgcccagagcaaggccgccctgaccgactggctgcgggctaaggccagcttcgtgatcgagggcctgaaggaggccgacaaggacgagttctgcagatgcgagctgaagctgcagaagtggtacggggacctgcggggaaagcccttcgccatcgaagccgagaacagcatcctggacatcagcggcttcagcaagcagtacaactgtgccttcatctggcagaaggacggcgtgaagaagctgaacctgtacctgatcatcaactacttcaagggcggcaagctgcggttcaagaagatcaaacctgaagccttcgaagccaacagattctacaccgtgatcaacaaaaagagcggcgagatcgtgcccatggaggtgaacttcaacttcgacgaccccaacctgatcatcctgcctctggcctttggcaagagacagggcagagaattcatctggaacgacctgctgtccctggaaaccggcagcctgaagctggccaacggaagagtgatcgagaagacactgtacaacagaagaacccggcaggatgagcctgccctgttcgtggccctgaccttcgagcggcgggaggtcctggactcctccaatatcaaaccaatgaacctgatcggcgtggcaagaggcgaaaacatccccgccgtgatcgccctgaccgaccccgagggctgcccactgagccggtttaaggatagcctgggaaacccaacccacatcctgagaatcggcgagagctataaggagaagcagcggaccatccaggccaagaaggaggtggagcagcggagagccggcggctacagccggaagtacgccagcaaagccaagaatctggcagacgatatggtgagaaacaccgctagagatctgctgtactacgccgtgacccaggatgccatgctgatcttcgccaacctgagccggggcttcggccggcagggcaagcggaccttcatggccgagagacagtacacacggatggaggactggctgaccgccaagctggcctacgagggcctgagcaagacctacctgtccaagacactggcccagtacacctccaagacatgcagcaactgtgggtttaccatcaccagcgccgactacgacagggtgctggagaagctgaagaagacagcaacaggctggatgaccacaattaacggcaaggagctgaaggtggagggccagattacctactacaacagatacaagagacagaacgtagtcaaggacctgtccgtcgagctggatagactgagcgaagaatctgtgaacaacgacatctcctcctggacaaagggcagaagcggagaagctctgagcctcctgaagaaaagattctcccatagacccgtgcaggagaagttcgtgtgcctgaactgcggcttcgagacacacgcagccgagcaagccgccctgaacatcgccagatcctggctgttcctgcggagccaggagtacaagaaataccagacaaacaagacaaccggcaacaccgataagagagccttcgtcgagacctggcagtccttttaccggaagaagcttaaggaggtgtggaaacctgccgtgcggtctggcggatctggcggaggctccaccagccccaagaaaaagagaaaagtctaagctgccttctgcggggcttgccttctggccatgcccttcttctctcccttgcacctgtacctcttggtctttgaataaagcctgagtaggaaggctagcaaaaaaaaaaaaaaaaaaaaaaaaaaaaaaaaaaaaaaaaaaaaaaaaaaaaaaaaaaaaaaaaaaaaaaaaaaaaaaaa

SEQ ID NO: 13303 - RNA, 5785 nt, synthetic construct
  source 1..5785: mol_type = other RNA
aggaaataagagagaaaagaagagtaagaagaaatataagagccaccatggcccctaagaagaagcgtaaagtgagccggatggaacgcctcgtctacgaggtgcggcagaagtgcagaaacatcgaggacatctgcatctcctgcggatctctgaacgtgaccctggagcacccactgttcatcggcggcatgtgccagaactgtaaaaactgttttctggagtgtgcctatcaatacgacgatgacggctaccagagctactgcaccatctgttgcggcggaagagaggtgctgatgtgtggaaataacaactgctgccggtgcttctgcgtggaatgcgtggacctgctggtgggccccggcgccgcccaggccgctattaaggaagatccttggaactgctacatgtgcggccacaagggcacatacggcctgctgagacggagagaggactggcctagcagactgcagatgttcttcgccaataaccacgaccaggagttcgacccccctaaggtgtaccctcccgtccccgccgagaagagaaagcccatccgggtcctgagcctgttcgatggcatcgccaccggtctgctggtgctgaaggacctgggcatccaggtggataggtacattgcctccgaggtgtgcgaggactccatcaccgtgggaatggtgcgtcatcagggcaagatcatgtacgtgggcgacgtgcggagcgtgacacagaagcatatccaggagtggggccctttcgacctggtgatcggcggcagcccttgcaatgacctgagcatcgtgaacccagcccggaagggcctgtacgagggaaccggcagactgttcttcgagttttacagactgctgcacgacgcccggcctaaggaaggcgacgaccggcccttcttttggctgttcgagaatgtggtggccatgggagtcagcgacaagcgggatattagccggttcctggagagcaaccccgtgatgatcgatgccaaggaagtgagcgccgcccaccgggccagatacttctggggcaatctgcctggcatgaacagacccctggccagcaccgtgaacgacaagctggagctgcaggagtgcctggagcacggccggatcgccaagttcagcaaggtgagaaccatcaccacccgaagcaacagcatcaaacaaggcaaggaccagcactttcctgtgttcatgaacgagaaggaggacatcctgtggtgtaccgagatggagagagtgttcgggttcccagtccactacacagatgtcagcaacatgtctagactggccagacagagactgctgggaagaagctggtccgtccctgtgatcagacacctgttcgcccctctgaaggagtacttcgcctgcgtgagcagcggcaacagcaacgccaacagccggggccccagcttctctagcggcctggtgccactgtccctgagagggagccacatgggccccatggagatctacaaaaccgtgagcgcctggaagcggcagcctgtgcgcgtgctgagcctgtttcggaatatcgataaagtcctgaaaagcctgggattcctggagagcggctctggctccggcggtggcaccctgaagtacgtggaggatgtgacaaacgtggtcagacgggatgtggagaagtggggccccttcgatctggtgtacggcagcacccaacccctgggcagctcttgtgaccggtgccctggctggtacatgtttcagttccaccggatcctgcagtacgccctgccgagacaggagtcccagcggccattcttttggattttcatggacaacttgctgctgaccgaggatgaccaggaaactaccactcggttcctgcagaccgaagccgtgaccctgcaggacgtgagaggccgggactaccagaacgccatgcgggtgtggtccaacatccctggactgaaaagcaagcacgcacctctgacccctaaagaagaggagtacctgcaggcccaggtgcggagcagaagcaagctggacgcccctaaggtggatctgctggtgaagaattgcctcctgcccctgagagagtacttcaagtatttcagccagaatagtctgcccctgggaggcagcggcggcggctggaaggaggagctgagcttcgaggacgtggccgtgaacttcaccagggaggagtggaacaagctggactggacccagagggacctgtacagggacgtgatgctggagaactacaggaacatgatcctgctgggcttccagttccccaagcccgaggtgatctgccagctggagcagtgggaggacccctggatcctggacctgcccagggccggcaccaggaaggccagcagcaacgcctgcggcggcccaagcagcggcgcccctcctcccagcggcggcagcccagccggctccccaacctctaccgaggagggcacctctgagtccgccacccccgagagcggccctggcacctccaccgagcccagcgagggcagcgcacccggcagccctgccggcagccccacctccacagaggagggaaccagcaccgagcccagcgaaggcagcgccccaggcaccagcaccgagcctagtgagcaggagattaaacggatcaacaagatcagaagaagacttgtgaaagacagcaacaccaagaaggccggcaagacaggccccatgaaaaccctgctggttagagtgatgacacccgatctgagagagcggctggaaaacctgagaaagaagcctgaaaatatcccccagcccatcagcaatacatctagagccaacctgaataagctgctgaccgattacaccgaaatgaagaaggcgatcctgcatgtgtactgggaagagttccagaaggaccctgtgggcctgatgagccgggtggcccagcctgccagcaagaagatcgatcagaacaagctgaaacctgagatggacgagaagggcaacctgaccaccgccggctttgcctgctctcagtgtggccagcccctgttcgtgtacaagctggagcaggtgtctgagaagggcaaggcttacaccaactacttcggacggtgcaatgtggccgagcacgaaaagctgatcctgctggcccagctgaagcccgagaaggatagcgacgaagccgtgacatatagcctgggaaagtttgggcagagggccctggatttctacagcattcatgtgaccaaggagtccacccaccccgtgaagcccctggcccagatcgccggaaacagatacgcctccggacctgtgggaaaggccctgagcgacgcatgtatgggcacaatcgcctccttcctgtctaagtaccaggacatcatcatcgaacaccagaaggtggtgaagggcaaccagaagagactggagagcctgcgggagctggccggcaaggaaaacctggaataccctagcgtgaccctgccacctcagcctcacaccaaggagggcgttgatgcctacaacgaagtgatcgcccgggtgcgaatgtgggtgaacctgaacctgtggcagaagctgaagctaagcagagatgatgccaagcctctgctgagactgaagggattcccttcctttcctctggtcgagagacaggccaacgaagtggactggtgggacatggtgtgtaacgtgaagaagctgatcaacgagaaaaaggaggatggcaaggtgttttggcagaatctggctggctacaagagacaggaagccctgagaccatacctgagcagcgaggaagatcggaagaagggaaagaaattcgctcggtaccagctgggcgacctgctgctgcacctggaaaagaagcacggcgaggactggggaaaggtgtacgacgaggcctgggagcggattgacaagaaagtggaaggcctgagcaagcacatcaagctggaagaggaacggagaagcgaggacgcccagagcaaggccgccctgaccgactggctgcgggctaaggccagcttcgtgatcgagggcctgaaggaggccgacaaggacgagttctgcagatgcgagctgaagctgcagaagtggtacggggacctgcggggaaagcccttcgccatcgaagccgagaacagcatcctggacatcagcggcttcagcaagcagtacaactgtgccttcatctggcagaaggacggcgtgaagaagctgaacctgtacctgatcatcaactacttcaagggcggcaagctgcggttcaagaagatcaaacctgaagccttcgaagccaacagattctacaccgtgatcaacaaaaagagcggcgagatcgtgcccatggaggtgaacttcaacttcgacgaccccaacctgatcatcctgcctctggcctttggcaagagacagggcagagaattcatctggaacgacctgctgtccctggaaaccggcagcctgaagctggccaacggaagagtgatcgagaagacactgtacaacagaagaacccggcaggatgagcctgccctgttcgtggccctgaccttcgagcggcgggaggtcctggactcctccaatatcaaaccaatgaacctgatcggcgtggcaagaggcgaaaacatccccgccgtgatcgccctgaccgaccccgagggctgcccactgagccggtttaaggatagcctgggaaacccaacccacatcctgagaatcggcgagagctataaggagaagcagcggaccatccaggccaagaaggaggtggagcagcggagagccggcggctacagccggaagtacgccagcaaagccaagaatctggcagacgatatggtgagaaacaccgctagagatctgctgtactacgccgtgacccaggatgccatgctgatcttcgccaacctgagccggggcttcggccggcagggcaagcggaccttcatggccgagagacagtacacacggatggaggactggctgaccgccaagctggcctacgagggcctgagcaagacctacctgtccaagacactggcccagtacacctccaagacatgcagcaactgtgggtttaccatcaccagcgccgactacgacagggtgctggagaagctgaagaagacagcaacaggctggatgaccacaattaacggcaaggagctgaaggtggagggccagattacctactacaacagatacaagagacagaacgtagtcaaggacctgtccgtcgagctggatagactgagcgaagaatctgtgaacaacgacatctcctcctggacaaagggcagaagcggagaagctctgagcctcctgaagaaaagattctcccatagacccgtgcaggagaagttcgtgtgcctgaactgcggcttcgagacacacgcagccgagcaagccgccctgaacatcgccagatcctggctgttcctgcggagccaggagtacaagaaataccagacaaacaagacaaccggcaacaccgataagagagccttcgtcgagacctggcagtccttttaccggaagaagcttaaggaggtgtggaaacctgccgtgcggtctggcggatctggcggaggctccaccagccccaagaaaaagagaaaagtctaagctgccttctgcggggcttgccttctggccatgcccttcttctctcccttgcacctgtacctcttggtctttgaataaagcctgagtaggaaggctagcaaaaaaaaaaaaaaaaaaaaaaaaaaaaaaaaaaaaaaaaaaaaaaaaaaaaaaaaaaaaaaaaaaaaaaaaaaaaaaaa

SEQ ID NO: 13304 - RNA, 5785 nt, synthetic construct
  source 1..5785: mol_type = other RNA
aggaaataagagagaaaagaagagtaagaagaaatataagagccaccatggcccctaagaagaagcgtaaagtgagccggatggaacgcctcgtctacgaggtgcggcagaagtgcagaaacatcgaggacatctgcatctcctgcggatctctgaacgtgaccctggagcacccactgttcatcggcggcatgtgccagaactgtaaaaactgttttctggagtgtgcctatcaatacgacgatgacggctaccagagctactgcaccatctgttgcggcggaagagaggtgctgatgtgtggaaataacaactgctgccggtgcttctgcgtggaatgcgtggacctgctggtgggccccggcgccgcccaggccgctattaaggaagatccttggaactgctacatgtgcggccacaagggcacatacggcctgctgagacggagagaggactggcctagcagactgcagatgttcttcgccaataaccacgaccaggagttcgacccccctaaggtgtaccctcccgtccccgccgagaagagaaagcccatccgggtcctgagcctgttcgatggcatcgccaccggtctgctggtgctgaaggacctgggcatccaggtggataggtacattgcctccgaggtgtgcgaggactccatcaccgtgggaatggtgcgtcatcagggcaagatcatgtacgtgggcgacgtgcggagcgtgacacagaagcatatccaggagtggggccctttcgacctggtgatcggcggcagcccttgcaatgacctgagcatcgtgaacccagcccggaagggcctgtacgagggaaccggcagactgttcttcgagttttacagactgctgcacgacgcccggcctaaggaaggcgacgaccggcccttcttttggctgttcgagaatgtggtggccatgggagtcagcgacaagcgggatattagccggttcctggagagcaaccccgtgatgatcgatgccaaggaagtgagcgccgcccaccgggccagatacttctggggcaatctgcctggcatgaacagacccctggccagcaccgtgaacgacaagctggagctgcaggagtgcctggagcacggccggatcgccaagttcagcaaggtgagaaccatcaccacccgaagcaacagcatcaaacaaggcaaggaccagcactttcctgtgttcatgaacgagaaggaggacatcctgtggtgtaccgagatggagagagtgttcgggttcccagtccactacacagatgtcagcaacatgtctagactggccagacagagactgctgggaagaagctggtccgtccctgtgatcagacacctgttcgcccctctgaaggagtacttcgcctgcgtgagcagcggcaacagcaacgccaacagccggggccccagcttctctagcggcctggtgccactgtccctgagagggagccacatgggccccatggagatctacaaaaccgtgagcgcctggaagcggcagcctgtgcgcgtgctgagcctgtttcggaatatcgataaagtcctgaaaagcctgggattcctggagagcggctctggctccggcggtggcaccctgaagtacgtggaggatgtgacaaacgtggtcagacgggatgtggagaagtggggccccttcgatctggtgtacggcagcacccaacccctgggcagctcttgtgaccggtgccctggctggtacatgtttcagttccaccggatcctgcagtacgccctgccgagacaggagtcccagcggccattcttttggattttcatggacaacttgctgctgaccgaggatgaccaggaaactaccactcggttcctgcagaccgaagccgtgaccctgcaggacgtgagaggccgggactaccagaacgccatgcgggtgtggtccaacatccctggactgaaaagcaagcacgcacctctgacccctaaagaagaggagtacctgcaggcccaggtgcggagcagaagcaagctggacgcccctaaggtggatctgctggtgaagaattgcctcctgcccctgagagagtacttcaagtatttcagccagaatagtctgcccctgggaggcagcggcggcggcgtgcccgtgaccttcgaggacgtggccgtgaggttcagcgccgaggagtgggagatcctggagggctggcagaaggagctgcacaaggaggtgatggaggagaactaccagctgctgatcagcctgggccagcccgtgcccaccctggccctgctggccctgaccgccgagagggaggccgccggcggccagatcaggagcgtgagcggcgagagggagctggccagcaagggcggcagcagcggcggcccaagcagcggcgcccctcctcccagcggcggcagcccagccggctccccaacctctaccgaggagggcacctctgagtccgccacccccgagagcggccctggcacctccaccgagcccagcgagggcagcgcacccggcagccctgccggcagccccacctccacagaggagggaaccagcaccgagcccagcgaaggcagcgccccaggcaccagcaccgagcctagtgagcaggagattaaacggatcaacaagatcagaagaagacttgtgaaagacagcaacaccaagaaggccggcaagacaggccccatgaaaaccctgctggttagagtgatgacacccgatctgagagagcggctggaaaacctgagaaagaagcctgaaaatatcccccagcccatcagcaatacatctagagccaacctgaataagctgctgaccgattacaccgaaatgaagaaggcgatcctgcatgtgtactgggaagagttccagaaggaccctgtgggcctgatgagccgggtggcccagcctgccagcaagaagatcgatcagaacaagctgaaacctgagatggacgagaagggcaacctgaccaccgccggctttgcctgctctcagtgtggccagcccctgttcgtgtacaagctggagcaggtgtctgagaagggcaaggcttacaccaactacttcggacggtgcaatgtggccgagcacgaaaagctgatcctgctggcccagctgaagcccgagaaggatagcgacgaagccgtgacatatagcctgggaaagtttgggcagagggccctggatttctacagcattcatgtgaccaaggagtccacccaccccgtgaagcccctggcccagatcgccggaaacagatacgcctccggacctgtgggaaaggccctgagcgacgcatgtatgggcacaatcgcctccttcctgtctaagtaccaggacatcatcatcgaacaccagaaggtggtgaagggcaaccagaagagactggagagcctgcgggagctggccggcaaggaaaacctggaataccctagcgtgaccctgccacctcagcctcacaccaaggagggcgttgatgcctacaacgaagtgatcgcccgggtgcgaatgtgggtgaacctgaacctgtggcagaagctgaagctaagcagagatgatgccaagcctctgctgagactgaagggattcccttcctttcctctggtcgagagacaggccaacgaagtggactggtgggacatggtgtgtaacgtgaagaagctgatcaacgagaaaaaggaggatggcaaggtgttttggcagaatctggctggctacaagagacaggaagccctgagaccatacctgagcagcgaggaagatcggaagaagggaaagaaattcgctcggtaccagctgggcgacctgctgctgcacctggaaaagaagcacggcgaggactggggaaaggtgtacgacgaggcctgggagcggattgacaagaaagtggaaggcctgagcaagcacatcaagctggaagaggaacggagaagcgaggacgcccagagcaaggccgccctgaccgactggctgcgggctaaggccagcttcgtgatcgagggcctgaaggaggccgacaaggacgagttctgcagatgcgagctgaagctgcagaagtggtacggggacctgcggggaaagcccttcgccatcgaagccgagaacagcatcctggacatcagcggcttcagcaagcagtacaactgtgccttcatctggcagaaggacggcgtgaagaagctgaacctgtacctgatcatcaactacttcaagggcggcaagctgcggttcaagaagatcaaacctgaagccttcgaagccaacagattctacaccgtgatcaacaaaaagagcggcgagatcgtgcccatggaggtgaacttcaacttcgacgaccccaacctgatcatcctgcctctggcctttggcaagagacagggcagagaattcatctggaacgacctgctgtccctggaaaccggcagcctgaagctggccaacggaagagtgatcgagaagacactgtacaacagaagaacccggcaggatgagcctgccctgttcgtggccctgaccttcgagcggcgggaggtcctggactcctccaatatcaaaccaatgaacctgatcggcgtggcaagaggcgaaaacatccccgccgtgatcgccctgaccgaccccgagggctgcccactgagccggtttaaggatagcctgggaaacccaacccacatcctgagaatcggcgagagctataaggagaagcagcggaccatccaggccaagaaggaggtggagcagcggagagccggcggctacagccggaagtacgccagcaaagccaagaatctggcagacgatatggtgagaaacaccgctagagatctgctgtactacgccgtgacccaggatgccatgctgatcttcgccaacctgagccggggcttcggccggcagggcaagcggaccttcatggccgagagacagtacacacggatggaggactggctgaccgccaagctggcctacgagggcctgagcaagacctacctgtccaagacactggcccagtacacctccaagacatgcagcaactgtgggtttaccatcaccagcgccgactacgacagggtgctggagaagctgaagaagacagcaacaggctggatgaccacaattaacggcaaggagctgaaggtggagggccagattacctactacaacagatacaagagacagaacgtagtcaaggacctgtccgtcgagctggatagactgagcgaagaatctgtgaacaacgacatctcctcctggacaaagggcagaagcggagaagctctgagcctcctgaagaaaagattctcccatagacccgtgcaggagaagttcgtgtgcctgaactgcggcttcgagacacacgcagccgagcaagccgccctgaacatcgccagatcctggctgttcctgcggagccaggagtacaagaaataccagacaaacaagacaaccggcaacaccgataagagagccttcgtcgagacctggcagtccttttaccggaagaagcttaaggaggtgtggaaacctgccgtgcggtctggcggatctggcggaggctccaccagccccaagaaaaagagaaaagtctaagctgccttctgcggggcttgccttctggccatgcccttcttctctcccttgcacctgtacctcttggtctttgaataaagcctgagtaggaaggctagcaaaaaaaaaaaaaaaaaaaaaaaaaaaaaaaaaaaaaaaaaaaaaaaaaaaaaaaaaaaaaaaaaaaaaaaaaaaaaaaa

SEQ ID NO: 13305 - RNA, 5785 nt, synthetic construct
  source 1..5785: mol_type = other RNA
aggaaataagagagaaaagaagagtaagaagaaatataagagccaccatggcccctaagaagaagcgtaaagtgagccggatggaacgcctcgtctacgaggtgcggcagaagtgcagaaacatcgaggacatctgcatctcctgcggatctctgaacgtgaccctggagcacccactgttcatcggcggcatgtgccagaactgtaaaaactgttttctggagtgtgcctatcaatacgacgatgacggctaccagagctactgcaccatctgttgcggcggaagagaggtgctgatgtgtggaaataacaactgctgccggtgcttctgcgtggaatgcgtggacctgctggtgggccccggcgccgcccaggccgctattaaggaagatccttggaactgctacatgtgcggccacaagggcacatacggcctgctgagacggagagaggactggcctagcagactgcagatgttcttcgccaataaccacgaccaggagttcgacccccctaaggtgtaccctcccgtccccgccgagaagagaaagcccatccgggtcctgagcctgttcgatggcatcgccaccggtctgctggtgctgaaggacctgggcatccaggtggataggtacattgcctccgaggtgtgcgaggactccatcaccgtgggaatggtgcgtcatcagggcaagatcatgtacgtgggcgacgtgcggagcgtgacacagaagcatatccaggagtggggccctttcgacctggtgatcggcggcagcccttgcaatgacctgagcatcgtgaacccagcccggaagggcctgtacgagggaaccggcagactgttcttcgagttttacagactgctgcacgacgcccggcctaaggaaggcgacgaccggcccttcttttggctgttcgagaatgtggtggccatgggagtcagcgacaagcgggatattagccggttcctggagagcaaccccgtgatgatcgatgccaaggaagtgagcgccgcccaccgggccagatacttctggggcaatctgcctggcatgaacagacccctggccagcaccgtgaacgacaagctggagctgcaggagtgcctggagcacggccggatcgccaagttcagcaaggtgagaaccatcaccacccgaagcaacagcatcaaacaaggcaaggaccagcactttcctgtgttcatgaacgagaaggaggacatcctgtggtgtaccgagatggagagagtgttcgggttcccagtccactacacagatgtcagcaacatgtctagactggccagacagagactgctgggaagaagctggtccgtccctgtgatcagacacctgttcgcccctctgaaggagtacttcgcctgcgtgagcagcggcaacagcaacgccaacagccggggccccagcttctctagcggcctggtgccactgtccctgagagggagccacatgggccccatggagatctacaaaaccgtgagcgcctggaagcggcagcctgtgcgcgtgctgagcctgtttcggaatatcgataaagtcctgaaaagcctgggattcctggagagcggctctggctccggcggtggcaccctgaagtacgtggaggatgtgacaaacgtggtcagacgggatgtggagaagtggggccccttcgatctggtgtacggcagcacccaacccctgggcagctcttgtgaccggtgccctggctggtacatgtttcagttccaccggatcctgcagtacgccctgccgagacaggagtcccagcggccattcttttggattttcatggacaacttgctgctgaccgaggatgaccaggaaactaccactcggttcctgcagaccgaagccgtgaccctgcaggacgtgagaggccgggactaccagaacgccatgcgggtgtggtccaacatccctggactgaaaagcaagcacgcacctctgacccctaaagaagaggagtacctgcaggcccaggtgcggagcagaagcaagctggacgcccctaaggtggatctgctggtgaagaattgcctcctgcccctgagagagtacttcaagtatttcagccagaatagtctgcccctgggaggcagcggcggcggcatggccttcaaggacgtggccgtggccttcacccagaaggagtggaagctgctgagccccgcccagaggaccctgtacagggacgtgatgctggagaactacagccacatggtgagcctgggcatcgccttccccaagcccaagctgatcatccagctggagcagggcgacgagccctggagggaggagagcgagagcctgctggacctgtgccccgagcccaggaccgagttccagccccacggcggcccaagcagcggcgcccctcctcccagcggcggcagcccagccggctccccaacctctaccgaggagggcacctctgagtccgccacccccgagagcggccctggcacctccaccgagcccagcgagggcagcgcacccggcagccctgccggcagccccacctccacagaggagggaaccagcaccgagcccagcgaaggcagcgccccaggcaccagcaccgagcctagtgagcaggagattaaacggatcaacaagatcagaagaagacttgtgaaagacagcaacaccaagaaggccggcaagacaggccccatgaaaaccctgctggttagagtgatgacacccgatctgagagagcggctggaaaacctgagaaagaagcctgaaaatatcccccagcccatcagcaatacatctagagccaacctgaataagctgctgaccgattacaccgaaatgaagaaggcgatcctgcatgtgtactgggaagagttccagaaggaccctgtgggcctgatgagccgggtggcccagcctgccagcaagaagatcgatcagaacaagctgaaacctgagatggacgagaagggcaacctgaccaccgccggctttgcctgctctcagtgtggccagcccctgttcgtgtacaagctggagcaggtgtctgagaagggcaaggcttacaccaactacttcggacggtgcaatgtggccgagcacgaaaagctgatcctgctggcccagctgaagcccgagaaggatagcgacgaagccgtgacatatagcctgggaaagtttgggcagagggccctggatttctacagcattcatgtgaccaaggagtccacccaccccgtgaagcccctggcccagatcgccggaaacagatacgcctccggacctgtgggaaaggccctgagcgacgcatgtatgggcacaatcgcctccttcctgtctaagtaccaggacatcatcatcgaacaccagaaggtggtgaagggcaaccagaagagactggagagcctgcgggagctggccggcaaggaaaacctggaataccctagcgtgaccctgccacctcagcctcacaccaaggagggcgttgatgcctacaacgaagtgatcgcccgggtgcgaatgtgggtgaacctgaacctgtggcagaagctgaagctaagcagagatgatgccaagcctctgctgagactgaagggattcccttcctttcctctggtcgagagacaggccaacgaagtggactggtgggacatggtgtgtaacgtgaagaagctgatcaacgagaaaaaggaggatggcaaggtgttttggcagaatctggctggctacaagagacaggaagccctgagaccatacctgagcagcgaggaagatcggaagaagggaaagaaattcgctcggtaccagctgggcgacctgctgctgcacctggaaaagaagcacggcgaggactggggaaaggtgtacgacgaggcctgggagcggattgacaagaaagtggaaggcctgagcaagcacatcaagctggaagaggaacggagaagcgaggacgcccagagcaaggccgccctgaccgactggctgcgggctaaggccagcttcgtgatcgagggcctgaaggaggccgacaaggacgagttctgcagatgcgagctgaagctgcagaagtggtacggggacctgcggggaaagcccttcgccatcgaagccgagaacagcatcctggacatcagcggcttcagcaagcagtacaactgtgccttcatctggcagaaggacggcgtgaagaagctgaacctgtacctgatcatcaactacttcaagggcggcaagctgcggttcaagaagatcaaacctgaagccttcgaagccaacagattctacaccgtgatcaacaaaaagagcggcgagatcgtgcccatggaggtgaacttcaacttcgacgaccccaacctgatcatcctgcctctggcctttggcaagagacagggcagagaattcatctggaacgacctgctgtccctggaaaccggcagcctgaagctggccaacggaagagtgatcgagaagacactgtacaacagaagaacccggcaggatgagcctgccctgttcgtggccctgaccttcgagcggcgggaggtcctggactcctccaatatcaaaccaatgaacctgatcggcgtggcaagaggcgaaaacatccccgccgtgatcgccctgaccgaccccgagggctgcccactgagccggtttaaggatagcctgggaaacccaacccacatcctgagaatcggcgagagctataaggagaagcagcggaccatccaggccaagaaggaggtggagcagcggagagccggcggctacagccggaagtacgccagcaaagccaagaatctggcagacgatatggtgagaaacaccgctagagatctgctgtactacgccgtgacccaggatgccatgctgatcttcgccaacctgagccggggcttcggccggcagggcaagcggaccttcatggccgagagacagtacacacggatggaggactggctgaccgccaagctggcctacgagggcctgagcaagacctacctgtccaagacactggcccagtacacctccaagacatgcagcaactgtgggtttaccatcaccagcgccgactacgacagggtgctggagaagctgaagaagacagcaacaggctggatgaccacaattaacggcaaggagctgaaggtggagggccagattacctactacaacagatacaagagacagaacgtagtcaaggacctgtccgtcgagctggatagactgagcgaagaatctgtgaacaacgacatctcctcctggacaaagggcagaagcggagaagctctgagcctcctgaagaaaagattctcccatagacccgtgcaggagaagttcgtgtgcctgaactgcggcttcgagacacacgcagccgagcaagccgccctgaacatcgccagatcctggctgttcctgcggagccaggagtacaagaaataccagacaaacaagacaaccggcaacaccgataagagagccttcgtcgagacctggcagtccttttaccggaagaagcttaaggaggtgtggaaacctgccgtgcggtctggcggatctggcggaggctccaccagccccaagaaaaagagaaaagtctaagctgccttctgcggggcttgccttctggccatgcccttcttctctcccttgcacctgtacctcttggtctttgaataaagcctgagtaggaaggctagcaaaaaaaaaaaaaaaaaaaaaaaaaaaaaaaaaaaaaaaaaaaaaaaaaaaaaaaaaaaaaaaaaaaaaaaaaaaaaaaa

SEQ ID NO: 13306 - RNA, 5785 nt, synthetic construct
  source 1..5785: mol_type = other RNA
aggaaataagagagaaaagaagagtaagaagaaatataagagccaccatggcccctaagaagaagcgtaaagtgagccggatggaacgcctcgtctacgaggtgcggcagaagtgcagaaacatcgaggacatctgcatctcctgcggatctctgaacgtgaccctggagcacccactgttcatcggcggcatgtgccagaactgtaaaaactgttttctggagtgtgcctatcaatacgacgatgacggctaccagagctactgcaccatctgttgcggcggaagagaggtgctgatgtgtggaaataacaactgctgccggtgcttctgcgtggaatgcgtggacctgctggtgggccccggcgccgcccaggccgctattaaggaagatccttggaactgctacatgtgcggccacaagggcacatacggcctgctgagacggagagaggactggcctagcagactgcagatgttcttcgccaataaccacgaccaggagttcgacccccctaaggtgtaccctcccgtccccgccgagaagagaaagcccatccgggtcctgagcctgttcgatggcatcgccaccggtctgctggtgctgaaggacctgggcatccaggtggataggtacattgcctccgaggtgtgcgaggactccatcaccgtgggaatggtgcgtcatcagggcaagatcatgtacgtgggcgacgtgcggagcgtgacacagaagcatatccaggagtggggccctttcgacctggtgatcggcggcagcccttgcaatgacctgagcatcgtgaacccagcccggaagggcctgtacgagggaaccggcagactgttcttcgagttttacagactgctgcacgacgcccggcctaaggaaggcgacgaccggcccttcttttggctgttcgagaatgtggtggccatgggagtcagcgacaagcgggatattagccggttcctggagagcaaccccgtgatgatcgatgccaaggaagtgagcgccgcccaccgggccagatacttctggggcaatctgcctggcatgaacagacccctggccagcaccgtgaacgacaagctggagctgcaggagtgcctggagcacggccggatcgccaagttcagcaaggtgagaaccatcaccacccgaagcaacagcatcaaacaaggcaaggaccagcactttcctgtgttcatgaacgagaaggaggacatcctgtggtgtaccgagatggagagagtgttcgggttcccagtccactacacagatgtcagcaacatgtctagactggccagacagagactgctgggaagaagctggtccgtccctgtgatcagacacctgttcgcccctctgaaggagtacttcgcctgcgtgagcagcggcaacagcaacgccaacagccggggccccagcttctctagcggcctggtgccactgtccctgagagggagccacatgggccccatggagatctacaaaaccgtgagcgcctggaagcggcagcctgtgcgcgtgctgagcctgtttcggaatatcgataaagtcctgaaaagcctgggattcctggagagcggctctggctccggcggtggcaccctgaagtacgtggaggatgtgacaaacgtggtcagacgggatgtggagaagtggggccccttcgatctggtgtacggcagcacccaacccctgggcagctcttgtgaccggtgccctggctggtacatgtttcagttccaccggatcctgcagtacgccctgccgagacaggagtcccagcggccattcttttggattttcatggacaacttgctgctgaccgaggatgaccaggaaactaccactcggttcctgcagaccgaagccgtgaccctgcaggacgtgagaggccgggactaccagaacgccatgcgggtgtggtccaacatccctggactgaaaagcaagcacgcacctctgacccctaaagaagaggagtacctgcaggcccaggtgcggagcagaagcaagctggacgcccctaaggtggatctgctggtgaagaattgcctcctgcccctgagagagtacttcaagtatttcagccagaatagtctgcccctgggaggcagcggcggcggcagccaggagagcgtgagcttcgaggacgtggccgtgtacttcacccagaaccagtgggccagcctggacagcgcccagaggaccctgtacaggaaggtgatgctggagaactacgccaacgtgaccagcctggccgccttccccttccccaagcccgacctgatcctgcagctggagcagggcgaggcccccggcggcctggacccctggacccccatcaggagggaggtgaggggcgtgtgcggcggcccaagcagcggcgcccctcctcccagcggcggcagcccagccggctccccaacctctaccgaggagggcacctctgagtccgccacccccgagagcggccctggcacctccaccgagcccagcgagggcagcgcacccggcagccctgccggcagccccacctccacagaggagggaaccagcaccgagcccagcgaaggcagcgccccaggcaccagcaccgagcctagtgagcaggagattaaacggatcaacaagatcagaagaagacttgtgaaagacagcaacaccaagaaggccggcaagacaggccccatgaaaaccctgctggttagagtgatgacacccgatctgagagagcggctggaaaacctgagaaagaagcctgaaaatatcccccagcccatcagcaatacatctagagccaacctgaataagctgctgaccgattacaccgaaatgaagaaggcgatcctgcatgtgtactgggaagagttccagaaggaccctgtgggcctgatgagccgggtggcccagcctgccagcaagaagatcgatcagaacaagctgaaacctgagatggacgagaagggcaacctgaccaccgccggctttgcctgctctcagtgtggccagcccctgttcgtgtacaagctggagcaggtgtctgagaagggcaaggcttacaccaactacttcggacggtgcaatgtggccgagcacgaaaagctgatcctgctggcccagctgaagcccgagaaggatagcgacgaagccgtgacatatagcctgggaaagtttgggcagagggccctggatttctacagcattcatgtgaccaaggagtccacccaccccgtgaagcccctggcccagatcgccggaaacagatacgcctccggacctgtgggaaaggccctgagcgacgcatgtatgggcacaatcgcctccttcctgtctaagtaccaggacatcatcatcgaacaccagaaggtggtgaagggcaaccagaagagactggagagcctgcgggagctggccggcaaggaaaacctggaataccctagcgtgaccctgccacctcagcctcacaccaaggagggcgttgatgcctacaacgaagtgatcgcccgggtgcgaatgtgggtgaacctgaacctgtggcagaagctgaagctaagcagagatgatgccaagcctctgctgagactgaagggattcccttcctttcctctggtcgagagacaggccaacgaagtggactggtgggacatggtgtgtaacgtgaagaagctgatcaacgagaaaaaggaggatggcaaggtgttttggcagaatctggctggctacaagagacaggaagccctgagaccatacctgagcagcgaggaagatcggaagaagggaaagaaattcgctcggtaccagctgggcgacctgctgctgcacctggaaaagaagcacggcgaggactggggaaaggtgtacgacgaggcctgggagcggattgacaagaaagtggaaggcctgagcaagcacatcaagctggaagaggaacggagaagcgaggacgcccagagcaaggccgccctgaccgactggctgcgggctaaggccagcttcgtgatcgagggcctgaaggaggccgacaaggacgagttctgcagatgcgagctgaagctgcagaagtggtacggggacctgcggggaaagcccttcgccatcgaagccgagaacagcatcctggacatcagcggcttcagcaagcagtacaactgtgccttcatctggcagaaggacggcgtgaagaagctgaacctgtacctgatcatcaactacttcaagggcggcaagctgcggttcaagaagatcaaacctgaagccttcgaagccaacagattctacaccgtgatcaacaaaaagagcggcgagatcgtgcccatggaggtgaacttcaacttcgacgaccccaacctgatcatcctgcctctggcctttggcaagagacagggcagagaattcatctggaacgacctgctgtccctggaaaccggcagcctgaagctggccaacggaagagtgatcgagaagacactgtacaacagaagaacccggcaggatgagcctgccctgttcgtggccctgaccttcgagcggcgggaggtcctggactcctccaatatcaaaccaatgaacctgatcggcgtggcaagaggcgaaaacatccccgccgtgatcgccctgaccgaccccgagggctgcccactgagccggtttaaggatagcctgggaaacccaacccacatcctgagaatcggcgagagctataaggagaagcagcggaccatccaggccaagaaggaggtggagcagcggagagccggcggctacagccggaagtacgccagcaaagccaagaatctggcagacgatatggtgagaaacaccgctagagatctgctgtactacgccgtgacccaggatgccatgctgatcttcgccaacctgagccggggcttcggccggcagggcaagcggaccttcatggccgagagacagtacacacggatggaggactggctgaccgccaagctggcctacgagggcctgagcaagacctacctgtccaagacactggcccagtacacctccaagacatgcagcaactgtgggtttaccatcaccagcgccgactacgacagggtgctggagaagctgaagaagacagcaacaggctggatgaccacaattaacggcaaggagctgaaggtggagggccagattacctactacaacagatacaagagacagaacgtagtcaaggacctgtccgtcgagctggatagactgagcgaagaatctgtgaacaacgacatctcctcctggacaaagggcagaagcggagaagctctgagcctcctgaagaaaagattctcccatagacccgtgcaggagaagttcgtgtgcctgaactgcggcttcgagacacacgcagccgagcaagccgccctgaacatcgccagatcctggctgttcctgcggagccaggagtacaagaaataccagacaaacaagacaaccggcaacaccgataagagagccttcgtcgagacctggcagtccttttaccggaagaagcttaaggaggtgtggaaacctgccgtgcggtctggcggatctggcggaggctccaccagccccaagaaaaagagaaaagtctaagctgccttctgcggggcttgccttctggccatgcccttcttctctcccttgcacctgtacctcttggtctttgaataaagcctgagtaggaaggctagcaaaaaaaaaaaaaaaaaaaaaaaaaaaaaaaaaaaaaaaaaaaaaaaaaaaaaaaaaaaaaaaaaaaaaaaaaaaaaaaa

SEQ ID NO: 13307 - RNA, 5785 nt, synthetic construct
  source 1..5785: mol_type = other RNA
aggaaataagagagaaaagaagagtaagaagaaatataagagccaccatggcccctaagaagaagcgtaaagtgagccggatggaacgcctcgtctacgaggtgcggcagaagtgcagaaacatcgaggacatctgcatctcctgcggatctctgaacgtgaccctggagcacccactgttcatcggcggcatgtgccagaactgtaaaaactgttttctggagtgtgcctatcaatacgacgatgacggctaccagagctactgcaccatctgttgcggcggaagagaggtgctgatgtgtggaaataacaactgctgccggtgcttctgcgtggaatgcgtggacctgctggtgggccccggcgccgcccaggccgctattaaggaagatccttggaactgctacatgtgcggccacaagggcacatacggcctgctgagacggagagaggactggcctagcagactgcagatgttcttcgccaataaccacgaccaggagttcgacccccctaaggtgtaccctcccgtccccgccgagaagagaaagcccatccgggtcctgagcctgttcgatggcatcgccaccggtctgctggtgctgaaggacctgggcatccaggtggataggtacattgcctccgaggtgtgcgaggactccatcaccgtgggaatggtgcgtcatcagggcaagatcatgtacgtgggcgacgtgcggagcgtgacacagaagcatatccaggagtggggccctttcgacctggtgatcggcggcagcccttgcaatgacctgagcatcgtgaacccagcccggaagggcctgtacgagggaaccggcagactgttcttcgagttttacagactgctgcacgacgcccggcctaaggaaggcgacgaccggcccttcttttggctgttcgagaatgtggtggccatgggagtcagcgacaagcgggatattagccggttcctggagagcaaccccgtgatgatcgatgccaaggaagtgagcgccgcccaccgggccagatacttctggggcaatctgcctggcatgaacagacccctggccagcaccgtgaacgacaagctggagctgcaggagtgcctggagcacggccggatcgccaagttcagcaaggtgagaaccatcaccacccgaagcaacagcatcaaacaaggcaaggaccagcactttcctgtgttcatgaacgagaaggaggacatcctgtggtgtaccgagatggagagagtgttcgggttcccagtccactacacagatgtcagcaacatgtctagactggccagacagagactgctgggaagaagctggtccgtccctgtgatcagacacctgttcgcccctctgaaggagtacttcgcctgcgtgagcagcggcaacagcaacgccaacagccggggccccagcttctctagcggcctggtgccactgtccctgagagggagccacatgggccccatggagatctacaaaaccgtgagcgcctggaagcggcagcctgtgcgcgtgctgagcctgtttcggaatatcgataaagtcctgaaaagcctgggattcctggagagcggctctggctccggcggtggcaccctgaagtacgtggaggatgtgacaaacgtggtcagacgggatgtggagaagtggggccccttcgatctggtgtacggcagcacccaacccctgggcagctcttgtgaccggtgccctggctggtacatgtttcagttccaccggatcctgcagtacgccctgccgagacaggagtcccagcggccattcttttggattttcatggacaacttgctgctgaccgaggatgaccaggaaactaccactcggttcctgcagaccgaagccgtgaccctgcaggacgtgagaggccgggactaccagaacgccatgcgggtgtggtccaacatccctggactgaaaagcaagcacgcacctctgacccctaaagaagaggagtacctgcaggcccaggtgcggagcagaagcaagctggacgcccctaaggtggatctgctggtgaagaattgcctcctgcccctgagagagtacttcaagtatttcagccagaatagtctgcccctgggaggcagcggcggcggcgtgcaggagagcgtgaccttcagggacctggccgtggacttcgacatggaggagtggggctacctgtgccccagccagaaggagctgtacagggaggtgatgctggagaactacaggcacctggtgagcctgggcctgctggaggccaagcccgacctgatcagcaggctggagcaggaggagccccaggtgtgggaggtgcaggagggcgccagcggcagcgtgtgcgcctgcaccggcggcggcggcccaagcagcggcgcccctcctcccagcggcggcagcccagccggctccccaacctctaccgaggagggcacctctgagtccgccacccccgagagcggccctggcacctccaccgagcccagcgagggcagcgcacccggcagccctgccggcagccccacctccacagaggagggaaccagcaccgagcccagcgaaggcagcgccccaggcaccagcaccgagcctagtgagcaggagattaaacggatcaacaagatcagaagaagacttgtgaaagacagcaacaccaagaaggccggcaagacaggccccatgaaaaccctgctggttagagtgatgacacccgatctgagagagcggctggaaaacctgagaaagaagcctgaaaatatcccccagcccatcagcaatacatctagagccaacctgaataagctgctgaccgattacaccgaaatgaagaaggcgatcctgcatgtgtactgggaagagttccagaaggaccctgtgggcctgatgagccgggtggcccagcctgccagcaagaagatcgatcagaacaagctgaaacctgagatggacgagaagggcaacctgaccaccgccggctttgcctgctctcagtgtggccagcccctgttcgtgtacaagctggagcaggtgtctgagaagggcaaggcttacaccaactacttcggacggtgcaatgtggccgagcacgaaaagctgatcctgctggcccagctgaagcccgagaaggatagcgacgaagccgtgacatatagcctgggaaagtttgggcagagggccctggatttctacagcattcatgtgaccaaggagtccacccaccccgtgaagcccctggcccagatcgccggaaacagatacgcctccggacctgtgggaaaggccctgagcgacgcatgtatgggcacaatcgcctccttcctgtctaagtaccaggacatcatcatcgaacaccagaaggtggtgaagggcaaccagaagagactggagagcctgcgggagctggccggcaaggaaaacctggaataccctagcgtgaccctgccacctcagcctcacaccaaggagggcgttgatgcctacaacgaagtgatcgcccgggtgcgaatgtgggtgaacctgaacctgtggcagaagctgaagctaagcagagatgatgccaagcctctgctgagactgaagggattcccttcctttcctctggtcgagagacaggccaacgaagtggactggtgggacatggtgtgtaacgtgaagaagctgatcaacgagaaaaaggaggatggcaaggtgttttggcagaatctggctggctacaagagacaggaagccctgagaccatacctgagcagcgaggaagatcggaagaagggaaagaaattcgctcggtaccagctgggcgacctgctgctgcacctggaaaagaagcacggcgaggactggggaaaggtgtacgacgaggcctgggagcggattgacaagaaagtggaaggcctgagcaagcacatcaagctggaagaggaacggagaagcgaggacgcccagagcaaggccgccctgaccgactggctgcgggctaaggccagcttcgtgatcgagggcctgaaggaggccgacaaggacgagttctgcagatgcgagctgaagctgcagaagtggtacggggacctgcggggaaagcccttcgccatcgaagccgagaacagcatcctggacatcagcggcttcagcaagcagtacaactgtgccttcatctggcagaaggacggcgtgaagaagctgaacctgtacctgatcatcaactacttcaagggcggcaagctgcggttcaagaagatcaaacctgaagccttcgaagccaacagattctacaccgtgatcaacaaaaagagcggcgagatcgtgcccatggaggtgaacttcaacttcgacgaccccaacctgatcatcctgcctctggcctttggcaagagacagggcagagaattcatctggaacgacctgctgtccctggaaaccggcagcctgaagctggccaacggaagagtgatcgagaagacactgtacaacagaagaacccggcaggatgagcctgccctgttcgtggccctgaccttcgagcggcgggaggtcctggactcctccaatatcaaaccaatgaacctgatcggcgtggcaagaggcgaaaacatccccgccgtgatcgccctgaccgaccccgagggctgcccactgagccggtttaaggatagcctgggaaacccaacccacatcctgagaatcggcgagagctataaggagaagcagcggaccatccaggccaagaaggaggtggagcagcggagagccggcggctacagccggaagtacgccagcaaagccaagaatctggcagacgatatggtgagaaacaccgctagagatctgctgtactacgccgtgacccaggatgccatgctgatcttcgccaacctgagccggggcttcggccggcagggcaagcggaccttcatggccgagagacagtacacacggatggaggactggctgaccgccaagctggcctacgagggcctgagcaagacctacctgtccaagacactggcccagtacacctccaagacatgcagcaactgtgggtttaccatcaccagcgccgactacgacagggtgctggagaagctgaagaagacagcaacaggctggatgaccacaattaacggcaaggagctgaaggtggagggccagattacctactacaacagatacaagagacagaacgtagtcaaggacctgtccgtcgagctggatagactgagcgaagaatctgtgaacaacgacatctcctcctggacaaagggcagaagcggagaagctctgagcctcctgaagaaaagattctcccatagacccgtgcaggagaagttcgtgtgcctgaactgcggcttcgagacacacgcagccgagcaagccgccctgaacatcgccagatcctggctgttcctgcggagccaggagtacaagaaataccagacaaacaagacaaccggcaacaccgataagagagccttcgtcgagacctggcagtccttttaccggaagaagcttaaggaggtgtggaaacctgccgtgcggtctggcggatctggcggaggctccaccagccccaagaaaaagagaaaagtctaagctgccttctgcggggcttgccttctggccatgcccttcttctctcccttgcacctgtacctcttggtctttgaataaagcctgagtaggaaggctagcaaaaaaaaaaaaaaaaaaaaaaaaaaaaaaaaaaaaaaaaaaaaaaaaaaaaaaaaaaaaaaaaaaaaaaaaaaaaaaaa

SEQ ID NO: 13308 - RNA, 5785 nt, synthetic construct
  source 1..5785: mol_type = other RNA
aggaaataagagagaaaagaagagtaagaagaaatataagagccaccatggcccctaagaagaagcgtaaagtgagccggatggaacgcctcgtctacgaggtgcggcagaagtgcagaaacatcgaggacatctgcatctcctgcggatctctgaacgtgaccctggagcacccactgttcatcggcggcatgtgccagaactgtaaaaactgttttctggagtgtgcctatcaatacgacgatgacggctaccagagctactgcaccatctgttgcggcggaagagaggtgctgatgtgtggaaataacaactgctgccggtgcttctgcgtggaatgcgtggacctgctggtgggccccggcgccgcccaggccgctattaaggaagatccttggaactgctacatgtgcggccacaagggcacatacggcctgctgagacggagagaggactggcctagcagactgcagatgttcttcgccaataaccacgaccaggagttcgacccccctaaggtgtaccctcccgtccccgccgagaagagaaagcccatccgggtcctgagcctgttcgatggcatcgccaccggtctgctggtgctgaaggacctgggcatccaggtggataggtacattgcctccgaggtgtgcgaggactccatcaccgtgggaatggtgcgtcatcagggcaagatcatgtacgtgggcgacgtgcggagcgtgacacagaagcatatccaggagtggggccctttcgacctggtgatcggcggcagcccttgcaatgacctgagcatcgtgaacccagcccggaagggcctgtacgagggaaccggcagactgttcttcgagttttacagactgctgcacgacgcccggcctaaggaaggcgacgaccggcccttcttttggctgttcgagaatgtggtggccatgggagtcagcgacaagcgggatattagccggttcctggagagcaaccccgtgatgatcgatgccaaggaagtgagcgccgcccaccgggccagatacttctggggcaatctgcctggcatgaacagacccctggccagcaccgtgaacgacaagctggagctgcaggagtgcctggagcacggccggatcgccaagttcagcaaggtgagaaccatcaccacccgaagcaacagcatcaaacaaggcaaggaccagcactttcctgtgttcatgaacgagaaggaggacatcctgtggtgtaccgagatggagagagtgttcgggttcccagtccactacacagatgtcagcaacatgtctagactggccagacagagactgctgggaagaagctggtccgtccctgtgatcagacacctgttcgcccctctgaaggagtacttcgcctgcgtgagcagcggcaacagcaacgccaacagccggggccccagcttctctagcggcctggtgccactgtccctgagagggagccacatgggccccatggagatctacaaaaccgtgagcgcctggaagcggcagcctgtgcgcgtgctgagcctgtttcggaatatcgataaagtcctgaaaagcctgggattcctggagagcggctctggctccggcggtggcaccctgaagtacgtggaggatgtgacaaacgtggtcagacgggatgtggagaagtggggccccttcgatctggtgtacggcagcacccaacccctgggcagctcttgtgaccggtgccctggctggtacatgtttcagttccaccggatcctgcagtacgccctgccgagacaggagtcccagcggccattcttttggattttcatggacaacttgctgctgaccgaggatgaccaggaaactaccactcggttcctgcagaccgaagccgtgaccctgcaggacgtgagaggccgggactaccagaacgccatgcgggtgtggtccaacatccctggactgaaaagcaagcacgcacctctgacccctaaagaagaggagtacctgcaggcccaggtgcggagcagaagcaagctggacgcccctaaggtggatctgctggtgaagaattgcctcctgcccctgagagagtacttcaagtatttcagccagaatagtctgcccctgggaggcagcggcggcggcagccaggagctgctgaccttcaaggacgtgagcgtggacttcacccaggaggagtggggccagctgagcctggcccacaggaacctgtacagggaggtgatgctggagaactacggcaacctggtgagcgtggccggctaccagctgagcaagcccagcgtgatcagccagctggagaagggccaggagccctggatgaccgagaagaagggccccggcgaccccagccccgacctgaagaacggcggcccaagcagcggcgcccctcctcccagcggcggcagcccagccggctccccaacctctaccgaggagggcacctctgagtccgccacccccgagagcggccctggcacctccaccgagcccagcgagggcagcgcacccggcagccctgccggcagccccacctccacagaggagggaaccagcaccgagcccagcgaaggcagcgccccaggcaccagcaccgagcctagtgagcaggagattaaacggatcaacaagatcagaagaagacttgtgaaagacagcaacaccaagaaggccggcaagacaggccccatgaaaaccctgctggttagagtgatgacacccgatctgagagagcggctggaaaacctgagaaagaagcctgaaaatatcccccagcccatcagcaatacatctagagccaacctgaataagctgctgaccgattacaccgaaatgaagaaggcgatcctgcatgtgtactgggaagagttccagaaggaccctgtgggcctgatgagccgggtggcccagcctgccagcaagaagatcgatcagaacaagctgaaacctgagatggacgagaagggcaacctgaccaccgccggctttgcctgctctcagtgtggccagcccctgttcgtgtacaagctggagcaggtgtctgagaagggcaaggcttacaccaactacttcggacggtgcaatgtggccgagcacgaaaagctgatcctgctggcccagctgaagcccgagaaggatagcgacgaagccgtgacatatagcctgggaaagtttgggcagagggccctggatttctacagcattcatgtgaccaaggagtccacccaccccgtgaagcccctggcccagatcgccggaaacagatacgcctccggacctgtgggaaaggccctgagcgacgcatgtatgggcacaatcgcctccttcctgtctaagtaccaggacatcatcatcgaacaccagaaggtggtgaagggcaaccagaagagactggagagcctgcgggagctggccggcaaggaaaacctggaataccctagcgtgaccctgccacctcagcctcacaccaaggagggcgttgatgcctacaacgaagtgatcgcccgggtgcgaatgtgggtgaacctgaacctgtggcagaagctgaagctaagcagagatgatgccaagcctctgctgagactgaagggattcccttcctttcctctggtcgagagacaggccaacgaagtggactggtgggacatggtgtgtaacgtgaagaagctgatcaacgagaaaaaggaggatggcaaggtgttttggcagaatctggctggctacaagagacaggaagccctgagaccatacctgagcagcgaggaagatcggaagaagggaaagaaattcgctcggtaccagctgggcgacctgctgctgcacctggaaaagaagcacggcgaggactggggaaaggtgtacgacgaggcctgggagcggattgacaagaaagtggaaggcctgagcaagcacatcaagctggaagaggaacggagaagcgaggacgcccagagcaaggccgccctgaccgactggctgcgggctaaggccagcttcgtgatcgagggcctgaaggaggccgacaaggacgagttctgcagatgcgagctgaagctgcagaagtggtacggggacctgcggggaaagcccttcgccatcgaagccgagaacagcatcctggacatcagcggcttcagcaagcagtacaactgtgccttcatctggcagaaggacggcgtgaagaagctgaacctgtacctgatcatcaactacttcaagggcggcaagctgcggttcaagaagatcaaacctgaagccttcgaagccaacagattctacaccgtgatcaacaaaaagagcggcgagatcgtgcccatggaggtgaacttcaacttcgacgaccccaacctgatcatcctgcctctggcctttggcaagagacagggcagagaattcatctggaacgacctgctgtccctggaaaccggcagcctgaagctggccaacggaagagtgatcgagaagacactgtacaacagaagaacccggcaggatgagcctgccctgttcgtggccctgaccttcgagcggcgggaggtcctggactcctccaatatcaaaccaatgaacctgatcggcgtggcaagaggcgaaaacatccccgccgtgatcgccctgaccgaccccgagggctgcccactgagccggtttaaggatagcctgggaaacccaacccacatcctgagaatcggcgagagctataaggagaagcagcggaccatccaggccaagaaggaggtggagcagcggagagccggcggctacagccggaagtacgccagcaaagccaagaatctggcagacgatatggtgagaaacaccgctagagatctgctgtactacgccgtgacccaggatgccatgctgatcttcgccaacctgagccggggcttcggccggcagggcaagcggaccttcatggccgagagacagtacacacggatggaggactggctgaccgccaagctggcctacgagggcctgagcaagacctacctgtccaagacactggcccagtacacctccaagacatgcagcaactgtgggtttaccatcaccagcgccgactacgacagggtgctggagaagctgaagaagacagcaacaggctggatgaccacaattaacggcaaggagctgaaggtggagggccagattacctactacaacagatacaagagacagaacgtagtcaaggacctgtccgtcgagctggatagactgagcgaagaatctgtgaacaacgacatctcctcctggacaaagggcagaagcggagaagctctgagcctcctgaagaaaagattctcccatagacccgtgcaggagaagttcgtgtgcctgaactgcggcttcgagacacacgcagccgagcaagccgccctgaacatcgccagatcctggctgttcctgcggagccaggagtacaagaaataccagacaaacaagacaaccggcaacaccgataagagagccttcgtcgagacctggcagtccttttaccggaagaagcttaaggaggtgtggaaacctgccgtgcggtctggcggatctggcggaggctccaccagccccaagaaaaagagaaaagtctaagctgccttctgcggggcttgccttctggccatgcccttcttctctcccttgcacctgtacctcttggtctttgaataaagcctgagtaggaaggctagcaaaaaaaaaaaaaaaaaaaaaaaaaaaaaaaaaaaaaaaaaaaaaaaaaaaaaaaaaaaaaaaaaaaaaaaaaaaaaaaa

SEQ ID NO: 13309 - RNA, 5785 nt, synthetic construct
  source 1..5785: mol_type = other RNA
aggaaataagagagaaaagaagagtaagaagaaatataagagccaccatggcccctaagaagaagcgtaaagtgagccggatggaacgcctcgtctacgaggtgcggcagaagtgcagaaacatcgaggacatctgcatctcctgcggatctctgaacgtgaccctggagcacccactgttcatcggcggcatgtgccagaactgtaaaaactgttttctggagtgtgcctatcaatacgacgatgacggctaccagagctactgcaccatctgttgcggcggaagagaggtgctgatgtgtggaaataacaactgctgccggtgcttctgcgtggaatgcgtggacctgctggtgggccccggcgccgcccaggccgctattaaggaagatccttggaactgctacatgtgcggccacaagggcacatacggcctgctgagacggagagaggactggcctagcagactgcagatgttcttcgccaataaccacgaccaggagttcgacccccctaaggtgtaccctcccgtccccgccgagaagagaaagcccatccgggtcctgagcctgttcgatggcatcgccaccggtctgctggtgctgaaggacctgggcatccaggtggataggtacattgcctccgaggtgtgcgaggactccatcaccgtgggaatggtgcgtcatcagggcaagatcatgtacgtgggcgacgtgcggagcgtgacacagaagcatatccaggagtggggccctttcgacctggtgatcggcggcagcccttgcaatgacctgagcatcgtgaacccagcccggaagggcctgtacgagggaaccggcagactgttcttcgagttttacagactgctgcacgacgcccggcctaaggaaggcgacgaccggcccttcttttggctgttcgagaatgtggtggccatgggagtcagcgacaagcgggatattagccggttcctggagagcaaccccgtgatgatcgatgccaaggaagtgagcgccgcccaccgggccagatacttctggggcaatctgcctggcatgaacagacccctggccagcaccgtgaacgacaagctggagctgcaggagtgcctggagcacggccggatcgccaagttcagcaaggtgagaaccatcaccacccgaagcaacagcatcaaacaaggcaaggaccagcactttcctgtgttcatgaacgagaaggaggacatcctgtggtgtaccgagatggagagagtgttcgggttcccagtccactacacagatgtcagcaacatgtctagactggccagacagagactgctgggaagaagctggtccgtccctgtgatcagacacctgttcgcccctctgaaggagtacttcgcctgcgtgagcagcggcaacagcaacgccaacagccggggccccagcttctctagcggcctggtgccactgtccctgagagggagccacatgggccccatggagatctacaaaaccgtgagcgcctggaagcggcagcctgtgcgcgtgctgagcctgtttcggaatatcgataaagtcctgaaaagcctgggattcctggagagcggctctggctccggcggtggcaccctgaagtacgtggaggatgtgacaaacgtggtcagacgggatgtggagaagtggggccccttcgatctggtgtacggcagcacccaacccctgggcagctcttgtgaccggtgccctggctggtacatgtttcagttccaccggatcctgcagtacgccctgccgagacaggagtcccagcggccattcttttggattttcatggacaacttgctgctgaccgaggatgaccaggaaactaccactcggttcctgcagaccgaagccgtgaccctgcaggacgtgagaggccgggactaccagaacgccatgcgggtgtggtccaacatccctggactgaaaagcaagcacgcacctctgacccctaaagaagaggagtacctgcaggcccaggtgcggagcagaagcaagctggacgcccctaaggtggatctgctggtgaagaattgcctcctgcccctgagagagtacttcaagtatttcagccagaatagtctgcccctgggaggcagcggcggcggcgaggtgcaggagaccctgaccttcgacgacgtggccgtggccttcacctgggaggagtggcagctgctggcccccgcccagaaggccctgtacagggacgtgatgctggagaaccacagcaacctggtgagcgtgggcttccaggccagcacccccgaggtgctgagcaagctggaccagggcgagccctggaccatggacgacgaggtgcactgcaggaccaggagcgaggtgtggaagttcggcggcccaagcagcggcgcccctcctcccagcggcggcagcccagccggctccccaacctctaccgaggagggcacctctgagtccgccacccccgagagcggccctggcacctccaccgagcccagcgagggcagcgcacccggcagccctgccggcagccccacctccacagaggagggaaccagcaccgagcccagcgaaggcagcgccccaggcaccagcaccgagcctagtgagcaggagattaaacggatcaacaagatcagaagaagacttgtgaaagacagcaacaccaagaaggccggcaagacaggccccatgaaaaccctgctggttagagtgatgacacccgatctgagagagcggctggaaaacctgagaaagaagcctgaaaatatcccccagcccatcagcaatacatctagagccaacctgaataagctgctgaccgattacaccgaaatgaagaaggcgatcctgcatgtgtactgggaagagttccagaaggaccctgtgggcctgatgagccgggtggcccagcctgccagcaagaagatcgatcagaacaagctgaaacctgagatggacgagaagggcaacctgaccaccgccggctttgcctgctctcagtgtggccagcccctgttcgtgtacaagctggagcaggtgtctgagaagggcaaggcttacaccaactacttcggacggtgcaatgtggccgagcacgaaaagctgatcctgctggcccagctgaagcccgagaaggatagcgacgaagccgtgacatatagcctgggaaagtttgggcagagggccctggatttctacagcattcatgtgaccaaggagtccacccaccccgtgaagcccctggcccagatcgccggaaacagatacgcctccggacctgtgggaaaggccctgagcgacgcatgtatgggcacaatcgcctccttcctgtctaagtaccaggacatcatcatcgaacaccagaaggtggtgaagggcaaccagaagagactggagagcctgcgggagctggccggcaaggaaaacctggaataccctagcgtgaccctgccacctcagcctcacaccaaggagggcgttgatgcctacaacgaagtgatcgcccgggtgcgaatgtgggtgaacctgaacctgtggcagaagctgaagctaagcagagatgatgccaagcctctgctgagactgaagggattcccttcctttcctctggtcgagagacaggccaacgaagtggactggtgggacatggtgtgtaacgtgaagaagctgatcaacgagaaaaaggaggatggcaaggtgttttggcagaatctggctggctacaagagacaggaagccctgagaccatacctgagcagcgaggaagatcggaagaagggaaagaaattcgctcggtaccagctgggcgacctgctgctgcacctggaaaagaagcacggcgaggactggggaaaggtgtacgacgaggcctgggagcggattgacaagaaagtggaaggcctgagcaagcacatcaagctggaagaggaacggagaagcgaggacgcccagagcaaggccgccctgaccgactggctgcgggctaaggccagcttcgtgatcgagggcctgaaggaggccgacaaggacgagttctgcagatgcgagctgaagctgcagaagtggtacggggacctgcggggaaagcccttcgccatcgaagccgagaacagcatcctggacatcagcggcttcagcaagcagtacaactgtgccttcatctggcagaaggacggcgtgaagaagctgaacctgtacctgatcatcaactacttcaagggcggcaagctgcggttcaagaagatcaaacctgaagccttcgaagccaacagattctacaccgtgatcaacaaaaagagcggcgagatcgtgcccatggaggtgaacttcaacttcgacgaccccaacctgatcatcctgcctctggcctttggcaagagacagggcagagaattcatctggaacgacctgctgtccctggaaaccggcagcctgaagctggccaacggaagagtgatcgagaagacactgtacaacagaagaacccggcaggatgagcctgccctgttcgtggccctgaccttcgagcggcgggaggtcctggactcctccaatatcaaaccaatgaacctgatcggcgtggcaagaggcgaaaacatccccgccgtgatcgccctgaccgaccccgagggctgcccactgagccggtttaaggatagcctgggaaacccaacccacatcctgagaatcggcgagagctataaggagaagcagcggaccatccaggccaagaaggaggtggagcagcggagagccggcggctacagccggaagtacgccagcaaagccaagaatctggcagacgatatggtgagaaacaccgctagagatctgctgtactacgccgtgacccaggatgccatgctgatcttcgccaacctgagccggggcttcggccggcagggcaagcggaccttcatggccgagagacagtacacacggatggaggactggctgaccgccaagctggcctacgagggcctgagcaagacctacctgtccaagacactggcccagtacacctccaagacatgcagcaactgtgggtttaccatcaccagcgccgactacgacagggtgctggagaagctgaagaagacagcaacaggctggatgaccacaattaacggcaaggagctgaaggtggagggccagattacctactacaacagatacaagagacagaacgtagtcaaggacctgtccgtcgagctggatagactgagcgaagaatctgtgaacaacgacatctcctcctggacaaagggcagaagcggagaagctctgagcctcctgaagaaaagattctcccatagacccgtgcaggagaagttcgtgtgcctgaactgcggcttcgagacacacgcagccgagcaagccgccctgaacatcgccagatcctggctgttcctgcggagccaggagtacaagaaataccagacaaacaagacaaccggcaacaccgataagagagccttcgtcgagacctggcagtccttttaccggaagaagcttaaggaggtgtggaaacctgccgtgcggtctggcggatctggcggaggctccaccagccccaagaaaaagagaaaagtctaagctgccttctgcggggcttgccttctggccatgcccttcttctctcccttgcacctgtacctcttggtctttgaataaagcctgagtaggaaggctagcaaaaaaaaaaaaaaaaaaaaaaaaaaaaaaaaaaaaaaaaaaaaaaaaaaaaaaaaaaaaaaaaaaaaaaaaaaaaaaaa

SEQ ID NO: 13310 - RNA, 5785 nt, synthetic construct
  source 1..5785: mol_type = other RNA
aggaaataagagagaaaagaagagtaagaagaaatataagagccaccatggcccctaagaagaagcgtaaagtgagccggatggaacgcctcgtctacgaggtgcggcagaagtgcagaaacatcgaggacatctgcatctcctgcggatctctgaacgtgaccctggagcacccactgttcatcggcggcatgtgccagaactgtaaaaactgttttctggagtgtgcctatcaatacgacgatgacggctaccagagctactgcaccatctgttgcggcggaagagaggtgctgatgtgtggaaataacaactgctgccggtgcttctgcgtggaatgcgtggacctgctggtgggccccggcgccgcccaggccgctattaaggaagatccttggaactgctacatgtgcggccacaagggcacatacggcctgctgagacggagagaggactggcctagcagactgcagatgttcttcgccaataaccacgaccaggagttcgacccccctaaggtgtaccctcccgtccccgccgagaagagaaagcccatccgggtcctgagcctgttcgatggcatcgccaccggtctgctggtgctgaaggacctgggcatccaggtggataggtacattgcctccgaggtgtgcgaggactccatcaccgtgggaatggtgcgtcatcagggcaagatcatgtacgtgggcgacgtgcggagcgtgacacagaagcatatccaggagtggggccctttcgacctggtgatcggcggcagcccttgcaatgacctgagcatcgtgaacccagcccggaagggcctgtacgagggaaccggcagactgttcttcgagttttacagactgctgcacgacgcccggcctaaggaaggcgacgaccggcccttcttttggctgttcgagaatgtggtggccatgggagtcagcgacaagcgggatattagccggttcctggagagcaaccccgtgatgatcgatgccaaggaagtgagcgccgcccaccgggccagatacttctggggcaatctgcctggcatgaacagacccctggccagcaccgtgaacgacaagctggagctgcaggagtgcctggagcacggccggatcgccaagttcagcaaggtgagaaccatcaccacccgaagcaacagcatcaaacaaggcaaggaccagcactttcctgtgttcatgaacgagaaggaggacatcctgtggtgtaccgagatggagagagtgttcgggttcccagtccactacacagatgtcagcaacatgtctagactggccagacagagactgctgggaagaagctggtccgtccctgtgatcagacacctgttcgcccctctgaaggagtacttcgcctgcgtgagcagcggcaacagcaacgccaacagccggggccccagcttctctagcggcctggtgccactgtccctgagagggagccacatgggccccatggagatctacaaaaccgtgagcgcctggaagcggcagcctgtgcgcgtgctgagcctgtttcggaatatcgataaagtcctgaaaagcctgggattcctggagagcggctctggctccggcggtggcaccctgaagtacgtggaggatgtgacaaacgtggtcagacgggatgtggagaagtggggccccttcgatctggtgtacggcagcacccaacccctgggcagctcttgtgaccggtgccctggctggtacatgtttcagttccaccggatcctgcagtacgccctgccgagacaggagtcccagcggccattcttttggattttcatggacaacttgctgctgaccgaggatgaccaggaaactaccactcggttcctgcagaccgaagccgtgaccctgcaggacgtgagaggccgggactaccagaacgccatgcgggtgtggtccaacatccctggactgaaaagcaagcacgcacctctgacccctaaagaagaggagtacctgcaggcccaggtgcggagcagaagcaagctggacgcccctaaggtggatctgctggtgaagaattgcctcctgcccctgagagagtacttcaagtatttcagccagaatagtctgcccctgggaggcagcggcggcggcagccagggcctggtgaccttcgaggacgtggccgtgtacttcagcctggaggagtggcagaggctggacgccgcccagagggacctgtacaaggaggtgatgcaggagaactacggcatcctggtgagcctgggctaccccatccccaagcccgacctgatcttcaggctggagcagggcgaggagccctgggtgcccgacagccccagccccgaggagggcgacatcgtgaccggcgtgtacggcggcccaagcagcggcgcccctcctcccagcggcggcagcccagccggctccccaacctctaccgaggagggcacctctgagtccgccacccccgagagcggccctggcacctccaccgagcccagcgagggcagcgcacccggcagccctgccggcagccccacctccacagaggagggaaccagcaccgagcccagcgaaggcagcgccccaggcaccagcaccgagcctagtgagcaggagattaaacggatcaacaagatcagaagaagacttgtgaaagacagcaacaccaagaaggccggcaagacaggccccatgaaaaccctgctggttagagtgatgacacccgatctgagagagcggctggaaaacctgagaaagaagcctgaaaatatcccccagcccatcagcaatacatctagagccaacctgaataagctgctgaccgattacaccgaaatgaagaaggcgatcctgcatgtgtactgggaagagttccagaaggaccctgtgggcctgatgagccgggtggcccagcctgccagcaagaagatcgatcagaacaagctgaaacctgagatggacgagaagggcaacctgaccaccgccggctttgcctgctctcagtgtggccagcccctgttcgtgtacaagctggagcaggtgtctgagaagggcaaggcttacaccaactacttcggacggtgcaatgtggccgagcacgaaaagctgatcctgctggcccagctgaagcccgagaaggatagcgacgaagccgtgacatatagcctgggaaagtttgggcagagggccctggatttctacagcattcatgtgaccaaggagtccacccaccccgtgaagcccctggcccagatcgccggaaacagatacgcctccggacctgtgggaaaggccctgagcgacgcatgtatgggcacaatcgcctccttcctgtctaagtaccaggacatcatcatcgaacaccagaaggtggtgaagggcaaccagaagagactggagagcctgcgggagctggccggcaaggaaaacctggaataccctagcgtgaccctgccacctcagcctcacaccaaggagggcgttgatgcctacaacgaagtgatcgcccgggtgcgaatgtgggtgaacctgaacctgtggcagaagctgaagctaagcagagatgatgccaagcctctgctgagactgaagggattcccttcctttcctctggtcgagagacaggccaacgaagtggactggtgggacatggtgtgtaacgtgaagaagctgatcaacgagaaaaaggaggatggcaaggtgttttggcagaatctggctggctacaagagacaggaagccctgagaccatacctgagcagcgaggaagatcggaagaagggaaagaaattcgctcggtaccagctgggcgacctgctgctgcacctggaaaagaagcacggcgaggactggggaaaggtgtacgacgaggcctgggagcggattgacaagaaagtggaaggcctgagcaagcacatcaagctggaagaggaacggagaagcgaggacgcccagagcaaggccgccctgaccgactggctgcgggctaaggccagcttcgtgatcgagggcctgaaggaggccgacaaggacgagttctgcagatgcgagctgaagctgcagaagtggtacggggacctgcggggaaagcccttcgccatcgaagccgagaacagcatcctggacatcagcggcttcagcaagcagtacaactgtgccttcatctggcagaaggacggcgtgaagaagctgaacctgtacctgatcatcaactacttcaagggcggcaagctgcggttcaagaagatcaaacctgaagccttcgaagccaacagattctacaccgtgatcaacaaaaagagcggcgagatcgtgcccatggaggtgaacttcaacttcgacgaccccaacctgatcatcctgcctctggcctttggcaagagacagggcagagaattcatctggaacgacctgctgtccctggaaaccggcagcctgaagctggccaacggaagagtgatcgagaagacactgtacaacagaagaacccggcaggatgagcctgccctgttcgtggccctgaccttcgagcggcgggaggtcctggactcctccaatatcaaaccaatgaacctgatcggcgtggcaagaggcgaaaacatccccgccgtgatcgccctgaccgaccccgagggctgcccactgagccggtttaaggatagcctgggaaacccaacccacatcctgagaatcggcgagagctataaggagaagcagcggaccatccaggccaagaaggaggtggagcagcggagagccggcggctacagccggaagtacgccagcaaagccaagaatctggcagacgatatggtgagaaacaccgctagagatctgctgtactacgccgtgacccaggatgccatgctgatcttcgccaacctgagccggggcttcggccggcagggcaagcggaccttcatggccgagagacagtacacacggatggaggactggctgaccgccaagctggcctacgagggcctgagcaagacctacctgtccaagacactggcccagtacacctccaagacatgcagcaactgtgggtttaccatcaccagcgccgactacgacagggtgctggagaagctgaagaagacagcaacaggctggatgaccacaattaacggcaaggagctgaaggtggagggccagattacctactacaacagatacaagagacagaacgtagtcaaggacctgtccgtcgagctggatagactgagcgaagaatctgtgaacaacgacatctcctcctggacaaagggcagaagcggagaagctctgagcctcctgaagaaaagattctcccatagacccgtgcaggagaagttcgtgtgcctgaactgcggcttcgagacacacgcagccgagcaagccgccctgaacatcgccagatcctggctgttcctgcggagccaggagtacaagaaataccagacaaacaagacaaccggcaacaccgataagagagccttcgtcgagacctggcagtccttttaccggaagaagcttaaggaggtgtggaaacctgccgtgcggtctggcggatctggcggaggctccaccagccccaagaaaaagagaaaagtctaagctgccttctgcggggcttgccttctggccatgcccttcttctctcccttgcacctgtacctcttggtctttgaataaagcctgagtaggaaggctagcaaaaaaaaaaaaaaaaaaaaaaaaaaaaaaaaaaaaaaaaaaaaaaaaaaaaaaaaaaaaaaaaaaaaaaaaaaaaaaaa

SEQ ID NO: 13311 - RNA, 5785 nt, synthetic construct
  source 1..5785: mol_type = other RNA
aggaaataagagagaaaagaagagtaagaagaaatataagagccaccatggcccctaagaagaagcgtaaagtgagccggatggaacgcctcgtctacgaggtgcggcagaagtgcagaaacatcgaggacatctgcatctcctgcggatctctgaacgtgaccctggagcacccactgttcatcggcggcatgtgccagaactgtaaaaactgttttctggagtgtgcctatcaatacgacgatgacggctaccagagctactgcaccatctgttgcggcggaagagaggtgctgatgtgtggaaataacaactgctgccggtgcttctgcgtggaatgcgtggacctgctggtgggccccggcgccgcccaggccgctattaaggaagatccttggaactgctacatgtgcggccacaagggcacatacggcctgctgagacggagagaggactggcctagcagactgcagatgttcttcgccaataaccacgaccaggagttcgacccccctaaggtgtaccctcccgtccccgccgagaagagaaagcccatccgggtcctgagcctgttcgatggcatcgccaccggtctgctggtgctgaaggacctgggcatccaggtggataggtacattgcctccgaggtgtgcgaggactccatcaccgtgggaatggtgcgtcatcagggcaagatcatgtacgtgggcgacgtgcggagcgtgacacagaagcatatccaggagtggggccctttcgacctggtgatcggcggcagcccttgcaatgacctgagcatcgtgaacccagcccggaagggcctgtacgagggaaccggcagactgttcttcgagttttacagactgctgcacgacgcccggcctaaggaaggcgacgaccggcccttcttttggctgttcgagaatgtggtggccatgggagtcagcgacaagcgggatattagccggttcctggagagcaaccccgtgatgatcgatgccaaggaagtgagcgccgcccaccgggccagatacttctggggcaatctgcctggcatgaacagacccctggccagcaccgtgaacgacaagctggagctgcaggagtgcctggagcacggccggatcgccaagttcagcaaggtgagaaccatcaccacccgaagcaacagcatcaaacaaggcaaggaccagcactttcctgtgttcatgaacgagaaggaggacatcctgtggtgtaccgagatggagagagtgttcgggttcccagtccactacacagatgtcagcaacatgtctagactggccagacagagactgctgggaagaagctggtccgtccctgtgatcagacacctgttcgcccctctgaaggagtacttcgcctgcgtgagcagcggcaacagcaacgccaacagccggggccccagcttctctagcggcctggtgccactgtccctgagagggagccacatgggccccatggagatctacaaaaccgtgagcgcctggaagcggcagcctgtgcgcgtgctgagcctgtttcggaatatcgataaagtcctgaaaagcctgggattcctggagagcggctctggctccggcggtggcaccctgaagtacgtggaggatgtgacaaacgtggtcagacgggatgtggagaagtggggccccttcgatctggtgtacggcagcacccaacccctgggcagctcttgtgaccggtgccctggctggtacatgtttcagttccaccggatcctgcagtacgccctgccgagacaggagtcccagcggccattcttttggattttcatggacaacttgctgctgaccgaggatgaccaggaaactaccactcggttcctgcagaccgaagccgtgaccctgcaggacgtgagaggccgggactaccagaacgccatgcgggtgtggtccaacatccctggactgaaaagcaagcacgcacctctgacccctaaagaagaggagtacctgcaggcccaggtgcggagcagaagcaagctggacgcccctaaggtggatctgctggtgaagaattgcctcctgcccctgagagagtacttcaagtatttcagccagaatagtctgcccctgggaggcagcggcggcggcagcctggagagcgtgaccttccaggacgtggccgtgaacttcacccaggaggagtggggccacctggagcccgcccagaaggacctgtacagggaggtgatgctggagaactaccagaacttcgtgagcctgggcctgcccttcagcaagccccacgtgatcagccagctggagaggggcgaggccccctggatcaccgagagggacgtgcccagggtgagctgccaggacttcttcatccagggcggcccaagcagcggcgcccctcctcccagcggcggcagcccagccggctccccaacctctaccgaggagggcacctctgagtccgccacccccgagagcggccctggcacctccaccgagcccagcgagggcagcgcacccggcagccctgccggcagccccacctccacagaggagggaaccagcaccgagcccagcgaaggcagcgccccaggcaccagcaccgagcctagtgagcaggagattaaacggatcaacaagatcagaagaagacttgtgaaagacagcaacaccaagaaggccggcaagacaggccccatgaaaaccctgctggttagagtgatgacacccgatctgagagagcggctggaaaacctgagaaagaagcctgaaaatatcccccagcccatcagcaatacatctagagccaacctgaataagctgctgaccgattacaccgaaatgaagaaggcgatcctgcatgtgtactgggaagagttccagaaggaccctgtgggcctgatgagccgggtggcccagcctgccagcaagaagatcgatcagaacaagctgaaacctgagatggacgagaagggcaacctgaccaccgccggctttgcctgctctcagtgtggccagcccctgttcgtgtacaagctggagcaggtgtctgagaagggcaaggcttacaccaactacttcggacggtgcaatgtggccgagcacgaaaagctgatcctgctggcccagctgaagcccgagaaggatagcgacgaagccgtgacatatagcctgggaaagtttgggcagagggccctggatttctacagcattcatgtgaccaaggagtccacccaccccgtgaagcccctggcccagatcgccggaaacagatacgcctccggacctgtgggaaaggccctgagcgacgcatgtatgggcacaatcgcctccttcctgtctaagtaccaggacatcatcatcgaacaccagaaggtggtgaagggcaaccagaagagactggagagcctgcgggagctggccggcaaggaaaacctggaataccctagcgtgaccctgccacctcagcctcacaccaaggagggcgttgatgcctacaacgaagtgatcgcccgggtgcgaatgtgggtgaacctgaacctgtggcagaagctgaagctaagcagagatgatgccaagcctctgctgagactgaagggattcccttcctttcctctggtcgagagacaggccaacgaagtggactggtgggacatggtgtgtaacgtgaagaagctgatcaacgagaaaaaggaggatggcaaggtgttttggcagaatctggctggctacaagagacaggaagccctgagaccatacctgagcagcgaggaagatcggaagaagggaaagaaattcgctcggtaccagctgggcgacctgctgctgcacctggaaaagaagcacggcgaggactggggaaaggtgtacgacgaggcctgggagcggattgacaagaaagtggaaggcctgagcaagcacatcaagctggaagaggaacggagaagcgaggacgcccagagcaaggccgccctgaccgactggctgcgggctaaggccagcttcgtgatcgagggcctgaaggaggccgacaaggacgagttctgcagatgcgagctgaagctgcagaagtggtacggggacctgcggggaaagcccttcgccatcgaagccgagaacagcatcctggacatcagcggcttcagcaagcagtacaactgtgccttcatctggcagaaggacggcgtgaagaagctgaacctgtacctgatcatcaactacttcaagggcggcaagctgcggttcaagaagatcaaacctgaagccttcgaagccaacagattctacaccgtgatcaacaaaaagagcggcgagatcgtgcccatggaggtgaacttcaacttcgacgaccccaacctgatcatcctgcctctggcctttggcaagagacagggcagagaattcatctggaacgacctgctgtccctggaaaccggcagcctgaagctggccaacggaagagtgatcgagaagacactgtacaacagaagaacccggcaggatgagcctgccctgttcgtggccctgaccttcgagcggcgggaggtcctggactcctccaatatcaaaccaatgaacctgatcggcgtggcaagaggcgaaaacatccccgccgtgatcgccctgaccgaccccgagggctgcccactgagccggtttaaggatagcctgggaaacccaacccacatcctgagaatcggcgagagctataaggagaagcagcggaccatccaggccaagaaggaggtggagcagcggagagccggcggctacagccggaagtacgccagcaaagccaagaatctggcagacgatatggtgagaaacaccgctagagatctgctgtactacgccgtgacccaggatgccatgctgatcttcgccaacctgagccggggcttcggccggcagggcaagcggaccttcatggccgagagacagtacacacggatggaggactggctgaccgccaagctggcctacgagggcctgagcaagacctacctgtccaagacactggcccagtacacctccaagacatgcagcaactgtgggtttaccatcaccagcgccgactacgacagggtgctggagaagctgaagaagacagcaacaggctggatgaccacaattaacggcaaggagctgaaggtggagggccagattacctactacaacagatacaagagacagaacgtagtcaaggacctgtccgtcgagctggatagactgagcgaagaatctgtgaacaacgacatctcctcctggacaaagggcagaagcggagaagctctgagcctcctgaagaaaagattctcccatagacccgtgcaggagaagttcgtgtgcctgaactgcggcttcgagacacacgcagccgagcaagccgccctgaacatcgccagatcctggctgttcctgcggagccaggagtacaagaaataccagacaaacaagacaaccggcaacaccgataagagagccttcgtcgagacctggcagtccttttaccggaagaagcttaaggaggtgtggaaacctgccgtgcggtctggcggatctggcggaggctccaccagccccaagaaaaagagaaaagtctaagctgccttctgcggggcttgccttctggccatgcccttcttctctcccttgcacctgtacctcttggtctttgaataaagcctgagtaggaaggctagcaaaaaaaaaaaaaaaaaaaaaaaaaaaaaaaaaaaaaaaaaaaaaaaaaaaaaaaaaaaaaaaaaaaaaaaaaaaaaaaa

SEQ ID NO: 13312 - RNA, 5785 nt, synthetic construct
  source 1..5785: mol_type = other RNA
aggaaataagagagaaaagaagagtaagaagaaatataagagccaccatggcccctaagaagaagcgtaaagtgagccggatggaacgcctcgtctacgaggtgcggcagaagtgcagaaacatcgaggacatctgcatctcctgcggatctctgaacgtgaccctggagcacccactgttcatcggcggcatgtgccagaactgtaaaaactgttttctggagtgtgcctatcaatacgacgatgacggctaccagagctactgcaccatctgttgcggcggaagagaggtgctgatgtgtggaaataacaactgctgccggtgcttctgcgtggaatgcgtggacctgctggtgggccccggcgccgcccaggccgctattaaggaagatccttggaactgctacatgtgcggccacaagggcacatacggcctgctgagacggagagaggactggcctagcagactgcagatgttcttcgccaataaccacgaccaggagttcgacccccctaaggtgtaccctcccgtccccgccgagaagagaaagcccatccgggtcctgagcctgttcgatggcatcgccaccggtctgctggtgctgaaggacctgggcatccaggtggataggtacattgcctccgaggtgtgcgaggactccatcaccgtgggaatggtgcgtcatcagggcaagatcatgtacgtgggcgacgtgcggagcgtgacacagaagcatatccaggagtggggccctttcgacctggtgatcggcggcagcccttgcaatgacctgagcatcgtgaacccagcccggaagggcctgtacgagggaaccggcagactgttcttcgagttttacagactgctgcacgacgcccggcctaaggaaggcgacgaccggcccttcttttggctgttcgagaatgtggtggccatgggagtcagcgacaagcgggatattagccggttcctggagagcaaccccgtgatgatcgatgccaaggaagtgagcgccgcccaccgggccagatacttctggggcaatctgcctggcatgaacagacccctggccagcaccgtgaacgacaagctggagctgcaggagtgcctggagcacggccggatcgccaagttcagcaaggtgagaaccatcaccacccgaagcaacagcatcaaacaaggcaaggaccagcactttcctgtgttcatgaacgagaaggaggacatcctgtggtgtaccgagatggagagagtgttcgggttcccagtccactacacagatgtcagcaacatgtctagactggccagacagagactgctgggaagaagctggtccgtccctgtgatcagacacctgttcgcccctctgaaggagtacttcgcctgcgtgagcagcggcaacagcaacgccaacagccggggccccagcttctctagcggcctggtgccactgtccctgagagggagccacatgggccccatggagatctacaaaaccgtgagcgcctggaagcggcagcctgtgcgcgtgctgagcctgtttcggaatatcgataaagtcctgaaaagcctgggattcctggagagcggctctggctccggcggtggcaccctgaagtacgtggaggatgtgacaaacgtggtcagacgggatgtggagaagtggggccccttcgatctggtgtacggcagcacccaacccctgggcagctcttgtgaccggtgccctggctggtacatgtttcagttccaccggatcctgcagtacgccctgccgagacaggagtcccagcggccattcttttggattttcatggacaacttgctgctgaccgaggatgaccaggaaactaccactcggttcctgcagaccgaagccgtgaccctgcaggacgtgagaggccgggactaccagaacgccatgcgggtgtggtccaacatccctggactgaaaagcaagcacgcacctctgacccctaaagaagaggagtacctgcaggcccaggtgcggagcagaagcaagctggacgcccctaaggtggatctgctggtgaagaattgcctcctgcccctgagagagtacttcaagtatttcagccagaatagtctgcccctgggaggcagcggcggcggcaagagcaagagcaaggcccccgtgaccttcggcgacctggccatctacttcagccaggaggagtgggagtggctgagccccatccagaaggacctgtacgaggacgtgatgctggagaactaccagaacctggtgagcctgggcctgagcttcaggaggcccaacgtgatcaccctgctggagaagggcaaggccccctggatggtggagcccgtgaagaggaggaggggcctgggccccctgggcggcccaagcagcggcgcccctcctcccagcggcggcagcccagccggctccccaacctctaccgaggagggcacctctgagtccgccacccccgagagcggccctggcacctccaccgagcccagcgagggcagcgcacccggcagccctgccggcagccccacctccacagaggagggaaccagcaccgagcccagcgaaggcagcgccccaggcaccagcaccgagcctagtgagcaggagattaaacggatcaacaagatcagaagaagacttgtgaaagacagcaacaccaagaaggccggcaagacaggccccatgaaaaccctgctggttagagtgatgacacccgatctgagagagcggctggaaaacctgagaaagaagcctgaaaatatcccccagcccatcagcaatacatctagagccaacctgaataagctgctgaccgattacaccgaaatgaagaaggcgatcctgcatgtgtactgggaagagttccagaaggaccctgtgggcctgatgagccgggtggcccagcctgccagcaagaagatcgatcagaacaagctgaaacctgagatggacgagaagggcaacctgaccaccgccggctttgcctgctctcagtgtggccagcccctgttcgtgtacaagctggagcaggtgtctgagaagggcaaggcttacaccaactacttcggacggtgcaatgtggccgagcacgaaaagctgatcctgctggcccagctgaagcccgagaaggatagcgacgaagccgtgacatatagcctgggaaagtttgggcagagggccctggatttctacagcattcatgtgaccaaggagtccacccaccccgtgaagcccctggcccagatcgccggaaacagatacgcctccggacctgtgggaaaggccctgagcgacgcatgtatgggcacaatcgcctccttcctgtctaagtaccaggacatcatcatcgaacaccagaaggtggtgaagggcaaccagaagagactggagagcctgcgggagctggccggcaaggaaaacctggaataccctagcgtgaccctgccacctcagcctcacaccaaggagggcgttgatgcctacaacgaagtgatcgcccgggtgcgaatgtgggtgaacctgaacctgtggcagaagctgaagctaagcagagatgatgccaagcctctgctgagactgaagggattcccttcctttcctctggtcgagagacaggccaacgaagtggactggtgggacatggtgtgtaacgtgaagaagctgatcaacgagaaaaaggaggatggcaaggtgttttggcagaatctggctggctacaagagacaggaagccctgagaccatacctgagcagcgaggaagatcggaagaagggaaagaaattcgctcggtaccagctgggcgacctgctgctgcacctggaaaagaagcacggcgaggactggggaaaggtgtacgacgaggcctgggagcggattgacaagaaagtggaaggcctgagcaagcacatcaagctggaagaggaacggagaagcgaggacgcccagagcaaggccgccctgaccgactggctgcgggctaaggccagcttcgtgatcgagggcctgaaggaggccgacaaggacgagttctgcagatgcgagctgaagctgcagaagtggtacggggacctgcggggaaagcccttcgccatcgaagccgagaacagcatcctggacatcagcggcttcagcaagcagtacaactgtgccttcatctggcagaaggacggcgtgaagaagctgaacctgtacctgatcatcaactacttcaagggcggcaagctgcggttcaagaagatcaaacctgaagccttcgaagccaacagattctacaccgtgatcaacaaaaagagcggcgagatcgtgcccatggaggtgaacttcaacttcgacgaccccaacctgatcatcctgcctctggcctttggcaagagacagggcagagaattcatctggaacgacctgctgtccctggaaaccggcagcctgaagctggccaacggaagagtgatcgagaagacactgtacaacagaagaacccggcaggatgagcctgccctgttcgtggccctgaccttcgagcggcgggaggtcctggactcctccaatatcaaaccaatgaacctgatcggcgtggcaagaggcgaaaacatccccgccgtgatcgccctgaccgaccccgagggctgcccactgagccggtttaaggatagcctgggaaacccaacccacatcctgagaatcggcgagagctataaggagaagcagcggaccatccaggccaagaaggaggtggagcagcggagagccggcggctacagccggaagtacgccagcaaagccaagaatctggcagacgatatggtgagaaacaccgctagagatctgctgtactacgccgtgacccaggatgccatgctgatcttcgccaacctgagccggggcttcggccggcagggcaagcggaccttcatggccgagagacagtacacacggatggaggactggctgaccgccaagctggcctacgagggcctgagcaagacctacctgtccaagacactggcccagtacacctccaagacatgcagcaactgtgggtttaccatcaccagcgccgactacgacagggtgctggagaagctgaagaagacagcaacaggctggatgaccacaattaacggcaaggagctgaaggtggagggccagattacctactacaacagatacaagagacagaacgtagtcaaggacctgtccgtcgagctggatagactgagcgaagaatctgtgaacaacgacatctcctcctggacaaagggcagaagcggagaagctctgagcctcctgaagaaaagattctcccatagacccgtgcaggagaagttcgtgtgcctgaactgcggcttcgagacacacgcagccgagcaagccgccctgaacatcgccagatcctggctgttcctgcggagccaggagtacaagaaataccagacaaacaagacaaccggcaacaccgataagagagccttcgtcgagacctggcagtccttttaccggaagaagcttaaggaggtgtggaaacctgccgtgcggtctggcggatctggcggaggctccaccagccccaagaaaaagagaaaagtctaagctgccttctgcggggcttgccttctggccatgcccttcttctctcccttgcacctgtacctcttggtctttgaataaagcctgagtaggaaggctagcaaaaaaaaaaaaaaaaaaaaaaaaaaaaaaaaaaaaaaaaaaaaaaaaaaaaaaaaaaaaaaaaaaaaaaaaaaaaaaaa

SEQ ID NO: 13313 - RNA, 5785 nt, synthetic construct
  source 1..5785: mol_type = other RNA
aggaaataagagagaaaagaagagtaagaagaaatataagagccaccatggcccctaagaagaagcgtaaagtgagccggatggaacgcctcgtctacgaggtgcggcagaagtgcagaaacatcgaggacatctgcatctcctgcggatctctgaacgtgaccctggagcacccactgttcatcggcggcatgtgccagaactgtaaaaactgttttctggagtgtgcctatcaatacgacgatgacggctaccagagctactgcaccatctgttgcggcggaagagaggtgctgatgtgtggaaataacaactgctgccggtgcttctgcgtggaatgcgtggacctgctggtgggccccggcgccgcccaggccgctattaaggaagatccttggaactgctacatgtgcggccacaagggcacatacggcctgctgagacggagagaggactggcctagcagactgcagatgttcttcgccaataaccacgaccaggagttcgacccccctaaggtgtaccctcccgtccccgccgagaagagaaagcccatccgggtcctgagcctgttcgatggcatcgccaccggtctgctggtgctgaaggacctgggcatccaggtggataggtacattgcctccgaggtgtgcgaggactccatcaccgtgggaatggtgcgtcatcagggcaagatcatgtacgtgggcgacgtgcggagcgtgacacagaagcatatccaggagtggggccctttcgacctggtgatcggcggcagcccttgcaatgacctgagcatcgtgaacccagcccggaagggcctgtacgagggaaccggcagactgttcttcgagttttacagactgctgcacgacgcccggcctaaggaaggcgacgaccggcccttcttttggctgttcgagaatgtggtggccatgggagtcagcgacaagcgggatattagccggttcctggagagcaaccccgtgatgatcgatgccaaggaagtgagcgccgcccaccgggccagatacttctggggcaatctgcctggcatgaacagacccctggccagcaccgtgaacgacaagctggagctgcaggagtgcctggagcacggccggatcgccaagttcagcaaggtgagaaccatcaccacccgaagcaacagcatcaaacaaggcaaggaccagcactttcctgtgttcatgaacgagaaggaggacatcctgtggtgtaccgagatggagagagtgttcgggttcccagtccactacacagatgtcagcaacatgtctagactggccagacagagactgctgggaagaagctggtccgtccctgtgatcagacacctgttcgcccctctgaaggagtacttcgcctgcgtgagcagcggcaacagcaacgccaacagccggggccccagcttctctagcggcctggtgccactgtccctgagagggagccacatgggccccatggagatctacaaaaccgtgagcgcctggaagcggcagcctgtgcgcgtgctgagcctgtttcggaatatcgataaagtcctgaaaagcctgggattcctggagagcggctctggctccggcggtggcaccctgaagtacgtggaggatgtgacaaacgtggtcagacgggatgtggagaagtggggccccttcgatctggtgtacggcagcacccaacccctgggcagctcttgtgaccggtgccctggctggtacatgtttcagttccaccggatcctgcagtacgccctgccgagacaggagtcccagcggccattcttttggattttcatggacaacttgctgctgaccgaggatgaccaggaaactaccactcggttcctgcagaccgaagccgtgaccctgcaggacgtgagaggccgggactaccagaacgccatgcgggtgtggtccaacatccctggactgaaaagcaagcacgcacctctgacccctaaagaagaggagtacctgcaggcccaggtgcggagcagaagcaagctggacgcccctaaggtggatctgctggtgaagaattgcctcctgcccctgagagagtacttcaagtatttcagccagaatagtctgcccctgggaggcagcggcggcggcaagcccggcgccgtgagcttcgccgacgtggccgtgtacttcagccccgaggagtggggctgcctgaggcccgcccagagggccctgtacagggacgtgatgagggagacctacggccacctgggcgccctgggcttcaggggcaccaagcccgccctgatcagctgggtggaggaggaggccgacctgtggggccccgacgccagggaccccgaggtgggcgagtgcctgaccgccgccgacggcggcccaagcagcggcgcccctcctcccagcggcggcagcccagccggctccccaacctctaccgaggagggcacctctgagtccgccacccccgagagcggccctggcacctccaccgagcccagcgagggcagcgcacccggcagccctgccggcagccccacctccacagaggagggaaccagcaccgagcccagcgaaggcagcgccccaggcaccagcaccgagcctagtgagcaggagattaaacggatcaacaagatcagaagaagacttgtgaaagacagcaacaccaagaaggccggcaagacaggccccatgaaaaccctgctggttagagtgatgacacccgatctgagagagcggctggaaaacctgagaaagaagcctgaaaatatcccccagcccatcagcaatacatctagagccaacctgaataagctgctgaccgattacaccgaaatgaagaaggcgatcctgcatgtgtactgggaagagttccagaaggaccctgtgggcctgatgagccgggtggcccagcctgccagcaagaagatcgatcagaacaagctgaaacctgagatggacgagaagggcaacctgaccaccgccggctttgcctgctctcagtgtggccagcccctgttcgtgtacaagctggagcaggtgtctgagaagggcaaggcttacaccaactacttcggacggtgcaatgtggccgagcacgaaaagctgatcctgctggcccagctgaagcccgagaaggatagcgacgaagccgtgacatatagcctgggaaagtttgggcagagggccctggatttctacagcattcatgtgaccaaggagtccacccaccccgtgaagcccctggcccagatcgccggaaacagatacgcctccggacctgtgggaaaggccctgagcgacgcatgtatgggcacaatcgcctccttcctgtctaagtaccaggacatcatcatcgaacaccagaaggtggtgaagggcaaccagaagagactggagagcctgcgggagctggccggcaaggaaaacctggaataccctagcgtgaccctgccacctcagcctcacaccaaggagggcgttgatgcctacaacgaagtgatcgcccgggtgcgaatgtgggtgaacctgaacctgtggcagaagctgaagctaagcagagatgatgccaagcctctgctgagactgaagggattcccttcctttcctctggtcgagagacaggccaacgaagtggactggtgggacatggtgtgtaacgtgaagaagctgatcaacgagaaaaaggaggatggcaaggtgttttggcagaatctggctggctacaagagacaggaagccctgagaccatacctgagcagcgaggaagatcggaagaagggaaagaaattcgctcggtaccagctgggcgacctgctgctgcacctggaaaagaagcacggcgaggactggggaaaggtgtacgacgaggcctgggagcggattgacaagaaagtggaaggcctgagcaagcacatcaagctggaagaggaacggagaagcgaggacgcccagagcaaggccgccctgaccgactggctgcgggctaaggccagcttcgtgatcgagggcctgaaggaggccgacaaggacgagttctgcagatgcgagctgaagctgcagaagtggtacggggacctgcggggaaagcccttcgccatcgaagccgagaacagcatcctggacatcagcggcttcagcaagcagtacaactgtgccttcatctggcagaaggacggcgtgaagaagctgaacctgtacctgatcatcaactacttcaagggcggcaagctgcggttcaagaagatcaaacctgaagccttcgaagccaacagattctacaccgtgatcaacaaaaagagcggcgagatcgtgcccatggaggtgaacttcaacttcgacgaccccaacctgatcatcctgcctctggcctttggcaagagacagggcagagaattcatctggaacgacctgctgtccctggaaaccggcagcctgaagctggccaacggaagagtgatcgagaagacactgtacaacagaagaacccggcaggatgagcctgccctgttcgtggccctgaccttcgagcggcgggaggtcctggactcctccaatatcaaaccaatgaacctgatcggcgtggcaagaggcgaaaacatccccgccgtgatcgccctgaccgaccccgagggctgcccactgagccggtttaaggatagcctgggaaacccaacccacatcctgagaatcggcgagagctataaggagaagcagcggaccatccaggccaagaaggaggtggagcagcggagagccggcggctacagccggaagtacgccagcaaagccaagaatctggcagacgatatggtgagaaacaccgctagagatctgctgtactacgccgtgacccaggatgccatgctgatcttcgccaacctgagccggggcttcggccggcagggcaagcggaccttcatggccgagagacagtacacacggatggaggactggctgaccgccaagctggcctacgagggcctgagcaagacctacctgtccaagacactggcccagtacacctccaagacatgcagcaactgtgggtttaccatcaccagcgccgactacgacagggtgctggagaagctgaagaagacagcaacaggctggatgaccacaattaacggcaaggagctgaaggtggagggccagattacctactacaacagatacaagagacagaacgtagtcaaggacctgtccgtcgagctggatagactgagcgaagaatctgtgaacaacgacatctcctcctggacaaagggcagaagcggagaagctctgagcctcctgaagaaaagattctcccatagacccgtgcaggagaagttcgtgtgcctgaactgcggcttcgagacacacgcagccgagcaagccgccctgaacatcgccagatcctggctgttcctgcggagccaggagtacaagaaataccagacaaacaagacaaccggcaacaccgataagagagccttcgtcgagacctggcagtccttttaccggaagaagcttaaggaggtgtggaaacctgccgtgcggtctggcggatctggcggaggctccaccagccccaagaaaaagagaaaagtctaagctgccttctgcggggcttgccttctggccatgcccttcttctctcccttgcacctgtacctcttggtctttgaataaagcctgagtaggaaggctagcaaaaaaaaaaaaaaaaaaaaaaaaaaaaaaaaaaaaaaaaaaaaaaaaaaaaaaaaaaaaaaaaaaaaaaaaaaaaaaaa

SEQ ID NO: 13314 - RNA, 5785 nt, synthetic construct
  source 1..5785: mol_type = other RNA
aggaaataagagagaaaagaagagtaagaagaaatataagagccaccatggcccctaagaagaagcgtaaagtgagccggatggaacgcctcgtctacgaggtgcggcagaagtgcagaaacatcgaggacatctgcatctcctgcggatctctgaacgtgaccctggagcacccactgttcatcggcggcatgtgccagaactgtaaaaactgttttctggagtgtgcctatcaatacgacgatgacggctaccagagctactgcaccatctgttgcggcggaagagaggtgctgatgtgtggaaataacaactgctgccggtgcttctgcgtggaatgcgtggacctgctggtgggccccggcgccgcccaggccgctattaaggaagatccttggaactgctacatgtgcggccacaagggcacatacggcctgctgagacggagagaggactggcctagcagactgcagatgttcttcgccaataaccacgaccaggagttcgacccccctaaggtgtaccctcccgtccccgccgagaagagaaagcccatccgggtcctgagcctgttcgatggcatcgccaccggtctgctggtgctgaaggacctgggcatccaggtggataggtacattgcctccgaggtgtgcgaggactccatcaccgtgggaatggtgcgtcatcagggcaagatcatgtacgtgggcgacgtgcggagcgtgacacagaagcatatccaggagtggggccctttcgacctggtgatcggcggcagcccttgcaatgacctgagcatcgtgaacccagcccggaagggcctgtacgagggaaccggcagactgttcttcgagttttacagactgctgcacgacgcccggcctaaggaaggcgacgaccggcccttcttttggctgttcgagaatgtggtggccatgggagtcagcgacaagcgggatattagccggttcctggagagcaaccccgtgatgatcgatgccaaggaagtgagcgccgcccaccgggccagatacttctggggcaatctgcctggcatgaacagacccctggccagcaccgtgaacgacaagctggagctgcaggagtgcctggagcacggccggatcgccaagttcagcaaggtgagaaccatcaccacccgaagcaacagcatcaaacaaggcaaggaccagcactttcctgtgttcatgaacgagaaggaggacatcctgtggtgtaccgagatggagagagtgttcgggttcccagtccactacacagatgtcagcaacatgtctagactggccagacagagactgctgggaagaagctggtccgtccctgtgatcagacacctgttcgcccctctgaaggagtacttcgcctgcgtgagcagcggcaacagcaacgccaacagccggggccccagcttctctagcggcctggtgccactgtccctgagagggagccacatgggccccatggagatctacaaaaccgtgagcgcctggaagcggcagcctgtgcgcgtgctgagcctgtttcggaatatcgataaagtcctgaaaagcctgggattcctggagagcggctctggctccggcggtggcaccctgaagtacgtggaggatgtgacaaacgtggtcagacgggatgtggagaagtggggccccttcgatctggtgtacggcagcacccaacccctgggcagctcttgtgaccggtgccctggctggtacatgtttcagttccaccggatcctgcagtacgccctgccgagacaggagtcccagcggccattcttttggattttcatggacaacttgctgctgaccgaggatgaccaggaaactaccactcggttcctgcagaccgaagccgtgaccctgcaggacgtgagaggccgggactaccagaacgccatgcgggtgtggtccaacatccctggactgaaaagcaagcacgcacctctgacccctaaagaagaggagtacctgcaggcccaggtgcggagcagaagcaagctggacgcccctaaggtggatctgctggtgaagaattgcctcctgcccctgagagagtacttcaagtatttcagccagaatagtctgcccctgggaggcagcggcggcggctgccaggagcccgtgagcttcgcccaggtggccgtgtacttcagcagggaggagtgggccctgctggaccccgcccagagggccctgtacagggacgtgatgctggagacctaccagtgcgtggccagcctggcccccctgcccgcccccaagcccatgctgatcagcctgctggagggcggcgaggacccctgggtgcccgacgtgtgcagccccgaggccgtgcccggcgacctgagccccggcggcccaagcagcggcgcccctcctcccagcggcggcagcccagccggctccccaacctctaccgaggagggcacctctgagtccgccacccccgagagcggccctggcacctccaccgagcccagcgagggcagcgcacccggcagccctgccggcagccccacctccacagaggagggaaccagcaccgagcccagcgaaggcagcgccccaggcaccagcaccgagcctagtgagcaggagattaaacggatcaacaagatcagaagaagacttgtgaaagacagcaacaccaagaaggccggcaagacaggccccatgaaaaccctgctggttagagtgatgacacccgatctgagagagcggctggaaaacctgagaaagaagcctgaaaatatcccccagcccatcagcaatacatctagagccaacctgaataagctgctgaccgattacaccgaaatgaagaaggcgatcctgcatgtgtactgggaagagttccagaaggaccctgtgggcctgatgagccgggtggcccagcctgccagcaagaagatcgatcagaacaagctgaaacctgagatggacgagaagggcaacctgaccaccgccggctttgcctgctctcagtgtggccagcccctgttcgtgtacaagctggagcaggtgtctgagaagggcaaggcttacaccaactacttcggacggtgcaatgtggccgagcacgaaaagctgatcctgctggcccagctgaagcccgagaaggatagcgacgaagccgtgacatatagcctgggaaagtttgggcagagggccctggatttctacagcattcatgtgaccaaggagtccacccaccccgtgaagcccctggcccagatcgccggaaacagatacgcctccggacctgtgggaaaggccctgagcgacgcatgtatgggcacaatcgcctccttcctgtctaagtaccaggacatcatcatcgaacaccagaaggtggtgaagggcaaccagaagagactggagagcctgcgggagctggccggcaaggaaaacctggaataccctagcgtgaccctgccacctcagcctcacaccaaggagggcgttgatgcctacaacgaagtgatcgcccgggtgcgaatgtgggtgaacctgaacctgtggcagaagctgaagctaagcagagatgatgccaagcctctgctgagactgaagggattcccttcctttcctctggtcgagagacaggccaacgaagtggactggtgggacatggtgtgtaacgtgaagaagctgatcaacgagaaaaaggaggatggcaaggtgttttggcagaatctggctggctacaagagacaggaagccctgagaccatacctgagcagcgaggaagatcggaagaagggaaagaaattcgctcggtaccagctgggcgacctgctgctgcacctggaaaagaagcacggcgaggactggggaaaggtgtacgacgaggcctgggagcggattgacaagaaagtggaaggcctgagcaagcacatcaagctggaagaggaacggagaagcgaggacgcccagagcaaggccgccctgaccgactggctgcgggctaaggccagcttcgtgatcgagggcctgaaggaggccgacaaggacgagttctgcagatgcgagctgaagctgcagaagtggtacggggacctgcggggaaagcccttcgccatcgaagccgagaacagcatcctggacatcagcggcttcagcaagcagtacaactgtgccttcatctggcagaaggacggcgtgaagaagctgaacctgtacctgatcatcaactacttcaagggcggcaagctgcggttcaagaagatcaaacctgaagccttcgaagccaacagattctacaccgtgatcaacaaaaagagcggcgagatcgtgcccatggaggtgaacttcaacttcgacgaccccaacctgatcatcctgcctctggcctttggcaagagacagggcagagaattcatctggaacgacctgctgtccctggaaaccggcagcctgaagctggccaacggaagagtgatcgagaagacactgtacaacagaagaacccggcaggatgagcctgccctgttcgtggccctgaccttcgagcggcgggaggtcctggactcctccaatatcaaaccaatgaacctgatcggcgtggcaagaggcgaaaacatccccgccgtgatcgccctgaccgaccccgagggctgcccactgagccggtttaaggatagcctgggaaacccaacccacatcctgagaatcggcgagagctataaggagaagcagcggaccatccaggccaagaaggaggtggagcagcggagagccggcggctacagccggaagtacgccagcaaagccaagaatctggcagacgatatggtgagaaacaccgctagagatctgctgtactacgccgtgacccaggatgccatgctgatcttcgccaacctgagccggggcttcggccggcagggcaagcggaccttcatggccgagagacagtacacacggatggaggactggctgaccgccaagctggcctacgagggcctgagcaagacctacctgtccaagacactggcccagtacacctccaagacatgcagcaactgtgggtttaccatcaccagcgccgactacgacagggtgctggagaagctgaagaagacagcaacaggctggatgaccacaattaacggcaaggagctgaaggtggagggccagattacctactacaacagatacaagagacagaacgtagtcaaggacctgtccgtcgagctggatagactgagcgaagaatctgtgaacaacgacatctcctcctggacaaagggcagaagcggagaagctctgagcctcctgaagaaaagattctcccatagacccgtgcaggagaagttcgtgtgcctgaactgcggcttcgagacacacgcagccgagcaagccgccctgaacatcgccagatcctggctgttcctgcggagccaggagtacaagaaataccagacaaacaagacaaccggcaacaccgataagagagccttcgtcgagacctggcagtccttttaccggaagaagcttaaggaggtgtggaaacctgccgtgcggtctggcggatctggcggaggctccaccagccccaagaaaaagagaaaagtctaagctgccttctgcggggcttgccttctggccatgcccttcttctctcccttgcacctgtacctcttggtctttgaataaagcctgagtaggaaggctagcaaaaaaaaaaaaaaaaaaaaaaaaaaaaaaaaaaaaaaaaaaaaaaaaaaaaaaaaaaaaaaaaaaaaaaaaaaaaaaaa

SEQ ID NO: 13315 - RNA, 5785 nt, synthetic construct
  source 1..5785: mol_type = other RNA
aggaaataagagagaaaagaagagtaagaagaaatataagagccaccatggcccctaagaagaagcgtaaagtgagccggatggaacgcctcgtctacgaggtgcggcagaagtgcagaaacatcgaggacatctgcatctcctgcggatctctgaacgtgaccctggagcacccactgttcatcggcggcatgtgccagaactgtaaaaactgttttctggagtgtgcctatcaatacgacgatgacggctaccagagctactgcaccatctgttgcggcggaagagaggtgctgatgtgtggaaataacaactgctgccggtgcttctgcgtggaatgcgtggacctgctggtgggccccggcgccgcccaggccgctattaaggaagatccttggaactgctacatgtgcggccacaagggcacatacggcctgctgagacggagagaggactggcctagcagactgcagatgttcttcgccaataaccacgaccaggagttcgacccccctaaggtgtaccctcccgtccccgccgagaagagaaagcccatccgggtcctgagcctgttcgatggcatcgccaccggtctgctggtgctgaaggacctgggcatccaggtggataggtacattgcctccgaggtgtgcgaggactccatcaccgtgggaatggtgcgtcatcagggcaagatcatgtacgtgggcgacgtgcggagcgtgacacagaagcatatccaggagtggggccctttcgacctggtgatcggcggcagcccttgcaatgacctgagcatcgtgaacccagcccggaagggcctgtacgagggaaccggcagactgttcttcgagttttacagactgctgcacgacgcccggcctaaggaaggcgacgaccggcccttcttttggctgttcgagaatgtggtggccatgggagtcagcgacaagcgggatattagccggttcctggagagcaaccccgtgatgatcgatgccaaggaagtgagcgccgcccaccgggccagatacttctggggcaatctgcctggcatgaacagacccctggccagcaccgtgaacgacaagctggagctgcaggagtgcctggagcacggccggatcgccaagttcagcaaggtgagaaccatcaccacccgaagcaacagcatcaaacaaggcaaggaccagcactttcctgtgttcatgaacgagaaggaggacatcctgtggtgtaccgagatggagagagtgttcgggttcccagtccactacacagatgtcagcaacatgtctagactggccagacagagactgctgggaagaagctggtccgtccctgtgatcagacacctgttcgcccctctgaaggagtacttcgcctgcgtgagcagcggcaacagcaacgccaacagccggggccccagcttctctagcggcctggtgccactgtccctgagagggagccacatgggccccatggagatctacaaaaccgtgagcgcctggaagcggcagcctgtgcgcgtgctgagcctgtttcggaatatcgataaagtcctgaaaagcctgggattcctggagagcggctctggctccggcggtggcaccctgaagtacgtggaggatgtgacaaacgtggtcagacgggatgtggagaagtggggccccttcgatctggtgtacggcagcacccaacccctgggcagctcttgtgaccggtgccctggctggtacatgtttcagttccaccggatcctgcagtacgccctgccgagacaggagtcccagcggccattcttttggattttcatggacaacttgctgctgaccgaggatgaccaggaaactaccactcggttcctgcagaccgaagccgtgaccctgcaggacgtgagaggccgggactaccagaacgccatgcgggtgtggtccaacatccctggactgaaaagcaagcacgcacctctgacccctaaagaagaggagtacctgcaggcccaggtgcggagcagaagcaagctggacgcccctaaggtggatctgctggtgaagaattgcctcctgcccctgagagagtacttcaagtatttcagccagaatagtctgcccctgggaggcagcggcggcggcatggagcccgtgaccttcgaggacgtggccgtgtacttcacccagaaccagtgggccagcctggaccccgtgcagagggccctgtacagggaggtgatgctggagaactacgccaacgtggccagcctggccttccccttccccaagcccgtgctgatcagccagctggagcagggcgaggccccctggggccccgaccccggcgaggccgaggtgctgaagggcatctggcccggcggcgagggcggcccaagcagcggcgcccctcctcccagcggcggcagcccagccggctccccaacctctaccgaggagggcacctctgagtccgccacccccgagagcggccctggcacctccaccgagcccagcgagggcagcgcacccggcagccctgccggcagccccacctccacagaggagggaaccagcaccgagcccagcgaaggcagcgccccaggcaccagcaccgagcctagtgagcaggagattaaacggatcaacaagatcagaagaagacttgtgaaagacagcaacaccaagaaggccggcaagacaggccccatgaaaaccctgctggttagagtgatgacacccgatctgagagagcggctggaaaacctgagaaagaagcctgaaaatatcccccagcccatcagcaatacatctagagccaacctgaataagctgctgaccgattacaccgaaatgaagaaggcgatcctgcatgtgtactgggaagagttccagaaggaccctgtgggcctgatgagccgggtggcccagcctgccagcaagaagatcgatcagaacaagctgaaacctgagatggacgagaagggcaacctgaccaccgccggctttgcctgctctcagtgtggccagcccctgttcgtgtacaagctggagcaggtgtctgagaagggcaaggcttacaccaactacttcggacggtgcaatgtggccgagcacgaaaagctgatcctgctggcccagctgaagcccgagaaggatagcgacgaagccgtgacatatagcctgggaaagtttgggcagagggccctggatttctacagcattcatgtgaccaaggagtccacccaccccgtgaagcccctggcccagatcgccggaaacagatacgcctccggacctgtgggaaaggccctgagcgacgcatgtatgggcacaatcgcctccttcctgtctaagtaccaggacatcatcatcgaacaccagaaggtggtgaagggcaaccagaagagactggagagcctgcgggagctggccggcaaggaaaacctggaataccctagcgtgaccctgccacctcagcctcacaccaaggagggcgttgatgcctacaacgaagtgatcgcccgggtgcgaatgtgggtgaacctgaacctgtggcagaagctgaagctaagcagagatgatgccaagcctctgctgagactgaagggattcccttcctttcctctggtcgagagacaggccaacgaagtggactggtgggacatggtgtgtaacgtgaagaagctgatcaacgagaaaaaggaggatggcaaggtgttttggcagaatctggctggctacaagagacaggaagccctgagaccatacctgagcagcgaggaagatcggaagaagggaaagaaattcgctcggtaccagctgggcgacctgctgctgcacctggaaaagaagcacggcgaggactggggaaaggtgtacgacgaggcctgggagcggattgacaagaaagtggaaggcctgagcaagcacatcaagctggaagaggaacggagaagcgaggacgcccagagcaaggccgccctgaccgactggctgcgggctaaggccagcttcgtgatcgagggcctgaaggaggccgacaaggacgagttctgcagatgcgagctgaagctgcagaagtggtacggggacctgcggggaaagcccttcgccatcgaagccgagaacagcatcctggacatcagcggcttcagcaagcagtacaactgtgccttcatctggcagaaggacggcgtgaagaagctgaacctgtacctgatcatcaactacttcaagggcggcaagctgcggttcaagaagatcaaacctgaagccttcgaagccaacagattctacaccgtgatcaacaaaaagagcggcgagatcgtgcccatggaggtgaacttcaacttcgacgaccccaacctgatcatcctgcctctggcctttggcaagagacagggcagagaattcatctggaacgacctgctgtccctggaaaccggcagcctgaagctggccaacggaagagtgatcgagaagacactgtacaacagaagaacccggcaggatgagcctgccctgttcgtggccctgaccttcgagcggcgggaggtcctggactcctccaatatcaaaccaatgaacctgatcggcgtggcaagaggcgaaaacatccccgccgtgatcgccctgaccgaccccgagggctgcccactgagccggtttaaggatagcctgggaaacccaacccacatcctgagaatcggcgagagctataaggagaagcagcggaccatccaggccaagaaggaggtggagcagcggagagccggcggctacagccggaagtacgccagcaaagccaagaatctggcagacgatatggtgagaaacaccgctagagatctgctgtactacgccgtgacccaggatgccatgctgatcttcgccaacctgagccggggcttcggccggcagggcaagcggaccttcatggccgagagacagtacacacggatggaggactggctgaccgccaagctggcctacgagggcctgagcaagacctacctgtccaagacactggcccagtacacctccaagacatgcagcaactgtgggtttaccatcaccagcgccgactacgacagggtgctggagaagctgaagaagacagcaacaggctggatgaccacaattaacggcaaggagctgaaggtggagggccagattacctactacaacagatacaagagacagaacgtagtcaaggacctgtccgtcgagctggatagactgagcgaagaatctgtgaacaacgacatctcctcctggacaaagggcagaagcggagaagctctgagcctcctgaagaaaagattctcccatagacccgtgcaggagaagttcgtgtgcctgaactgcggcttcgagacacacgcagccgagcaagccgccctgaacatcgccagatcctggctgttcctgcggagccaggagtacaagaaataccagacaaacaagacaaccggcaacaccgataagagagccttcgtcgagacctggcagtccttttaccggaagaagcttaaggaggtgtggaaacctgccgtgcggtctggcggatctggcggaggctccaccagccccaagaaaaagagaaaagtctaagctgccttctgcggggcttgccttctggccatgcccttcttctctcccttgcacctgtacctcttggtctttgaataaagcctgagtaggaaggctagcaaaaaaaaaaaaaaaaaaaaaaaaaaaaaaaaaaaaaaaaaaaaaaaaaaaaaaaaaaaaaaaaaaaaaaaaaaaaaaaa

SEQ ID NO: 13316 - RNA, 5785 nt, synthetic construct
  source 1..5785: mol_type = other RNA
aggaaataagagagaaaagaagagtaagaagaaatataagagccaccatggcccctaagaagaagcgtaaagtgagccggatggaacgcctcgtctacgaggtgcggcagaagtgcagaaacatcgaggacatctgcatctcctgcggatctctgaacgtgaccctggagcacccactgttcatcggcggcatgtgccagaactgtaaaaactgttttctggagtgtgcctatcaatacgacgatgacggctaccagagctactgcaccatctgttgcggcggaagagaggtgctgatgtgtggaaataacaactgctgccggtgcttctgcgtggaatgcgtggacctgctggtgggccccggcgccgcccaggccgctattaaggaagatccttggaactgctacatgtgcggccacaagggcacatacggcctgctgagacggagagaggactggcctagcagactgcagatgttcttcgccaataaccacgaccaggagttcgacccccctaaggtgtaccctcccgtccccgccgagaagagaaagcccatccgggtcctgagcctgttcgatggcatcgccaccggtctgctggtgctgaaggacctgggcatccaggtggataggtacattgcctccgaggtgtgcgaggactccatcaccgtgggaatggtgcgtcatcagggcaagatcatgtacgtgggcgacgtgcggagcgtgacacagaagcatatccaggagtggggccctttcgacctggtgatcggcggcagcccttgcaatgacctgagcatcgtgaacccagcccggaagggcctgtacgagggaaccggcagactgttcttcgagttttacagactgctgcacgacgcccggcctaaggaaggcgacgaccggcccttcttttggctgttcgagaatgtggtggccatgggagtcagcgacaagcgggatattagccggttcctggagagcaaccccgtgatgatcgatgccaaggaagtgagcgccgcccaccgggccagatacttctggggcaatctgcctggcatgaacagacccctggccagcaccgtgaacgacaagctggagctgcaggagtgcctggagcacggccggatcgccaagttcagcaaggtgagaaccatcaccacccgaagcaacagcatcaaacaaggcaaggaccagcactttcctgtgttcatgaacgagaaggaggacatcctgtggtgtaccgagatggagagagtgttcgggttcccagtccactacacagatgtcagcaacatgtctagactggccagacagagactgctgggaagaagctggtccgtccctgtgatcagacacctgttcgcccctctgaaggagtacttcgcctgcgtgagcagcggcaacagcaacgccaacagccggggccccagcttctctagcggcctggtgccactgtccctgagagggagccacatgggccccatggagatctacaaaaccgtgagcgcctggaagcggcagcctgtgcgcgtgctgagcctgtttcggaatatcgataaagtcctgaaaagcctgggattcctggagagcggctctggctccggcggtggcaccctgaagtacgtggaggatgtgacaaacgtggtcagacgggatgtggagaagtggggccccttcgatctggtgtacggcagcacccaacccctgggcagctcttgtgaccggtgccctggctggtacatgtttcagttccaccggatcctgcagtacgccctgccgagacaggagtcccagcggccattcttttggattttcatggacaacttgctgctgaccgaggatgaccaggaaactaccactcggttcctgcagaccgaagccgtgaccctgcaggacgtgagaggccgggactaccagaacgccatgcgggtgtggtccaacatccctggactgaaaagcaagcacgcacctctgacccctaaagaagaggagtacctgcaggcccaggtgcggagcagaagcaagctggacgcccctaaggtggatctgctggtgaagaattgcctcctgcccctgagagagtacttcaagtatttcagccagaatagtctgcccctgggaggcagcggcggcggcgtgagcgagcccgtgaccttcgaggaggtggccctgtacttcagcgaggaggagtgggccctgctggacgccggccagagggccctgtacagggacgtgatgaaggagaactacgaggccgtgaggtggctggacaacggcaggctgaacgagaaccacgacaagagcctgcagaacgagggccccgagcagatggccccctgcggcatgatgctgggcatcagcgagggccacgtgagccagggcggcccaagcagcggcgcccctcctcccagcggcggcagcccagccggctccccaacctctaccgaggagggcacctctgagtccgccacccccgagagcggccctggcacctccaccgagcccagcgagggcagcgcacccggcagccctgccggcagccccacctccacagaggagggaaccagcaccgagcccagcgaaggcagcgccccaggcaccagcaccgagcctagtgagcaggagattaaacggatcaacaagatcagaagaagacttgtgaaagacagcaacaccaagaaggccggcaagacaggccccatgaaaaccctgctggttagagtgatgacacccgatctgagagagcggctggaaaacctgagaaagaagcctgaaaatatcccccagcccatcagcaatacatctagagccaacctgaataagctgctgaccgattacaccgaaatgaagaaggcgatcctgcatgtgtactgggaagagttccagaaggaccctgtgggcctgatgagccgggtggcccagcctgccagcaagaagatcgatcagaacaagctgaaacctgagatggacgagaagggcaacctgaccaccgccggctttgcctgctctcagtgtggccagcccctgttcgtgtacaagctggagcaggtgtctgagaagggcaaggcttacaccaactacttcggacggtgcaatgtggccgagcacgaaaagctgatcctgctggcccagctgaagcccgagaaggatagcgacgaagccgtgacatatagcctgggaaagtttgggcagagggccctggatttctacagcattcatgtgaccaaggagtccacccaccccgtgaagcccctggcccagatcgccggaaacagatacgcctccggacctgtgggaaaggccctgagcgacgcatgtatgggcacaatcgcctccttcctgtctaagtaccaggacatcatcatcgaacaccagaaggtggtgaagggcaaccagaagagactggagagcctgcgggagctggccggcaaggaaaacctggaataccctagcgtgaccctgccacctcagcctcacaccaaggagggcgttgatgcctacaacgaagtgatcgcccgggtgcgaatgtgggtgaacctgaacctgtggcagaagctgaagctaagcagagatgatgccaagcctctgctgagactgaagggattcccttcctttcctctggtcgagagacaggccaacgaagtggactggtgggacatggtgtgtaacgtgaagaagctgatcaacgagaaaaaggaggatggcaaggtgttttggcagaatctggctggctacaagagacaggaagccctgagaccatacctgagcagcgaggaagatcggaagaagggaaagaaattcgctcggtaccagctgggcgacctgctgctgcacctggaaaagaagcacggcgaggactggggaaaggtgtacgacgaggcctgggagcggattgacaagaaagtggaaggcctgagcaagcacatcaagctggaagaggaacggagaagcgaggacgcccagagcaaggccgccctgaccgactggctgcgggctaaggccagcttcgtgatcgagggcctgaaggaggccgacaaggacgagttctgcagatgcgagctgaagctgcagaagtggtacggggacctgcggggaaagcccttcgccatcgaagccgagaacagcatcctggacatcagcggcttcagcaagcagtacaactgtgccttcatctggcagaaggacggcgtgaagaagctgaacctgtacctgatcatcaactacttcaagggcggcaagctgcggttcaagaagatcaaacctgaagccttcgaagccaacagattctacaccgtgatcaacaaaaagagcggcgagatcgtgcccatggaggtgaacttcaacttcgacgaccccaacctgatcatcctgcctctggcctttggcaagagacagggcagagaattcatctggaacgacctgctgtccctggaaaccggcagcctgaagctggccaacggaagagtgatcgagaagacactgtacaacagaagaacccggcaggatgagcctgccctgttcgtggccctgaccttcgagcggcgggaggtcctggactcctccaatatcaaaccaatgaacctgatcggcgtggcaagaggcgaaaacatccccgccgtgatcgccctgaccgaccccgagggctgcccactgagccggtttaaggatagcctgggaaacccaacccacatcctgagaatcggcgagagctataaggagaagcagcggaccatccaggccaagaaggaggtggagcagcggagagccggcggctacagccggaagtacgccagcaaagccaagaatctggcagacgatatggtgagaaacaccgctagagatctgctgtactacgccgtgacccaggatgccatgctgatcttcgccaacctgagccggggcttcggccggcagggcaagcggaccttcatggccgagagacagtacacacggatggaggactggctgaccgccaagctggcctacgagggcctgagcaagacctacctgtccaagacactggcccagtacacctccaagacatgcagcaactgtgggtttaccatcaccagcgccgactacgacagggtgctggagaagctgaagaagacagcaacaggctggatgaccacaattaacggcaaggagctgaaggtggagggccagattacctactacaacagatacaagagacagaacgtagtcaaggacctgtccgtcgagctggatagactgagcgaagaatctgtgaacaacgacatctcctcctggacaaagggcagaagcggagaagctctgagcctcctgaagaaaagattctcccatagacccgtgcaggagaagttcgtgtgcctgaactgcggcttcgagacacacgcagccgagcaagccgccctgaacatcgccagatcctggctgttcctgcggagccaggagtacaagaaataccagacaaacaagacaaccggcaacaccgataagagagccttcgtcgagacctggcagtccttttaccggaagaagcttaaggaggtgtggaaacctgccgtgcggtctggcggatctggcggaggctccaccagccccaagaaaaagagaaaagtctaagctgccttctgcggggcttgccttctggccatgcccttcttctctcccttgcacctgtacctcttggtctttgaataaagcctgagtaggaaggctagcaaaaaaaaaaaaaaaaaaaaaaaaaaaaaaaaaaaaaaaaaaaaaaaaaaaaaaaaaaaaaaaaaaaaaaaaaaaaaaaa

SEQ ID NO: 13317 - RNA, 5785 nt, synthetic construct
  source 1..5785: mol_type = other RNA
aggaaataagagagaaaagaagagtaagaagaaatataagagccaccatggcccctaagaagaagcgtaaagtgagccggatggaacgcctcgtctacgaggtgcggcagaagtgcagaaacatcgaggacatctgcatctcctgcggatctctgaacgtgaccctggagcacccactgttcatcggcggcatgtgccagaactgtaaaaactgttttctggagtgtgcctatcaatacgacgatgacggctaccagagctactgcaccatctgttgcggcggaagagaggtgctgatgtgtggaaataacaactgctgccggtgcttctgcgtggaatgcgtggacctgctggtgggccccggcgccgcccaggccgctattaaggaagatccttggaactgctacatgtgcggccacaagggcacatacggcctgctgagacggagagaggactggcctagcagactgcagatgttcttcgccaataaccacgaccaggagttcgacccccctaaggtgtaccctcccgtccccgccgagaagagaaagcccatccgggtcctgagcctgttcgatggcatcgccaccggtctgctggtgctgaaggacctgggcatccaggtggataggtacattgcctccgaggtgtgcgaggactccatcaccgtgggaatggtgcgtcatcagggcaagatcatgtacgtgggcgacgtgcggagcgtgacacagaagcatatccaggagtggggccctttcgacctggtgatcggcggcagcccttgcaatgacctgagcatcgtgaacccagcccggaagggcctgtacgagggaaccggcagactgttcttcgagttttacagactgctgcacgacgcccggcctaaggaaggcgacgaccggcccttcttttggctgttcgagaatgtggtggccatgggagtcagcgacaagcgggatattagccggttcctggagagcaaccccgtgatgatcgatgccaaggaagtgagcgccgcccaccgggccagatacttctggggcaatctgcctggcatgaacagacccctggccagcaccgtgaacgacaagctggagctgcaggagtgcctggagcacggccggatcgccaagttcagcaaggtgagaaccatcaccacccgaagcaacagcatcaaacaaggcaaggaccagcactttcctgtgttcatgaacgagaaggaggacatcctgtggtgtaccgagatggagagagtgttcgggttcccagtccactacacagatgtcagcaacatgtctagactggccagacagagactgctgggaagaagctggtccgtccctgtgatcagacacctgttcgcccctctgaaggagtacttcgcctgcgtgagcagcggcaacagcaacgccaacagccggggccccagcttctctagcggcctggtgccactgtccctgagagggagccacatgggccccatggagatctacaaaaccgtgagcgcctggaagcggcagcctgtgcgcgtgctgagcctgtttcggaatatcgataaagtcctgaaaagcctgggattcctggagagcggctctggctccggcggtggcaccctgaagtacgtggaggatgtgacaaacgtggtcagacgggatgtggagaagtggggccccttcgatctggtgtacggcagcacccaacccctgggcagctcttgtgaccggtgccctggctggtacatgtttcagttccaccggatcctgcagtacgccctgccgagacaggagtcccagcggccattcttttggattttcatggacaacttgctgctgaccgaggatgaccaggaaactaccactcggttcctgcagaccgaagccgtgaccctgcaggacgtgagaggccgggactaccagaacgccatgcgggtgtggtccaacatccctggactgaaaagcaagcacgcacctctgacccctaaagaagaggagtacctgcaggcccaggtgcggagcagaagcaagctggacgcccctaaggtggatctgctggtgaagaattgcctcctgcccctgagagagtacttcaagtatttcagccagaatagtctgcccctgggaggcagcggcggcggcaagcccggcgtggtgaggttcgtggacgtggccgtgtacttcagccccgaggagtgggcctgcctgaggcccgcccagagggccctgtacagggacgtgatgagggagacctacggccacctgggcgccctgggcttccccggccccaagcccgccctgatcagctggatggagcaggagaacgaggcctggagccccgccgcccaggaccccgaggagagggagaacctgggcggcgtgcccggcggcccaagcagcggcgcccctcctcccagcggcggcagcccagccggctccccaacctctaccgaggagggcacctctgagtccgccacccccgagagcggccctggcacctccaccgagcccagcgagggcagcgcacccggcagccctgccggcagccccacctccacagaggagggaaccagcaccgagcccagcgaaggcagcgccccaggcaccagcaccgagcctagtgagcaggagattaaacggatcaacaagatcagaagaagacttgtgaaagacagcaacaccaagaaggccggcaagacaggccccatgaaaaccctgctggttagagtgatgacacccgatctgagagagcggctggaaaacctgagaaagaagcctgaaaatatcccccagcccatcagcaatacatctagagccaacctgaataagctgctgaccgattacaccgaaatgaagaaggcgatcctgcatgtgtactgggaagagttccagaaggaccctgtgggcctgatgagccgggtggcccagcctgccagcaagaagatcgatcagaacaagctgaaacctgagatggacgagaagggcaacctgaccaccgccggctttgcctgctctcagtgtggccagcccctgttcgtgtacaagctggagcaggtgtctgagaagggcaaggcttacaccaactacttcggacggtgcaatgtggccgagcacgaaaagctgatcctgctggcccagctgaagcccgagaaggatagcgacgaagccgtgacatatagcctgggaaagtttgggcagagggccctggatttctacagcattcatgtgaccaaggagtccacccaccccgtgaagcccctggcccagatcgccggaaacagatacgcctccggacctgtgggaaaggccctgagcgacgcatgtatgggcacaatcgcctccttcctgtctaagtaccaggacatcatcatcgaacaccagaaggtggtgaagggcaaccagaagagactggagagcctgcgggagctggccggcaaggaaaacctggaataccctagcgtgaccctgccacctcagcctcacaccaaggagggcgttgatgcctacaacgaagtgatcgcccgggtgcgaatgtgggtgaacctgaacctgtggcagaagctgaagctaagcagagatgatgccaagcctctgctgagactgaagggattcccttcctttcctctggtcgagagacaggccaacgaagtggactggtgggacatggtgtgtaacgtgaagaagctgatcaacgagaaaaaggaggatggcaaggtgttttggcagaatctggctggctacaagagacaggaagccctgagaccatacctgagcagcgaggaagatcggaagaagggaaagaaattcgctcggtaccagctgggcgacctgctgctgcacctggaaaagaagcacggcgaggactggggaaaggtgtacgacgaggcctgggagcggattgacaagaaagtggaaggcctgagcaagcacatcaagctggaagaggaacggagaagcgaggacgcccagagcaaggccgccctgaccgactggctgcgggctaaggccagcttcgtgatcgagggcctgaaggaggccgacaaggacgagttctgcagatgcgagctgaagctgcagaagtggtacggggacctgcggggaaagcccttcgccatcgaagccgagaacagcatcctggacatcagcggcttcagcaagcagtacaactgtgccttcatctggcagaaggacggcgtgaagaagctgaacctgtacctgatcatcaactacttcaagggcggcaagctgcggttcaagaagatcaaacctgaagccttcgaagccaacagattctacaccgtgatcaacaaaaagagcggcgagatcgtgcccatggaggtgaacttcaacttcgacgaccccaacctgatcatcctgcctctggcctttggcaagagacagggcagagaattcatctggaacgacctgctgtccctggaaaccggcagcctgaagctggccaacggaagagtgatcgagaagacactgtacaacagaagaacccggcaggatgagcctgccctgttcgtggccctgaccttcgagcggcgggaggtcctggactcctccaatatcaaaccaatgaacctgatcggcgtggcaagaggcgaaaacatccccgccgtgatcgccctgaccgaccccgagggctgcccactgagccggtttaaggatagcctgggaaacccaacccacatcctgagaatcggcgagagctataaggagaagcagcggaccatccaggccaagaaggaggtggagcagcggagagccggcggctacagccggaagtacgccagcaaagccaagaatctggcagacgatatggtgagaaacaccgctagagatctgctgtactacgccgtgacccaggatgccatgctgatcttcgccaacctgagccggggcttcggccggcagggcaagcggaccttcatggccgagagacagtacacacggatggaggactggctgaccgccaagctggcctacgagggcctgagcaagacctacctgtccaagacactggcccagtacacctccaagacatgcagcaactgtgggtttaccatcaccagcgccgactacgacagggtgctggagaagctgaagaagacagcaacaggctggatgaccacaattaacggcaaggagctgaaggtggagggccagattacctactacaacagatacaagagacagaacgtagtcaaggacctgtccgtcgagctggatagactgagcgaagaatctgtgaacaacgacatctcctcctggacaaagggcagaagcggagaagctctgagcctcctgaagaaaagattctcccatagacccgtgcaggagaagttcgtgtgcctgaactgcggcttcgagacacacgcagccgagcaagccgccctgaacatcgccagatcctggctgttcctgcggagccaggagtacaagaaataccagacaaacaagacaaccggcaacaccgataagagagccttcgtcgagacctggcagtccttttaccggaagaagcttaaggaggtgtggaaacctgccgtgcggtctggcggatctggcggaggctccaccagccccaagaaaaagagaaaagtctaagctgccttctgcggggcttgccttctggccatgcccttcttctctcccttgcacctgtacctcttggtctttgaataaagcctgagtaggaaggctagcaaaaaaaaaaaaaaaaaaaaaaaaaaaaaaaaaaaaaaaaaaaaaaaaaaaaaaaaaaaaaaaaaaaaaaaaaaaaaaaa

SEQ ID NO: 13318 - RNA, 5785 nt, synthetic construct
  source 1..5785: mol_type = other RNA
aggaaataagagagaaaagaagagtaagaagaaatataagagccaccatggcccctaagaagaagcgtaaagtgagccggatggaacgcctcgtctacgaggtgcggcagaagtgcagaaacatcgaggacatctgcatctcctgcggatctctgaacgtgaccctggagcacccactgttcatcggcggcatgtgccagaactgtaaaaactgttttctggagtgtgcctatcaatacgacgatgacggctaccagagctactgcaccatctgttgcggcggaagagaggtgctgatgtgtggaaataacaactgctgccggtgcttctgcgtggaatgcgtggacctgctggtgggccccggcgccgcccaggccgctattaaggaagatccttggaactgctacatgtgcggccacaagggcacatacggcctgctgagacggagagaggactggcctagcagactgcagatgttcttcgccaataaccacgaccaggagttcgacccccctaaggtgtaccctcccgtccccgccgagaagagaaagcccatccgggtcctgagcctgttcgatggcatcgccaccggtctgctggtgctgaaggacctgggcatccaggtggataggtacattgcctccgaggtgtgcgaggactccatcaccgtgggaatggtgcgtcatcagggcaagatcatgtacgtgggcgacgtgcggagcgtgacacagaagcatatccaggagtggggccctttcgacctggtgatcggcggcagcccttgcaatgacctgagcatcgtgaacccagcccggaagggcctgtacgagggaaccggcagactgttcttcgagttttacagactgctgcacgacgcccggcctaaggaaggcgacgaccggcccttcttttggctgttcgagaatgtggtggccatgggagtcagcgacaagcgggatattagccggttcctggagagcaaccccgtgatgatcgatgccaaggaagtgagcgccgcccaccgggccagatacttctggggcaatctgcctggcatgaacagacccctggccagcaccgtgaacgacaagctggagctgcaggagtgcctggagcacggccggatcgccaagttcagcaaggtgagaaccatcaccacccgaagcaacagcatcaaacaaggcaaggaccagcactttcctgtgttcatgaacgagaaggaggacatcctgtggtgtaccgagatggagagagtgttcgggttcccagtccactacacagatgtcagcaacatgtctagactggccagacagagactgctgggaagaagctggtccgtccctgtgatcagacacctgttcgcccctctgaaggagtacttcgcctgcgtgagcagcggcaacagcaacgccaacagccggggccccagcttctctagcggcctggtgccactgtccctgagagggagccacatgggccccatggagatctacaaaaccgtgagcgcctggaagcggcagcctgtgcgcgtgctgagcctgtttcggaatatcgataaagtcctgaaaagcctgggattcctggagagcggctctggctccggcggtggcaccctgaagtacgtggaggatgtgacaaacgtggtcagacgggatgtggagaagtggggccccttcgatctggtgtacggcagcacccaacccctgggcagctcttgtgaccggtgccctggctggtacatgtttcagttccaccggatcctgcagtacgccctgccgagacaggagtcccagcggccattcttttggattttcatggacaacttgctgctgaccgaggatgaccaggaaactaccactcggttcctgcagaccgaagccgtgaccctgcaggacgtgagaggccgggactaccagaacgccatgcgggtgtggtccaacatccctggactgaaaagcaagcacgcacctctgacccctaaagaagaggagtacctgcaggcccaggtgcggagcagaagcaagctggacgcccctaaggtggatctgctggtgaagaattgcctcctgcccctgagagagtacttcaagtatttcagccagaatagtctgcccctgggaggcagcggcggcggcgtggtgttcaccgacgtggccgtggacttcagccaggaggagtgggagtgcctggacagctaccagaggagcctgtacagggacgtgatcctggagaactacagcaacctggtgagcctgggcggcggcagcatcagcaagcccgacgtggtgaccctgctggagcagggcaaggagccctggatggtggtgagggacaccaagatcaggtggagcctgggcctggagagcaactacgacgccggcggcccaagcagcggcgcccctcctcccagcggcggcagcccagccggctccccaacctctaccgaggagggcacctctgagtccgccacccccgagagcggccctggcacctccaccgagcccagcgagggcagcgcacccggcagccctgccggcagccccacctccacagaggagggaaccagcaccgagcccagcgaaggcagcgccccaggcaccagcaccgagcctagtgagcaggagattaaacggatcaacaagatcagaagaagacttgtgaaagacagcaacaccaagaaggccggcaagacaggccccatgaaaaccctgctggttagagtgatgacacccgatctgagagagcggctggaaaacctgagaaagaagcctgaaaatatcccccagcccatcagcaatacatctagagccaacctgaataagctgctgaccgattacaccgaaatgaagaaggcgatcctgcatgtgtactgggaagagttccagaaggaccctgtgggcctgatgagccgggtggcccagcctgccagcaagaagatcgatcagaacaagctgaaacctgagatggacgagaagggcaacctgaccaccgccggctttgcctgctctcagtgtggccagcccctgttcgtgtacaagctggagcaggtgtctgagaagggcaaggcttacaccaactacttcggacggtgcaatgtggccgagcacgaaaagctgatcctgctggcccagctgaagcccgagaaggatagcgacgaagccgtgacatatagcctgggaaagtttgggcagagggccctggatttctacagcattcatgtgaccaaggagtccacccaccccgtgaagcccctggcccagatcgccggaaacagatacgcctccggacctgtgggaaaggccctgagcgacgcatgtatgggcacaatcgcctccttcctgtctaagtaccaggacatcatcatcgaacaccagaaggtggtgaagggcaaccagaagagactggagagcctgcgggagctggccggcaaggaaaacctggaataccctagcgtgaccctgccacctcagcctcacaccaaggagggcgttgatgcctacaacgaagtgatcgcccgggtgcgaatgtgggtgaacctgaacctgtggcagaagctgaagctaagcagagatgatgccaagcctctgctgagactgaagggattcccttcctttcctctggtcgagagacaggccaacgaagtggactggtgggacatggtgtgtaacgtgaagaagctgatcaacgagaaaaaggaggatggcaaggtgttttggcagaatctggctggctacaagagacaggaagccctgagaccatacctgagcagcgaggaagatcggaagaagggaaagaaattcgctcggtaccagctgggcgacctgctgctgcacctggaaaagaagcacggcgaggactggggaaaggtgtacgacgaggcctgggagcggattgacaagaaagtggaaggcctgagcaagcacatcaagctggaagaggaacggagaagcgaggacgcccagagcaaggccgccctgaccgactggctgcgggctaaggccagcttcgtgatcgagggcctgaaggaggccgacaaggacgagttctgcagatgcgagctgaagctgcagaagtggtacggggacctgcggggaaagcccttcgccatcgaagccgagaacagcatcctggacatcagcggcttcagcaagcagtacaactgtgccttcatctggcagaaggacggcgtgaagaagctgaacctgtacctgatcatcaactacttcaagggcggcaagctgcggttcaagaagatcaaacctgaagccttcgaagccaacagattctacaccgtgatcaacaaaaagagcggcgagatcgtgcccatggaggtgaacttcaacttcgacgaccccaacctgatcatcctgcctctggcctttggcaagagacagggcagagaattcatctggaacgacctgctgtccctggaaaccggcagcctgaagctggccaacggaagagtgatcgagaagacactgtacaacagaagaacccggcaggatgagcctgccctgttcgtggccctgaccttcgagcggcgggaggtcctggactcctccaatatcaaaccaatgaacctgatcggcgtggcaagaggcgaaaacatccccgccgtgatcgccctgaccgaccccgagggctgcccactgagccggtttaaggatagcctgggaaacccaacccacatcctgagaatcggcgagagctataaggagaagcagcggaccatccaggccaagaaggaggtggagcagcggagagccggcggctacagccggaagtacgccagcaaagccaagaatctggcagacgatatggtgagaaacaccgctagagatctgctgtactacgccgtgacccaggatgccatgctgatcttcgccaacctgagccggggcttcggccggcagggcaagcggaccttcatggccgagagacagtacacacggatggaggactggctgaccgccaagctggcctacgagggcctgagcaagacctacctgtccaagacactggcccagtacacctccaagacatgcagcaactgtgggtttaccatcaccagcgccgactacgacagggtgctggagaagctgaagaagacagcaacaggctggatgaccacaattaacggcaaggagctgaaggtggagggccagattacctactacaacagatacaagagacagaacgtagtcaaggacctgtccgtcgagctggatagactgagcgaagaatctgtgaacaacgacatctcctcctggacaaagggcagaagcggagaagctctgagcctcctgaagaaaagattctcccatagacccgtgcaggagaagttcgtgtgcctgaactgcggcttcgagacacacgcagccgagcaagccgccctgaacatcgccagatcctggctgttcctgcggagccaggagtacaagaaataccagacaaacaagacaaccggcaacaccgataagagagccttcgtcgagacctggcagtccttttaccggaagaagcttaaggaggtgtggaaacctgccgtgcggtctggcggatctggcggaggctccaccagccccaagaaaaagagaaaagtctaagctgccttctgcggggcttgccttctggccatgcccttcttctctcccttgcacctgtacctcttggtctttgaataaagcctgagtaggaaggctagcaaaaaaaaaaaaaaaaaaaaaaaaaaaaaaaaaaaaaaaaaaaaaaaaaaaaaaaaaaaaaaaaaaaaaaaaaaaaaaaa

SEQ ID NO: 13319 - RNA, 5785 nt, synthetic construct
  source 1..5785: mol_type = other RNA
aggaaataagagagaaaagaagagtaagaagaaatataagagccaccatggcccctaagaagaagcgtaaagtgagccggatggaacgcctcgtctacgaggtgcggcagaagtgcagaaacatcgaggacatctgcatctcctgcggatctctgaacgtgaccctggagcacccactgttcatcggcggcatgtgccagaactgtaaaaactgttttctggagtgtgcctatcaatacgacgatgacggctaccagagctactgcaccatctgttgcggcggaagagaggtgctgatgtgtggaaataacaactgctgccggtgcttctgcgtggaatgcgtggacctgctggtgggccccggcgccgcccaggccgctattaaggaagatccttggaactgctacatgtgcggccacaagggcacatacggcctgctgagacggagagaggactggcctagcagactgcagatgttcttcgccaataaccacgaccaggagttcgacccccctaaggtgtaccctcccgtccccgccgagaagagaaagcccatccgggtcctgagcctgttcgatggcatcgccaccggtctgctggtgctgaaggacctgggcatccaggtggataggtacattgcctccgaggtgtgcgaggactccatcaccgtgggaatggtgcgtcatcagggcaagatcatgtacgtgggcgacgtgcggagcgtgacacagaagcatatccaggagtggggccctttcgacctggtgatcggcggcagcccttgcaatgacctgagcatcgtgaacccagcccggaagggcctgtacgagggaaccggcagactgttcttcgagttttacagactgctgcacgacgcccggcctaaggaaggcgacgaccggcccttcttttggctgttcgagaatgtggtggccatgggagtcagcgacaagcgggatattagccggttcctggagagcaaccccgtgatgatcgatgccaaggaagtgagcgccgcccaccgggccagatacttctggggcaatctgcctggcatgaacagacccctggccagcaccgtgaacgacaagctggagctgcaggagtgcctggagcacggccggatcgccaagttcagcaaggtgagaaccatcaccacccgaagcaacagcatcaaacaaggcaaggaccagcactttcctgtgttcatgaacgagaaggaggacatcctgtggtgtaccgagatggagagagtgttcgggttcccagtccactacacagatgtcagcaacatgtctagactggccagacagagactgctgggaagaagctggtccgtccctgtgatcagacacctgttcgcccctctgaaggagtacttcgcctgcgtgagcagcggcaacagcaacgccaacagccggggccccagcttctctagcggcctggtgccactgtccctgagagggagccacatgggccccatggagatctacaaaaccgtgagcgcctggaagcggcagcctgtgcgcgtgctgagcctgtttcggaatatcgataaagtcctgaaaagcctgggattcctggagagcggctctggctccggcggtggcaccctgaagtacgtggaggatgtgacaaacgtggtcagacgggatgtggagaagtggggccccttcgatctggtgtacggcagcacccaacccctgggcagctcttgtgaccggtgccctggctggtacatgtttcagttccaccggatcctgcagtacgccctgccgagacaggagtcccagcggccattcttttggattttcatggacaacttgctgctgaccgaggatgaccaggaaactaccactcggttcctgcagaccgaagccgtgaccctgcaggacgtgagaggccgggactaccagaacgccatgcgggtgtggtccaacatccctggactgaaaagcaagcacgcacctctgacccctaaagaagaggagtacctgcaggcccaggtgcggagcagaagcaagctggacgcccctaaggtggatctgctggtgaagaattgcctcctgcccctgagagagtacttcaagtatttcagccagaatagtctgcccctgggaggcagcggcggcggcctgcaggacagcgtgaccttcaaggacgtggccgtggacttcagccaggaggagtgggagaggctgaaccccgcccagaggagcctgtacaggaccgtggtgctggagaactactggaacctggtgagcgtgggcgcctgcgtgagcaagagccacctgatcagcctgctggagcacggcaaggccccctgggacatgaggggcgaggtgaccgagagcaccagccaggacggcgagagcgtgggcggcccaagcagcggcgcccctcctcccagcggcggcagcccagccggctccccaacctctaccgaggagggcacctctgagtccgccacccccgagagcggccctggcacctccaccgagcccagcgagggcagcgcacccggcagccctgccggcagccccacctccacagaggagggaaccagcaccgagcccagcgaaggcagcgccccaggcaccagcaccgagcctagtgagcaggagattaaacggatcaacaagatcagaagaagacttgtgaaagacagcaacaccaagaaggccggcaagacaggccccatgaaaaccctgctggttagagtgatgacacccgatctgagagagcggctggaaaacctgagaaagaagcctgaaaatatcccccagcccatcagcaatacatctagagccaacctgaataagctgctgaccgattacaccgaaatgaagaaggcgatcctgcatgtgtactgggaagagttccagaaggaccctgtgggcctgatgagccgggtggcccagcctgccagcaagaagatcgatcagaacaagctgaaacctgagatggacgagaagggcaacctgaccaccgccggctttgcctgctctcagtgtggccagcccctgttcgtgtacaagctggagcaggtgtctgagaagggcaaggcttacaccaactacttcggacggtgcaatgtggccgagcacgaaaagctgatcctgctggcccagctgaagcccgagaaggatagcgacgaagccgtgacatatagcctgggaaagtttgggcagagggccctggatttctacagcattcatgtgaccaaggagtccacccaccccgtgaagcccctggcccagatcgccggaaacagatacgcctccggacctgtgggaaaggccctgagcgacgcatgtatgggcacaatcgcctccttcctgtctaagtaccaggacatcatcatcgaacaccagaaggtggtgaagggcaaccagaagagactggagagcctgcgggagctggccggcaaggaaaacctggaataccctagcgtgaccctgccacctcagcctcacaccaaggagggcgttgatgcctacaacgaagtgatcgcccgggtgcgaatgtgggtgaacctgaacctgtggcagaagctgaagctaagcagagatgatgccaagcctctgctgagactgaagggattcccttcctttcctctggtcgagagacaggccaacgaagtggactggtgggacatggtgtgtaacgtgaagaagctgatcaacgagaaaaaggaggatggcaaggtgttttggcagaatctggctggctacaagagacaggaagccctgagaccatacctgagcagcgaggaagatcggaagaagggaaagaaattcgctcggtaccagctgggcgacctgctgctgcacctggaaaagaagcacggcgaggactggggaaaggtgtacgacgaggcctgggagcggattgacaagaaagtggaaggcctgagcaagcacatcaagctggaagaggaacggagaagcgaggacgcccagagcaaggccgccctgaccgactggctgcgggctaaggccagcttcgtgatcgagggcctgaaggaggccgacaaggacgagttctgcagatgcgagctgaagctgcagaagtggtacggggacctgcggggaaagcccttcgccatcgaagccgagaacagcatcctggacatcagcggcttcagcaagcagtacaactgtgccttcatctggcagaaggacggcgtgaagaagctgaacctgtacctgatcatcaactacttcaagggcggcaagctgcggttcaagaagatcaaacctgaagccttcgaagccaacagattctacaccgtgatcaacaaaaagagcggcgagatcgtgcccatggaggtgaacttcaacttcgacgaccccaacctgatcatcctgcctctggcctttggcaagagacagggcagagaattcatctggaacgacctgctgtccctggaaaccggcagcctgaagctggccaacggaagagtgatcgagaagacactgtacaacagaagaacccggcaggatgagcctgccctgttcgtggccctgaccttcgagcggcgggaggtcctggactcctccaatatcaaaccaatgaacctgatcggcgtggcaagaggcgaaaacatccccgccgtgatcgccctgaccgaccccgagggctgcccactgagccggtttaaggatagcctgggaaacccaacccacatcctgagaatcggcgagagctataaggagaagcagcggaccatccaggccaagaaggaggtggagcagcggagagccggcggctacagccggaagtacgccagcaaagccaagaatctggcagacgatatggtgagaaacaccgctagagatctgctgtactacgccgtgacccaggatgccatgctgatcttcgccaacctgagccggggcttcggccggcagggcaagcggaccttcatggccgagagacagtacacacggatggaggactggctgaccgccaagctggcctacgagggcctgagcaagacctacctgtccaagacactggcccagtacacctccaagacatgcagcaactgtgggtttaccatcaccagcgccgactacgacagggtgctggagaagctgaagaagacagcaacaggctggatgaccacaattaacggcaaggagctgaaggtggagggccagattacctactacaacagatacaagagacagaacgtagtcaaggacctgtccgtcgagctggatagactgagcgaagaatctgtgaacaacgacatctcctcctggacaaagggcagaagcggagaagctctgagcctcctgaagaaaagattctcccatagacccgtgcaggagaagttcgtgtgcctgaactgcggcttcgagacacacgcagccgagcaagccgccctgaacatcgccagatcctggctgttcctgcggagccaggagtacaagaaataccagacaaacaagacaaccggcaacaccgataagagagccttcgtcgagacctggcagtccttttaccggaagaagcttaaggaggtgtggaaacctgccgtgcggtctggcggatctggcggaggctccaccagccccaagaaaaagagaaaagtctaagctgccttctgcggggcttgccttctggccatgcccttcttctctcccttgcacctgtacctcttggtctttgaataaagcctgagtaggaaggctagcaaaaaaaaaaaaaaaaaaaaaaaaaaaaaaaaaaaaaaaaaaaaaaaaaaaaaaaaaaaaaaaaaaaaaaaaaaaaaaaa

SEQ ID NO: 13320 - RNA, 5785 nt, synthetic construct
  source 1..5785: mol_type = other RNA
aggaaataagagagaaaagaagagtaagaagaaatataagagccaccatggcccctaagaagaagcgtaaagtgagccggatggaacgcctcgtctacgaggtgcggcagaagtgcagaaacatcgaggacatctgcatctcctgcggatctctgaacgtgaccctggagcacccactgttcatcggcggcatgtgccagaactgtaaaaactgttttctggagtgtgcctatcaatacgacgatgacggctaccagagctactgcaccatctgttgcggcggaagagaggtgctgatgtgtggaaataacaactgctgccggtgcttctgcgtggaatgcgtggacctgctggtgggccccggcgccgcccaggccgctattaaggaagatccttggaactgctacatgtgcggccacaagggcacatacggcctgctgagacggagagaggactggcctagcagactgcagatgttcttcgccaataaccacgaccaggagttcgacccccctaaggtgtaccctcccgtccccgccgagaagagaaagcccatccgggtcctgagcctgttcgatggcatcgccaccggtctgctggtgctgaaggacctgggcatccaggtggataggtacattgcctccgaggtgtgcgaggactccatcaccgtgggaatggtgcgtcatcagggcaagatcatgtacgtgggcgacgtgcggagcgtgacacagaagcatatccaggagtggggccctttcgacctggtgatcggcggcagcccttgcaatgacctgagcatcgtgaacccagcccggaagggcctgtacgagggaaccggcagactgttcttcgagttttacagactgctgcacgacgcccggcctaaggaaggcgacgaccggcccttcttttggctgttcgagaatgtggtggccatgggagtcagcgacaagcgggatattagccggttcctggagagcaaccccgtgatgatcgatgccaaggaagtgagcgccgcccaccgggccagatacttctggggcaatctgcctggcatgaacagacccctggccagcaccgtgaacgacaagctggagctgcaggagtgcctggagcacggccggatcgccaagttcagcaaggtgagaaccatcaccacccgaagcaacagcatcaaacaaggcaaggaccagcactttcctgtgttcatgaacgagaaggaggacatcctgtggtgtaccgagatggagagagtgttcgggttcccagtccactacacagatgtcagcaacatgtctagactggccagacagagactgctgggaagaagctggtccgtccctgtgatcagacacctgttcgcccctctgaaggagtacttcgcctgcgtgagcagcggcaacagcaacgccaacagccggggccccagcttctctagcggcctggtgccactgtccctgagagggagccacatgggccccatggagatctacaaaaccgtgagcgcctggaagcggcagcctgtgcgcgtgctgagcctgtttcggaatatcgataaagtcctgaaaagcctgggattcctggagagcggctctggctccggcggtggcaccctgaagtacgtggaggatgtgacaaacgtggtcagacgggatgtggagaagtggggccccttcgatctggtgtacggcagcacccaacccctgggcagctcttgtgaccggtgccctggctggtacatgtttcagttccaccggatcctgcagtacgccctgccgagacaggagtcccagcggccattcttttggattttcatggacaacttgctgctgaccgaggatgaccaggaaactaccactcggttcctgcagaccgaagccgtgaccctgcaggacgtgagaggccgggactaccagaacgccatgcgggtgtggtccaacatccctggactgaaaagcaagcacgcacctctgacccctaaagaagaggagtacctgcaggcccaggtgcggagcagaagcaagctggacgcccctaaggtggatctgctggtgaagaattgcctcctgcccctgagagagtacttcaagtatttcagccagaatagtctgcccctgggaggcagcggcggcggcccccaggagagcgtgaccttcgaggacgtggccgtgtacttcacccagaaggagtgggagggcctggcccccgcccagagggccctgtacagggacgtgatgctggagaactacggcaacctggtgagcctggccttcctgttccccaagcccgccgtgatcagccagctggagcagggcgagaagccctggatccagaccccccagaggcccctggacaagaagaagacctacaagggctgcggcggcccaagcagcggcgcccctcctcccagcggcggcagcccagccggctccccaacctctaccgaggagggcacctctgagtccgccacccccgagagcggccctggcacctccaccgagcccagcgagggcagcgcacccggcagccctgccggcagccccacctccacagaggagggaaccagcaccgagcccagcgaaggcagcgccccaggcaccagcaccgagcctagtgagcaggagattaaacggatcaacaagatcagaagaagacttgtgaaagacagcaacaccaagaaggccggcaagacaggccccatgaaaaccctgctggttagagtgatgacacccgatctgagagagcggctggaaaacctgagaaagaagcctgaaaatatcccccagcccatcagcaatacatctagagccaacctgaataagctgctgaccgattacaccgaaatgaagaaggcgatcctgcatgtgtactgggaagagttccagaaggaccctgtgggcctgatgagccgggtggcccagcctgccagcaagaagatcgatcagaacaagctgaaacctgagatggacgagaagggcaacctgaccaccgccggctttgcctgctctcagtgtggccagcccctgttcgtgtacaagctggagcaggtgtctgagaagggcaaggcttacaccaactacttcggacggtgcaatgtggccgagcacgaaaagctgatcctgctggcccagctgaagcccgagaaggatagcgacgaagccgtgacatatagcctgggaaagtttgggcagagggccctggatttctacagcattcatgtgaccaaggagtccacccaccccgtgaagcccctggcccagatcgccggaaacagatacgcctccggacctgtgggaaaggccctgagcgacgcatgtatgggcacaatcgcctccttcctgtctaagtaccaggacatcatcatcgaacaccagaaggtggtgaagggcaaccagaagagactggagagcctgcgggagctggccggcaaggaaaacctggaataccctagcgtgaccctgccacctcagcctcacaccaaggagggcgttgatgcctacaacgaagtgatcgcccgggtgcgaatgtgggtgaacctgaacctgtggcagaagctgaagctaagcagagatgatgccaagcctctgctgagactgaagggattcccttcctttcctctggtcgagagacaggccaacgaagtggactggtgggacatggtgtgtaacgtgaagaagctgatcaacgagaaaaaggaggatggcaaggtgttttggcagaatctggctggctacaagagacaggaagccctgagaccatacctgagcagcgaggaagatcggaagaagggaaagaaattcgctcggtaccagctgggcgacctgctgctgcacctggaaaagaagcacggcgaggactggggaaaggtgtacgacgaggcctgggagcggattgacaagaaagtggaaggcctgagcaagcacatcaagctggaagaggaacggagaagcgaggacgcccagagcaaggccgccctgaccgactggctgcgggctaaggccagcttcgtgatcgagggcctgaaggaggccgacaaggacgagttctgcagatgcgagctgaagctgcagaagtggtacggggacctgcggggaaagcccttcgccatcgaagccgagaacagcatcctggacatcagcggcttcagcaagcagtacaactgtgccttcatctggcagaaggacggcgtgaagaagctgaacctgtacctgatcatcaactacttcaagggcggcaagctgcggttcaagaagatcaaacctgaagccttcgaagccaacagattctacaccgtgatcaacaaaaagagcggcgagatcgtgcccatggaggtgaacttcaacttcgacgaccccaacctgatcatcctgcctctggcctttggcaagagacagggcagagaattcatctggaacgacctgctgtccctggaaaccggcagcctgaagctggccaacggaagagtgatcgagaagacactgtacaacagaagaacccggcaggatgagcctgccctgttcgtggccctgaccttcgagcggcgggaggtcctggactcctccaatatcaaaccaatgaacctgatcggcgtggcaagaggcgaaaacatccccgccgtgatcgccctgaccgaccccgagggctgcccactgagccggtttaaggatagcctgggaaacccaacccacatcctgagaatcggcgagagctataaggagaagcagcggaccatccaggccaagaaggaggtggagcagcggagagccggcggctacagccggaagtacgccagcaaagccaagaatctggcagacgatatggtgagaaacaccgctagagatctgctgtactacgccgtgacccaggatgccatgctgatcttcgccaacctgagccggggcttcggccggcagggcaagcggaccttcatggccgagagacagtacacacggatggaggactggctgaccgccaagctggcctacgagggcctgagcaagacctacctgtccaagacactggcccagtacacctccaagacatgcagcaactgtgggtttaccatcaccagcgccgactacgacagggtgctggagaagctgaagaagacagcaacaggctggatgaccacaattaacggcaaggagctgaaggtggagggccagattacctactacaacagatacaagagacagaacgtagtcaaggacctgtccgtcgagctggatagactgagcgaagaatctgtgaacaacgacatctcctcctggacaaagggcagaagcggagaagctctgagcctcctgaagaaaagattctcccatagacccgtgcaggagaagttcgtgtgcctgaactgcggcttcgagacacacgcagccgagcaagccgccctgaacatcgccagatcctggctgttcctgcggagccaggagtacaagaaataccagacaaacaagacaaccggcaacaccgataagagagccttcgtcgagacctggcagtccttttaccggaagaagcttaaggaggtgtggaaacctgccgtgcggtctggcggatctggcggaggctccaccagccccaagaaaaagagaaaagtctaagctgccttctgcggggcttgccttctggccatgcccttcttctctcccttgcacctgtacctcttggtctttgaataaagcctgagtaggaaggctagcaaaaaaaaaaaaaaaaaaaaaaaaaaaaaaaaaaaaaaaaaaaaaaaaaaaaaaaaaaaaaaaaaaaaaaaaaaaaaaaa

SEQ ID NO: 13321 - RNA, 5785 nt, synthetic construct
  source 1..5785: mol_type = other RNA
aggaaataagagagaaaagaagagtaagaagaaatataagagccaccatggcccctaagaagaagcgtaaagtgagccggatggaacgcctcgtctacgaggtgcggcagaagtgcagaaacatcgaggacatctgcatctcctgcggatctctgaacgtgaccctggagcacccactgttcatcggcggcatgtgccagaactgtaaaaactgttttctggagtgtgcctatcaatacgacgatgacggctaccagagctactgcaccatctgttgcggcggaagagaggtgctgatgtgtggaaataacaactgctgccggtgcttctgcgtggaatgcgtggacctgctggtgggccccggcgccgcccaggccgctattaaggaagatccttggaactgctacatgtgcggccacaagggcacatacggcctgctgagacggagagaggactggcctagcagactgcagatgttcttcgccaataaccacgaccaggagttcgacccccctaaggtgtaccctcccgtccccgccgagaagagaaagcccatccgggtcctgagcctgttcgatggcatcgccaccggtctgctggtgctgaaggacctgggcatccaggtggataggtacattgcctccgaggtgtgcgaggactccatcaccgtgggaatggtgcgtcatcagggcaagatcatgtacgtgggcgacgtgcggagcgtgacacagaagcatatccaggagtggggccctttcgacctggtgatcggcggcagcccttgcaatgacctgagcatcgtgaacccagcccggaagggcctgtacgagggaaccggcagactgttcttcgagttttacagactgctgcacgacgcccggcctaaggaaggcgacgaccggcccttcttttggctgttcgagaatgtggtggccatgggagtcagcgacaagcgggatattagccggttcctggagagcaaccccgtgatgatcgatgccaaggaagtgagcgccgcccaccgggccagatacttctggggcaatctgcctggcatgaacagacccctggccagcaccgtgaacgacaagctggagctgcaggagtgcctggagcacggccggatcgccaagttcagcaaggtgagaaccatcaccacccgaagcaacagcatcaaacaaggcaaggaccagcactttcctgtgttcatgaacgagaaggaggacatcctgtggtgtaccgagatggagagagtgttcgggttcccagtccactacacagatgtcagcaacatgtctagactggccagacagagactgctgggaagaagctggtccgtccctgtgatcagacacctgttcgcccctctgaaggagtacttcgcctgcgtgagcagcggcaacagcaacgccaacagccggggccccagcttctctagcggcctggtgccactgtccctgagagggagccacatgggccccatggagatctacaaaaccgtgagcgcctggaagcggcagcctgtgcgcgtgctgagcctgtttcggaatatcgataaagtcctgaaaagcctgggattcctggagagcggctctggctccggcggtggcaccctgaagtacgtggaggatgtgacaaacgtggtcagacgggatgtggagaagtggggccccttcgatctggtgtacggcagcacccaacccctgggcagctcttgtgaccggtgccctggctggtacatgtttcagttccaccggatcctgcagtacgccctgccgagacaggagtcccagcggccattcttttggattttcatggacaacttgctgctgaccgaggatgaccaggaaactaccactcggttcctgcagaccgaagccgtgaccctgcaggacgtgagaggccgggactaccagaacgccatgcgggtgtggtccaacatccctggactgaaaagcaagcacgcacctctgacccctaaagaagaggagtacctgcaggcccaggtgcggagcagaagcaagctggacgcccctaaggtggatctgctggtgaagaattgcctcctgcccctgagagagtacttcaagtatttcagccagaatagtctgcccctgggaggcagcggcggcggcatgcccgccaacgaggacgccccccagcccggcgagcacggcagcgcctgcgaggtgagcgtgagcttcgaggacgtgaccgtggacttcagcagggaggagtggcagcagctggacagcacccagaggaggctgtaccaggacgtgatgctggagaactacagccacctgctgagcgtgggcttcgaggtgcccaagcccgaggtgatcttcaagctggagcagggcgagggcccctggaccggcggcccaagcagcggcgcccctcctcccagcggcggcagcccagccggctccccaacctctaccgaggagggcacctctgagtccgccacccccgagagcggccctggcacctccaccgagcccagcgagggcagcgcacccggcagccctgccggcagccccacctccacagaggagggaaccagcaccgagcccagcgaaggcagcgccccaggcaccagcaccgagcctagtgagcaggagattaaacggatcaacaagatcagaagaagacttgtgaaagacagcaacaccaagaaggccggcaagacaggccccatgaaaaccctgctggttagagtgatgacacccgatctgagagagcggctggaaaacctgagaaagaagcctgaaaatatcccccagcccatcagcaatacatctagagccaacctgaataagctgctgaccgattacaccgaaatgaagaaggcgatcctgcatgtgtactgggaagagttccagaaggaccctgtgggcctgatgagccgggtggcccagcctgccagcaagaagatcgatcagaacaagctgaaacctgagatggacgagaagggcaacctgaccaccgccggctttgcctgctctcagtgtggccagcccctgttcgtgtacaagctggagcaggtgtctgagaagggcaaggcttacaccaactacttcggacggtgcaatgtggccgagcacgaaaagctgatcctgctggcccagctgaagcccgagaaggatagcgacgaagccgtgacatatagcctgggaaagtttgggcagagggccctggatttctacagcattcatgtgaccaaggagtccacccaccccgtgaagcccctggcccagatcgccggaaacagatacgcctccggacctgtgggaaaggccctgagcgacgcatgtatgggcacaatcgcctccttcctgtctaagtaccaggacatcatcatcgaacaccagaaggtggtgaagggcaaccagaagagactggagagcctgcgggagctggccggcaaggaaaacctggaataccctagcgtgaccctgccacctcagcctcacaccaaggagggcgttgatgcctacaacgaagtgatcgcccgggtgcgaatgtgggtgaacctgaacctgtggcagaagctgaagctaagcagagatgatgccaagcctctgctgagactgaagggattcccttcctttcctctggtcgagagacaggccaacgaagtggactggtgggacatggtgtgtaacgtgaagaagctgatcaacgagaaaaaggaggatggcaaggtgttttggcagaatctggctggctacaagagacaggaagccctgagaccatacctgagcagcgaggaagatcggaagaagggaaagaaattcgctcggtaccagctgggcgacctgctgctgcacctggaaaagaagcacggcgaggactggggaaaggtgtacgacgaggcctgggagcggattgacaagaaagtggaaggcctgagcaagcacatcaagctggaagaggaacggagaagcgaggacgcccagagcaaggccgccctgaccgactggctgcgggctaaggccagcttcgtgatcgagggcctgaaggaggccgacaaggacgagttctgcagatgcgagctgaagctgcagaagtggtacggggacctgcggggaaagcccttcgccatcgaagccgagaacagcatcctggacatcagcggcttcagcaagcagtacaactgtgccttcatctggcagaaggacggcgtgaagaagctgaacctgtacctgatcatcaactacttcaagggcggcaagctgcggttcaagaagatcaaacctgaagccttcgaagccaacagattctacaccgtgatcaacaaaaagagcggcgagatcgtgcccatggaggtgaacttcaacttcgacgaccccaacctgatcatcctgcctctggcctttggcaagagacagggcagagaattcatctggaacgacctgctgtccctggaaaccggcagcctgaagctggccaacggaagagtgatcgagaagacactgtacaacagaagaacccggcaggatgagcctgccctgttcgtggccctgaccttcgagcggcgggaggtcctggactcctccaatatcaaaccaatgaacctgatcggcgtggcaagaggcgaaaacatccccgccgtgatcgccctgaccgaccccgagggctgcccactgagccggtttaaggatagcctgggaaacccaacccacatcctgagaatcggcgagagctataaggagaagcagcggaccatccaggccaagaaggaggtggagcagcggagagccggcggctacagccggaagtacgccagcaaagccaagaatctggcagacgatatggtgagaaacaccgctagagatctgctgtactacgccgtgacccaggatgccatgctgatcttcgccaacctgagccggggcttcggccggcagggcaagcggaccttcatggccgagagacagtacacacggatggaggactggctgaccgccaagctggcctacgagggcctgagcaagacctacctgtccaagacactggcccagtacacctccaagacatgcagcaactgtgggtttaccatcaccagcgccgactacgacagggtgctggagaagctgaagaagacagcaacaggctggatgaccacaattaacggcaaggagctgaaggtggagggccagattacctactacaacagatacaagagacagaacgtagtcaaggacctgtccgtcgagctggatagactgagcgaagaatctgtgaacaacgacatctcctcctggacaaagggcagaagcggagaagctctgagcctcctgaagaaaagattctcccatagacccgtgcaggagaagttcgtgtgcctgaactgcggcttcgagacacacgcagccgagcaagccgccctgaacatcgccagatcctggctgttcctgcggagccaggagtacaagaaataccagacaaacaagacaaccggcaacaccgataagagagccttcgtcgagacctggcagtccttttaccggaagaagcttaaggaggtgtggaaacctgccgtgcggtctggcggatctggcggaggctccaccagccccaagaaaaagagaaaagtctaagctgccttctgcggggcttgccttctggccatgcccttcttctctcccttgcacctgtacctcttggtctttgaataaagcctgagtaggaaggctagcaaaaaaaaaaaaaaaaaaaaaaaaaaaaaaaaaaaaaaaaaaaaaaaaaaaaaaaaaaaaaaaaaaaaaaaaaaaaaaaa

SEQ ID NO: 13322 - RNA, 5785 nt, synthetic construct
  source 1..5785: mol_type = other RNA
aggaaataagagagaaaagaagagtaagaagaaatataagagccaccatggcccctaagaagaagcgtaaagtgagccggatggaacgcctcgtctacgaggtgcggcagaagtgcagaaacatcgaggacatctgcatctcctgcggatctctgaacgtgaccctggagcacccactgttcatcggcggcatgtgccagaactgtaaaaactgttttctggagtgtgcctatcaatacgacgatgacggctaccagagctactgcaccatctgttgcggcggaagagaggtgctgatgtgtggaaataacaactgctgccggtgcttctgcgtggaatgcgtggacctgctggtgggccccggcgccgcccaggccgctattaaggaagatccttggaactgctacatgtgcggccacaagggcacatacggcctgctgagacggagagaggactggcctagcagactgcagatgttcttcgccaataaccacgaccaggagttcgacccccctaaggtgtaccctcccgtccccgccgagaagagaaagcccatccgggtcctgagcctgttcgatggcatcgccaccggtctgctggtgctgaaggacctgggcatccaggtggataggtacattgcctccgaggtgtgcgaggactccatcaccgtgggaatggtgcgtcatcagggcaagatcatgtacgtgggcgacgtgcggagcgtgacacagaagcatatccaggagtggggccctttcgacctggtgatcggcggcagcccttgcaatgacctgagcatcgtgaacccagcccggaagggcctgtacgagggaaccggcagactgttcttcgagttttacagactgctgcacgacgcccggcctaaggaaggcgacgaccggcccttcttttggctgttcgagaatgtggtggccatgggagtcagcgacaagcgggatattagccggttcctggagagcaaccccgtgatgatcgatgccaaggaagtgagcgccgcccaccgggccagatacttctggggcaatctgcctggcatgaacagacccctggccagcaccgtgaacgacaagctggagctgcaggagtgcctggagcacggccggatcgccaagttcagcaaggtgagaaccatcaccacccgaagcaacagcatcaaacaaggcaaggaccagcactttcctgtgttcatgaacgagaaggaggacatcctgtggtgtaccgagatggagagagtgttcgggttcccagtccactacacagatgtcagcaacatgtctagactggccagacagagactgctgggaagaagctggtccgtccctgtgatcagacacctgttcgcccctctgaaggagtacttcgcctgcgtgagcagcggcaacagcaacgccaacagccggggccccagcttctctagcggcctggtgccactgtccctgagagggagccacatgggccccatggagatctacaaaaccgtgagcgcctggaagcggcagcctgtgcgcgtgctgagcctgtttcggaatatcgataaagtcctgaaaagcctgggattcctggagagcggctctggctccggcggtggcaccctgaagtacgtggaggatgtgacaaacgtggtcagacgggatgtggagaagtggggccccttcgatctggtgtacggcagcacccaacccctgggcagctcttgtgaccggtgccctggctggtacatgtttcagttccaccggatcctgcagtacgccctgccgagacaggagtcccagcggccattcttttggattttcatggacaacttgctgctgaccgaggatgaccaggaaactaccactcggttcctgcagaccgaagccgtgaccctgcaggacgtgagaggccgggactaccagaacgccatgcgggtgtggtccaacatccctggactgaaaagcaagcacgcacctctgacccctaaagaagaggagtacctgcaggcccaggtgcggagcagaagcaagctggacgcccctaaggtggatctgctggtgaagaattgcctcctgcccctgagagagtacttcaagtatttcagccagaatagtctgcccctgggaggcagcggcggcggcgcccaggaggccgtgaccttcaaggacgtggccgtggacttcaccagggaggagtggaggctgctgagccccccccagaaggagctgtacaaggaggtgatgctggagaacgcccagaacctgctgaccgtgggcctgcccgccccccccgagaacgtgatcagcgccctgggcgccgagggcagccccgtggacgccaggggcaggaggcccgagggcgcctgctgccccggcgagatcatcggcggcccaagcagcggcgcccctcctcccagcggcggcagcccagccggctccccaacctctaccgaggagggcacctctgagtccgccacccccgagagcggccctggcacctccaccgagcccagcgagggcagcgcacccggcagccctgccggcagccccacctccacagaggagggaaccagcaccgagcccagcgaaggcagcgccccaggcaccagcaccgagcctagtgagcaggagattaaacggatcaacaagatcagaagaagacttgtgaaagacagcaacaccaagaaggccggcaagacaggccccatgaaaaccctgctggttagagtgatgacacccgatctgagagagcggctggaaaacctgagaaagaagcctgaaaatatcccccagcccatcagcaatacatctagagccaacctgaataagctgctgaccgattacaccgaaatgaagaaggcgatcctgcatgtgtactgggaagagttccagaaggaccctgtgggcctgatgagccgggtggcccagcctgccagcaagaagatcgatcagaacaagctgaaacctgagatggacgagaagggcaacctgaccaccgccggctttgcctgctctcagtgtggccagcccctgttcgtgtacaagctggagcaggtgtctgagaagggcaaggcttacaccaactacttcggacggtgcaatgtggccgagcacgaaaagctgatcctgctggcccagctgaagcccgagaaggatagcgacgaagccgtgacatatagcctgggaaagtttgggcagagggccctggatttctacagcattcatgtgaccaaggagtccacccaccccgtgaagcccctggcccagatcgccggaaacagatacgcctccggacctgtgggaaaggccctgagcgacgcatgtatgggcacaatcgcctccttcctgtctaagtaccaggacatcatcatcgaacaccagaaggtggtgaagggcaaccagaagagactggagagcctgcgggagctggccggcaaggaaaacctggaataccctagcgtgaccctgccacctcagcctcacaccaaggagggcgttgatgcctacaacgaagtgatcgcccgggtgcgaatgtgggtgaacctgaacctgtggcagaagctgaagctaagcagagatgatgccaagcctctgctgagactgaagggattcccttcctttcctctggtcgagagacaggccaacgaagtggactggtgggacatggtgtgtaacgtgaagaagctgatcaacgagaaaaaggaggatggcaaggtgttttggcagaatctggctggctacaagagacaggaagccctgagaccatacctgagcagcgaggaagatcggaagaagggaaagaaattcgctcggtaccagctgggcgacctgctgctgcacctggaaaagaagcacggcgaggactggggaaaggtgtacgacgaggcctgggagcggattgacaagaaagtggaaggcctgagcaagcacatcaagctggaagaggaacggagaagcgaggacgcccagagcaaggccgccctgaccgactggctgcgggctaaggccagcttcgtgatcgagggcctgaaggaggccgacaaggacgagttctgcagatgcgagctgaagctgcagaagtggtacggggacctgcggggaaagcccttcgccatcgaagccgagaacagcatcctggacatcagcggcttcagcaagcagtacaactgtgccttcatctggcagaaggacggcgtgaagaagctgaacctgtacctgatcatcaactacttcaagggcggcaagctgcggttcaagaagatcaaacctgaagccttcgaagccaacagattctacaccgtgatcaacaaaaagagcggcgagatcgtgcccatggaggtgaacttcaacttcgacgaccccaacctgatcatcctgcctctggcctttggcaagagacagggcagagaattcatctggaacgacctgctgtccctggaaaccggcagcctgaagctggccaacggaagagtgatcgagaagacactgtacaacagaagaacccggcaggatgagcctgccctgttcgtggccctgaccttcgagcggcgggaggtcctggactcctccaatatcaaaccaatgaacctgatcggcgtggcaagaggcgaaaacatccccgccgtgatcgccctgaccgaccccgagggctgcccactgagccggtttaaggatagcctgggaaacccaacccacatcctgagaatcggcgagagctataaggagaagcagcggaccatccaggccaagaaggaggtggagcagcggagagccggcggctacagccggaagtacgccagcaaagccaagaatctggcagacgatatggtgagaaacaccgctagagatctgctgtactacgccgtgacccaggatgccatgctgatcttcgccaacctgagccggggcttcggccggcagggcaagcggaccttcatggccgagagacagtacacacggatggaggactggctgaccgccaagctggcctacgagggcctgagcaagacctacctgtccaagacactggcccagtacacctccaagacatgcagcaactgtgggtttaccatcaccagcgccgactacgacagggtgctggagaagctgaagaagacagcaacaggctggatgaccacaattaacggcaaggagctgaaggtggagggccagattacctactacaacagatacaagagacagaacgtagtcaaggacctgtccgtcgagctggatagactgagcgaagaatctgtgaacaacgacatctcctcctggacaaagggcagaagcggagaagctctgagcctcctgaagaaaagattctcccatagacccgtgcaggagaagttcgtgtgcctgaactgcggcttcgagacacacgcagccgagcaagccgccctgaacatcgccagatcctggctgttcctgcggagccaggagtacaagaaataccagacaaacaagacaaccggcaacaccgataagagagccttcgtcgagacctggcagtccttttaccggaagaagcttaaggaggtgtggaaacctgccgtgcggtctggcggatctggcggaggctccaccagccccaagaaaaagagaaaagtctaagctgccttctgcggggcttgccttctggccatgcccttcttctctcccttgcacctgtacctcttggtctttgaataaagcctgagtaggaaggctagcaaaaaaaaaaaaaaaaaaaaaaaaaaaaaaaaaaaaaaaaaaaaaaaaaaaaaaaaaaaaaaaaaaaaaaaaaaaaaaaa

SEQ ID NO: 13323 - RNA, 5785 nt, synthetic construct
  source 1..5785: mol_type = other RNA
aggaaataagagagaaaagaagagtaagaagaaatataagagccaccatggcccctaagaagaagcgtaaagtgagccggatggaacgcctcgtctacgaggtgcggcagaagtgcagaaacatcgaggacatctgcatctcctgcggatctctgaacgtgaccctggagcacccactgttcatcggcggcatgtgccagaactgtaaaaactgttttctggagtgtgcctatcaatacgacgatgacggctaccagagctactgcaccatctgttgcggcggaagagaggtgctgatgtgtggaaataacaactgctgccggtgcttctgcgtggaatgcgtggacctgctggtgggccccggcgccgcccaggccgctattaaggaagatccttggaactgctacatgtgcggccacaagggcacatacggcctgctgagacggagagaggactggcctagcagactgcagatgttcttcgccaataaccacgaccaggagttcgacccccctaaggtgtaccctcccgtccccgccgagaagagaaagcccatccgggtcctgagcctgttcgatggcatcgccaccggtctgctggtgctgaaggacctgggcatccaggtggataggtacattgcctccgaggtgtgcgaggactccatcaccgtgggaatggtgcgtcatcagggcaagatcatgtacgtgggcgacgtgcggagcgtgacacagaagcatatccaggagtggggccctttcgacctggtgatcggcggcagcccttgcaatgacctgagcatcgtgaacccagcccggaagggcctgtacgagggaaccggcagactgttcttcgagttttacagactgctgcacgacgcccggcctaaggaaggcgacgaccggcccttcttttggctgttcgagaatgtggtggccatgggagtcagcgacaagcgggatattagccggttcctggagagcaaccccgtgatgatcgatgccaaggaagtgagcgccgcccaccgggccagatacttctggggcaatctgcctggcatgaacagacccctggccagcaccgtgaacgacaagctggagctgcaggagtgcctggagcacggccggatcgccaagttcagcaaggtgagaaccatcaccacccgaagcaacagcatcaaacaaggcaaggaccagcactttcctgtgttcatgaacgagaaggaggacatcctgtggtgtaccgagatggagagagtgttcgggttcccagtccactacacagatgtcagcaacatgtctagactggccagacagagactgctgggaagaagctggtccgtccctgtgatcagacacctgttcgcccctctgaaggagtacttcgcctgcgtgagcagcggcaacagcaacgccaacagccggggccccagcttctctagcggcctggtgccactgtccctgagagggagccacatgggccccatggagatctacaaaaccgtgagcgcctggaagcggcagcctgtgcgcgtgctgagcctgtttcggaatatcgataaagtcctgaaaagcctgggattcctggagagcggctctggctccggcggtggcaccctgaagtacgtggaggatgtgacaaacgtggtcagacgggatgtggagaagtggggccccttcgatctggtgtacggcagcacccaacccctgggcagctcttgtgaccggtgccctggctggtacatgtttcagttccaccggatcctgcagtacgccctgccgagacaggagtcccagcggccattcttttggattttcatggacaacttgctgctgaccgaggatgaccaggaaactaccactcggttcctgcagaccgaagccgtgaccctgcaggacgtgagaggccgggactaccagaacgccatgcgggtgtggtccaacatccctggactgaaaagcaagcacgcacctctgacccctaaagaagaggagtacctgcaggcccaggtgcggagcagaagcaagctggacgcccctaaggtggatctgctggtgaagaattgcctcctgcccctgagagagtacttcaagtatttcagccagaatagtctgcccctgggaggcagcggcggcggcttcaaggagctggtggtgttcagggacgtggccgtggagttctgcagggaggagtgggagtgcctggaccccaggcagaggagcctgtacagggacgtgatgctggagacctacggcaacttcgtgagcctgggcctggccatcagcaagcccagcgtgatcagcctgctggagcagggcaaggagccctggatggtggagcaggccggctggtaccccgacctgctgagcgtgaacgagaccggcggcccaagcagcggcgcccctcctcccagcggcggcagcccagccggctccccaacctctaccgaggagggcacctctgagtccgccacccccgagagcggccctggcacctccaccgagcccagcgagggcagcgcacccggcagccctgccggcagccccacctccacagaggagggaaccagcaccgagcccagcgaaggcagcgccccaggcaccagcaccgagcctagtgagcaggagattaaacggatcaacaagatcagaagaagacttgtgaaagacagcaacaccaagaaggccggcaagacaggccccatgaaaaccctgctggttagagtgatgacacccgatctgagagagcggctggaaaacctgagaaagaagcctgaaaatatcccccagcccatcagcaatacatctagagccaacctgaataagctgctgaccgattacaccgaaatgaagaaggcgatcctgcatgtgtactgggaagagttccagaaggaccctgtgggcctgatgagccgggtggcccagcctgccagcaagaagatcgatcagaacaagctgaaacctgagatggacgagaagggcaacctgaccaccgccggctttgcctgctctcagtgtggccagcccctgttcgtgtacaagctggagcaggtgtctgagaagggcaaggcttacaccaactacttcggacggtgcaatgtggccgagcacgaaaagctgatcctgctggcccagctgaagcccgagaaggatagcgacgaagccgtgacatatagcctgggaaagtttgggcagagggccctggatttctacagcattcatgtgaccaaggagtccacccaccccgtgaagcccctggcccagatcgccggaaacagatacgcctccggacctgtgggaaaggccctgagcgacgcatgtatgggcacaatcgcctccttcctgtctaagtaccaggacatcatcatcgaacaccagaaggtggtgaagggcaaccagaagagactggagagcctgcgggagctggccggcaaggaaaacctggaataccctagcgtgaccctgccacctcagcctcacaccaaggagggcgttgatgcctacaacgaagtgatcgcccgggtgcgaatgtgggtgaacctgaacctgtggcagaagctgaagctaagcagagatgatgccaagcctctgctgagactgaagggattcccttcctttcctctggtcgagagacaggccaacgaagtggactggtgggacatggtgtgtaacgtgaagaagctgatcaacgagaaaaaggaggatggcaaggtgttttggcagaatctggctggctacaagagacaggaagccctgagaccatacctgagcagcgaggaagatcggaagaagggaaagaaattcgctcggtaccagctgggcgacctgctgctgcacctggaaaagaagcacggcgaggactggggaaaggtgtacgacgaggcctgggagcggattgacaagaaagtggaaggcctgagcaagcacatcaagctggaagaggaacggagaagcgaggacgcccagagcaaggccgccctgaccgactggctgcgggctaaggccagcttcgtgatcgagggcctgaaggaggccgacaaggacgagttctgcagatgcgagctgaagctgcagaagtggtacggggacctgcggggaaagcccttcgccatcgaagccgagaacagcatcctggacatcagcggcttcagcaagcagtacaactgtgccttcatctggcagaaggacggcgtgaagaagctgaacctgtacctgatcatcaactacttcaagggcggcaagctgcggttcaagaagatcaaacctgaagccttcgaagccaacagattctacaccgtgatcaacaaaaagagcggcgagatcgtgcccatggaggtgaacttcaacttcgacgaccccaacctgatcatcctgcctctggcctttggcaagagacagggcagagaattcatctggaacgacctgctgtccctggaaaccggcagcctgaagctggccaacggaagagtgatcgagaagacactgtacaacagaagaacccggcaggatgagcctgccctgttcgtggccctgaccttcgagcggcgggaggtcctggactcctccaatatcaaaccaatgaacctgatcggcgtggcaagaggcgaaaacatccccgccgtgatcgccctgaccgaccccgagggctgcccactgagccggtttaaggatagcctgggaaacccaacccacatcctgagaatcggcgagagctataaggagaagcagcggaccatccaggccaagaaggaggtggagcagcggagagccggcggctacagccggaagtacgccagcaaagccaagaatctggcagacgatatggtgagaaacaccgctagagatctgctgtactacgccgtgacccaggatgccatgctgatcttcgccaacctgagccggggcttcggccggcagggcaagcggaccttcatggccgagagacagtacacacggatggaggactggctgaccgccaagctggcctacgagggcctgagcaagacctacctgtccaagacactggcccagtacacctccaagacatgcagcaactgtgggtttaccatcaccagcgccgactacgacagggtgctggagaagctgaagaagacagcaacaggctggatgaccacaattaacggcaaggagctgaaggtggagggccagattacctactacaacagatacaagagacagaacgtagtcaaggacctgtccgtcgagctggatagactgagcgaagaatctgtgaacaacgacatctcctcctggacaaagggcagaagcggagaagctctgagcctcctgaagaaaagattctcccatagacccgtgcaggagaagttcgtgtgcctgaactgcggcttcgagacacacgcagccgagcaagccgccctgaacatcgccagatcctggctgttcctgcggagccaggagtacaagaaataccagacaaacaagacaaccggcaacaccgataagagagccttcgtcgagacctggcagtccttttaccggaagaagcttaaggaggtgtggaaacctgccgtgcggtctggcggatctggcggaggctccaccagccccaagaaaaagagaaaagtctaagctgccttctgcggggcttgccttctggccatgcccttcttctctcccttgcacctgtacctcttggtctttgaataaagcctgagtaggaaggctagcaaaaaaaaaaaaaaaaaaaaaaaaaaaaaaaaaaaaaaaaaaaaaaaaaaaaaaaaaaaaaaaaaaaaaaaaaaaaaaaa

SEQ ID NO: 13324 - RNA, 5785 nt, synthetic construct
  source 1..5785: mol_type = other RNA
aggaaataagagagaaaagaagagtaagaagaaatataagagccaccatggcccctaagaagaagcgtaaagtgagccggatggaacgcctcgtctacgaggtgcggcagaagtgcagaaacatcgaggacatctgcatctcctgcggatctctgaacgtgaccctggagcacccactgttcatcggcggcatgtgccagaactgtaaaaactgttttctggagtgtgcctatcaatacgacgatgacggctaccagagctactgcaccatctgttgcggcggaagagaggtgctgatgtgtggaaataacaactgctgccggtgcttctgcgtggaatgcgtggacctgctggtgggccccggcgccgcccaggccgctattaaggaagatccttggaactgctacatgtgcggccacaagggcacatacggcctgctgagacggagagaggactggcctagcagactgcagatgttcttcgccaataaccacgaccaggagttcgacccccctaaggtgtaccctcccgtccccgccgagaagagaaagcccatccgggtcctgagcctgttcgatggcatcgccaccggtctgctggtgctgaaggacctgggcatccaggtggataggtacattgcctccgaggtgtgcgaggactccatcaccgtgggaatggtgcgtcatcagggcaagatcatgtacgtgggcgacgtgcggagcgtgacacagaagcatatccaggagtggggccctttcgacctggtgatcggcggcagcccttgcaatgacctgagcatcgtgaacccagcccggaagggcctgtacgagggaaccggcagactgttcttcgagttttacagactgctgcacgacgcccggcctaaggaaggcgacgaccggcccttcttttggctgttcgagaatgtggtggccatgggagtcagcgacaagcgggatattagccggttcctggagagcaaccccgtgatgatcgatgccaaggaagtgagcgccgcccaccgggccagatacttctggggcaatctgcctggcatgaacagacccctggccagcaccgtgaacgacaagctggagctgcaggagtgcctggagcacggccggatcgccaagttcagcaaggtgagaaccatcaccacccgaagcaacagcatcaaacaaggcaaggaccagcactttcctgtgttcatgaacgagaaggaggacatcctgtggtgtaccgagatggagagagtgttcgggttcccagtccactacacagatgtcagcaacatgtctagactggccagacagagactgctgggaagaagctggtccgtccctgtgatcagacacctgttcgcccctctgaaggagtacttcgcctgcgtgagcagcggcaacagcaacgccaacagccggggccccagcttctctagcggcctggtgccactgtccctgagagggagccacatgggccccatggagatctacaaaaccgtgagcgcctggaagcggcagcctgtgcgcgtgctgagcctgtttcggaatatcgataaagtcctgaaaagcctgggattcctggagagcggctctggctccggcggtggcaccctgaagtacgtggaggatgtgacaaacgtggtcagacgggatgtggagaagtggggccccttcgatctggtgtacggcagcacccaacccctgggcagctcttgtgaccggtgccctggctggtacatgtttcagttccaccggatcctgcagtacgccctgccgagacaggagtcccagcggccattcttttggattttcatggacaacttgctgctgaccgaggatgaccaggaaactaccactcggttcctgcagaccgaagccgtgaccctgcaggacgtgagaggccgggactaccagaacgccatgcgggtgtggtccaacatccctggactgaaaagcaagcacgcacctctgacccctaaagaagaggagtacctgcaggcccaggtgcggagcagaagcaagctggacgcccctaaggtggatctgctggtgaagaattgcctcctgcccctgagagagtacttcaagtatttcagccagaatagtctgcccctgggaggcagcggcggcggcgccgagaccagcagcagcggcctgctggaggagcagaagatgatgaagagccagggcctggtgagcttcaaggacgtggccgtggacttcacccaggaggagtggcagcagctggaccccagccagaggaccctgtacagggacgtgatgctggagaactacagccacctggtgagcatgggctaccccgtgagcaagcccgacgtgatcagcaagctggagcagggcgaggagccctggatcggcggcccaagcagcggcgcccctcctcccagcggcggcagcccagccggctccccaacctctaccgaggagggcacctctgagtccgccacccccgagagcggccctggcacctccaccgagcccagcgagggcagcgcacccggcagccctgccggcagccccacctccacagaggagggaaccagcaccgagcccagcgaaggcagcgccccaggcaccagcaccgagcctagtgagcaggagattaaacggatcaacaagatcagaagaagacttgtgaaagacagcaacaccaagaaggccggcaagacaggccccatgaaaaccctgctggttagagtgatgacacccgatctgagagagcggctggaaaacctgagaaagaagcctgaaaatatcccccagcccatcagcaatacatctagagccaacctgaataagctgctgaccgattacaccgaaatgaagaaggcgatcctgcatgtgtactgggaagagttccagaaggaccctgtgggcctgatgagccgggtggcccagcctgccagcaagaagatcgatcagaacaagctgaaacctgagatggacgagaagggcaacctgaccaccgccggctttgcctgctctcagtgtggccagcccctgttcgtgtacaagctggagcaggtgtctgagaagggcaaggcttacaccaactacttcggacggtgcaatgtggccgagcacgaaaagctgatcctgctggcccagctgaagcccgagaaggatagcgacgaagccgtgacatatagcctgggaaagtttgggcagagggccctggatttctacagcattcatgtgaccaaggagtccacccaccccgtgaagcccctggcccagatcgccggaaacagatacgcctccggacctgtgggaaaggccctgagcgacgcatgtatgggcacaatcgcctccttcctgtctaagtaccaggacatcatcatcgaacaccagaaggtggtgaagggcaaccagaagagactggagagcctgcgggagctggccggcaaggaaaacctggaataccctagcgtgaccctgccacctcagcctcacaccaaggagggcgttgatgcctacaacgaagtgatcgcccgggtgcgaatgtgggtgaacctgaacctgtggcagaagctgaagctaagcagagatgatgccaagcctctgctgagactgaagggattcccttcctttcctctggtcgagagacaggccaacgaagtggactggtgggacatggtgtgtaacgtgaagaagctgatcaacgagaaaaaggaggatggcaaggtgttttggcagaatctggctggctacaagagacaggaagccctgagaccatacctgagcagcgaggaagatcggaagaagggaaagaaattcgctcggtaccagctgggcgacctgctgctgcacctggaaaagaagcacggcgaggactggggaaaggtgtacgacgaggcctgggagcggattgacaagaaagtggaaggcctgagcaagcacatcaagctggaagaggaacggagaagcgaggacgcccagagcaaggccgccctgaccgactggctgcgggctaaggccagcttcgtgatcgagggcctgaaggaggccgacaaggacgagttctgcagatgcgagctgaagctgcagaagtggtacggggacctgcggggaaagcccttcgccatcgaagccgagaacagcatcctggacatcagcggcttcagcaagcagtacaactgtgccttcatctggcagaaggacggcgtgaagaagctgaacctgtacctgatcatcaactacttcaagggcggcaagctgcggttcaagaagatcaaacctgaagccttcgaagccaacagattctacaccgtgatcaacaaaaagagcggcgagatcgtgcccatggaggtgaacttcaacttcgacgaccccaacctgatcatcctgcctctggcctttggcaagagacagggcagagaattcatctggaacgacctgctgtccctggaaaccggcagcctgaagctggccaacggaagagtgatcgagaagacactgtacaacagaagaacccggcaggatgagcctgccctgttcgtggccctgaccttcgagcggcgggaggtcctggactcctccaatatcaaaccaatgaacctgatcggcgtggcaagaggcgaaaacatccccgccgtgatcgccctgaccgaccccgagggctgcccactgagccggtttaaggatagcctgggaaacccaacccacatcctgagaatcggcgagagctataaggagaagcagcggaccatccaggccaagaaggaggtggagcagcggagagccggcggctacagccggaagtacgccagcaaagccaagaatctggcagacgatatggtgagaaacaccgctagagatctgctgtactacgccgtgacccaggatgccatgctgatcttcgccaacctgagccggggcttcggccggcagggcaagcggaccttcatggccgagagacagtacacacggatggaggactggctgaccgccaagctggcctacgagggcctgagcaagacctacctgtccaagacactggcccagtacacctccaagacatgcagcaactgtgggtttaccatcaccagcgccgactacgacagggtgctggagaagctgaagaagacagcaacaggctggatgaccacaattaacggcaaggagctgaaggtggagggccagattacctactacaacagatacaagagacagaacgtagtcaaggacctgtccgtcgagctggatagactgagcgaagaatctgtgaacaacgacatctcctcctggacaaagggcagaagcggagaagctctgagcctcctgaagaaaagattctcccatagacccgtgcaggagaagttcgtgtgcctgaactgcggcttcgagacacacgcagccgagcaagccgccctgaacatcgccagatcctggctgttcctgcggagccaggagtacaagaaataccagacaaacaagacaaccggcaacaccgataagagagccttcgtcgagacctggcagtccttttaccggaagaagcttaaggaggtgtggaaacctgccgtgcggtctggcggatctggcggaggctccaccagccccaagaaaaagagaaaagtctaagctgccttctgcggggcttgccttctggccatgcccttcttctctcccttgcacctgtacctcttggtctttgaataaagcctgagtaggaaggctagcaaaaaaaaaaaaaaaaaaaaaaaaaaaaaaaaaaaaaaaaaaaaaaaaaaaaaaaaaaaaaaaaaaaaaaaaaaaaaaaa

SEQ ID NO: 13325 - RNA, 5785 nt, synthetic construct
  source 1..5785: mol_type = other RNA
aggaaataagagagaaaagaagagtaagaagaaatataagagccaccatggcccctaagaagaagcgtaaagtgagccggatggaacgcctcgtctacgaggtgcggcagaagtgcagaaacatcgaggacatctgcatctcctgcggatctctgaacgtgaccctggagcacccactgttcatcggcggcatgtgccagaactgtaaaaactgttttctggagtgtgcctatcaatacgacgatgacggctaccagagctactgcaccatctgttgcggcggaagagaggtgctgatgtgtggaaataacaactgctgccggtgcttctgcgtggaatgcgtggacctgctggtgggccccggcgccgcccaggccgctattaaggaagatccttggaactgctacatgtgcggccacaagggcacatacggcctgctgagacggagagaggactggcctagcagactgcagatgttcttcgccaataaccacgaccaggagttcgacccccctaaggtgtaccctcccgtccccgccgagaagagaaagcccatccgggtcctgagcctgttcgatggcatcgccaccggtctgctggtgctgaaggacctgggcatccaggtggataggtacattgcctccgaggtgtgcgaggactccatcaccgtgggaatggtgcgtcatcagggcaagatcatgtacgtgggcgacgtgcggagcgtgacacagaagcatatccaggagtggggccctttcgacctggtgatcggcggcagcccttgcaatgacctgagcatcgtgaacccagcccggaagggcctgtacgagggaaccggcagactgttcttcgagttttacagactgctgcacgacgcccggcctaaggaaggcgacgaccggcccttcttttggctgttcgagaatgtggtggccatgggagtcagcgacaagcgggatattagccggttcctggagagcaaccccgtgatgatcgatgccaaggaagtgagcgccgcccaccgggccagatacttctggggcaatctgcctggcatgaacagacccctggccagcaccgtgaacgacaagctggagctgcaggagtgcctggagcacggccggatcgccaagttcagcaaggtgagaaccatcaccacccgaagcaacagcatcaaacaaggcaaggaccagcactttcctgtgttcatgaacgagaaggaggacatcctgtggtgtaccgagatggagagagtgttcgggttcccagtccactacacagatgtcagcaacatgtctagactggccagacagagactgctgggaagaagctggtccgtccctgtgatcagacacctgttcgcccctctgaaggagtacttcgcctgcgtgagcagcggcaacagcaacgccaacagccggggccccagcttctctagcggcctggtgccactgtccctgagagggagccacatgggccccatggagatctacaaaaccgtgagcgcctggaagcggcagcctgtgcgcgtgctgagcctgtttcggaatatcgataaagtcctgaaaagcctgggattcctggagagcggctctggctccggcggtggcaccctgaagtacgtggaggatgtgacaaacgtggtcagacgggatgtggagaagtggggccccttcgatctggtgtacggcagcacccaacccctgggcagctcttgtgaccggtgccctggctggtacatgtttcagttccaccggatcctgcagtacgccctgccgagacaggagtcccagcggccattcttttggattttcatggacaacttgctgctgaccgaggatgaccaggaaactaccactcggttcctgcagaccgaagccgtgaccctgcaggacgtgagaggccgggactaccagaacgccatgcgggtgtggtccaacatccctggactgaaaagcaagcacgcacctctgacccctaaagaagaggagtacctgcaggcccaggtgcggagcagaagcaagctggacgcccctaaggtggatctgctggtgaagaattgcctcctgcccctgagagagtacttcaagtatttcagccagaatagtctgcccctgggaggcagcggcggcggcttccaggacctgctgagcttcaccgacgtggccatcgacttcagcgccgacgagtgcgagtgcctggagcccgcccagtggaacctgtacaaggaggtgatgctggagaactacagcaacctggtgttcctgggcctggccttcagcaagccctacctggtgaccttcctggagcagagcagcgacccctggagcatgaagaggaaggccagcgccgccatccacctgggcctgaagccccacggcggcccaagcagcggcgcccctcctcccagcggcggcagcccagccggctccccaacctctaccgaggagggcacctctgagtccgccacccccgagagcggccctggcacctccaccgagcccagcgagggcagcgcacccggcagccctgccggcagccccacctccacagaggagggaaccagcaccgagcccagcgaaggcagcgccccaggcaccagcaccgagcctagtgagcaggagattaaacggatcaacaagatcagaagaagacttgtgaaagacagcaacaccaagaaggccggcaagacaggccccatgaaaaccctgctggttagagtgatgacacccgatctgagagagcggctggaaaacctgagaaagaagcctgaaaatatcccccagcccatcagcaatacatctagagccaacctgaataagctgctgaccgattacaccgaaatgaagaaggcgatcctgcatgtgtactgggaagagttccagaaggaccctgtgggcctgatgagccgggtggcccagcctgccagcaagaagatcgatcagaacaagctgaaacctgagatggacgagaagggcaacctgaccaccgccggctttgcctgctctcagtgtggccagcccctgttcgtgtacaagctggagcaggtgtctgagaagggcaaggcttacaccaactacttcggacggtgcaatgtggccgagcacgaaaagctgatcctgctggcccagctgaagcccgagaaggatagcgacgaagccgtgacatatagcctgggaaagtttgggcagagggccctggatttctacagcattcatgtgaccaaggagtccacccaccccgtgaagcccctggcccagatcgccggaaacagatacgcctccggacctgtgggaaaggccctgagcgacgcatgtatgggcacaatcgcctccttcctgtctaagtaccaggacatcatcatcgaacaccagaaggtggtgaagggcaaccagaagagactggagagcctgcgggagctggccggcaaggaaaacctggaataccctagcgtgaccctgccacctcagcctcacaccaaggagggcgttgatgcctacaacgaagtgatcgcccgggtgcgaatgtgggtgaacctgaacctgtggcagaagctgaagctaagcagagatgatgccaagcctctgctgagactgaagggattcccttcctttcctctggtcgagagacaggccaacgaagtggactggtgggacatggtgtgtaacgtgaagaagctgatcaacgagaaaaaggaggatggcaaggtgttttggcagaatctggctggctacaagagacaggaagccctgagaccatacctgagcagcgaggaagatcggaagaagggaaagaaattcgctcggtaccagctgggcgacctgctgctgcacctggaaaagaagcacggcgaggactggggaaaggtgtacgacgaggcctgggagcggattgacaagaaagtggaaggcctgagcaagcacatcaagctggaagaggaacggagaagcgaggacgcccagagcaaggccgccctgaccgactggctgcgggctaaggccagcttcgtgatcgagggcctgaaggaggccgacaaggacgagttctgcagatgcgagctgaagctgcagaagtggtacggggacctgcggggaaagcccttcgccatcgaagccgagaacagcatcctggacatcagcggcttcagcaagcagtacaactgtgccttcatctggcagaaggacggcgtgaagaagctgaacctgtacctgatcatcaactacttcaagggcggcaagctgcggttcaagaagatcaaacctgaagccttcgaagccaacagattctacaccgtgatcaacaaaaagagcggcgagatcgtgcccatggaggtgaacttcaacttcgacgaccccaacctgatcatcctgcctctggcctttggcaagagacagggcagagaattcatctggaacgacctgctgtccctggaaaccggcagcctgaagctggccaacggaagagtgatcgagaagacactgtacaacagaagaacccggcaggatgagcctgccctgttcgtggccctgaccttcgagcggcgggaggtcctggactcctccaatatcaaaccaatgaacctgatcggcgtggcaagaggcgaaaacatccccgccgtgatcgccctgaccgaccccgagggctgcccactgagccggtttaaggatagcctgggaaacccaacccacatcctgagaatcggcgagagctataaggagaagcagcggaccatccaggccaagaaggaggtggagcagcggagagccggcggctacagccggaagtacgccagcaaagccaagaatctggcagacgatatggtgagaaacaccgctagagatctgctgtactacgccgtgacccaggatgccatgctgatcttcgccaacctgagccggggcttcggccggcagggcaagcggaccttcatggccgagagacagtacacacggatggaggactggctgaccgccaagctggcctacgagggcctgagcaagacctacctgtccaagacactggcccagtacacctccaagacatgcagcaactgtgggtttaccatcaccagcgccgactacgacagggtgctggagaagctgaagaagacagcaacaggctggatgaccacaattaacggcaaggagctgaaggtggagggccagattacctactacaacagatacaagagacagaacgtagtcaaggacctgtccgtcgagctggatagactgagcgaagaatctgtgaacaacgacatctcctcctggacaaagggcagaagcggagaagctctgagcctcctgaagaaaagattctcccatagacccgtgcaggagaagttcgtgtgcctgaactgcggcttcgagacacacgcagccgagcaagccgccctgaacatcgccagatcctggctgttcctgcggagccaggagtacaagaaataccagacaaacaagacaaccggcaacaccgataagagagccttcgtcgagacctggcagtccttttaccggaagaagcttaaggaggtgtggaaacctgccgtgcggtctggcggatctggcggaggctccaccagccccaagaaaaagagaaaagtctaagctgccttctgcggggcttgccttctggccatgcccttcttctctcccttgcacctgtacctcttggtctttgaataaagcctgagtaggaaggctagcaaaaaaaaaaaaaaaaaaaaaaaaaaaaaaaaaaaaaaaaaaaaaaaaaaaaaaaaaaaaaaaaaaaaaaaaaaaaaaaa

SEQ ID NO: 13326 - RNA, 5785 nt, synthetic construct
  source 1..5785: mol_type = other RNA
aggaaataagagagaaaagaagagtaagaagaaatataagagccaccatggcccctaagaagaagcgtaaagtgagccggatggaacgcctcgtctacgaggtgcggcagaagtgcagaaacatcgaggacatctgcatctcctgcggatctctgaacgtgaccctggagcacccactgttcatcggcggcatgtgccagaactgtaaaaactgttttctggagtgtgcctatcaatacgacgatgacggctaccagagctactgcaccatctgttgcggcggaagagaggtgctgatgtgtggaaataacaactgctgccggtgcttctgcgtggaatgcgtggacctgctggtgggccccggcgccgcccaggccgctattaaggaagatccttggaactgctacatgtgcggccacaagggcacatacggcctgctgagacggagagaggactggcctagcagactgcagatgttcttcgccaataaccacgaccaggagttcgacccccctaaggtgtaccctcccgtccccgccgagaagagaaagcccatccgggtcctgagcctgttcgatggcatcgccaccggtctgctggtgctgaaggacctgggcatccaggtggataggtacattgcctccgaggtgtgcgaggactccatcaccgtgggaatggtgcgtcatcagggcaagatcatgtacgtgggcgacgtgcggagcgtgacacagaagcatatccaggagtggggccctttcgacctggtgatcggcggcagcccttgcaatgacctgagcatcgtgaacccagcccggaagggcctgtacgagggaaccggcagactgttcttcgagttttacagactgctgcacgacgcccggcctaaggaaggcgacgaccggcccttcttttggctgttcgagaatgtggtggccatgggagtcagcgacaagcgggatattagccggttcctggagagcaaccccgtgatgatcgatgccaaggaagtgagcgccgcccaccgggccagatacttctggggcaatctgcctggcatgaacagacccctggccagcaccgtgaacgacaagctggagctgcaggagtgcctggagcacggccggatcgccaagttcagcaaggtgagaaccatcaccacccgaagcaacagcatcaaacaaggcaaggaccagcactttcctgtgttcatgaacgagaaggaggacatcctgtggtgtaccgagatggagagagtgttcgggttcccagtccactacacagatgtcagcaacatgtctagactggccagacagagactgctgggaagaagctggtccgtccctgtgatcagacacctgttcgcccctctgaaggagtacttcgcctgcgtgagcagcggcaacagcaacgccaacagccggggccccagcttctctagcggcctggtgccactgtccctgagagggagccacatgggccccatggagatctacaaaaccgtgagcgcctggaagcggcagcctgtgcgcgtgctgagcctgtttcggaatatcgataaagtcctgaaaagcctgggattcctggagagcggctctggctccggcggtggcaccctgaagtacgtggaggatgtgacaaacgtggtcagacgggatgtggagaagtggggccccttcgatctggtgtacggcagcacccaacccctgggcagctcttgtgaccggtgccctggctggtacatgtttcagttccaccggatcctgcagtacgccctgccgagacaggagtcccagcggccattcttttggattttcatggacaacttgctgctgaccgaggatgaccaggaaactaccactcggttcctgcagaccgaagccgtgaccctgcaggacgtgagaggccgggactaccagaacgccatgcgggtgtggtccaacatccctggactgaaaagcaagcacgcacctctgacccctaaagaagaggagtacctgcaggcccaggtgcggagcagaagcaagctggacgcccctaaggtggatctgctggtgaagaattgcctcctgcccctgagagagtacttcaagtatttcagccagaatagtctgcccctgggaggcagcggcggcggccccaaggtgaccgtgagcttcgaggacgtgagcgtgtacttcaccaagaccgagtggaagctgctggacctgaagcagaggaacctgtacaagcaggtgatgctggagaactacagccacctggtgagcgtgggcttcgccttcagcaagcccaacctggtgagccagctggagaggggcgagaagccctggatcagggacgacaggatggagagcgccgccaggagcagggccggcaacaggggcggcccaagcagcggcgcccctcctcccagcggcggcagcccagccggctccccaacctctaccgaggagggcacctctgagtccgccacccccgagagcggccctggcacctccaccgagcccagcgagggcagcgcacccggcagccctgccggcagccccacctccacagaggagggaaccagcaccgagcccagcgaaggcagcgccccaggcaccagcaccgagcctagtgagcaggagattaaacggatcaacaagatcagaagaagacttgtgaaagacagcaacaccaagaaggccggcaagacaggccccatgaaaaccctgctggttagagtgatgacacccgatctgagagagcggctggaaaacctgagaaagaagcctgaaaatatcccccagcccatcagcaatacatctagagccaacctgaataagctgctgaccgattacaccgaaatgaagaaggcgatcctgcatgtgtactgggaagagttccagaaggaccctgtgggcctgatgagccgggtggcccagcctgccagcaagaagatcgatcagaacaagctgaaacctgagatggacgagaagggcaacctgaccaccgccggctttgcctgctctcagtgtggccagcccctgttcgtgtacaagctggagcaggtgtctgagaagggcaaggcttacaccaactacttcggacggtgcaatgtggccgagcacgaaaagctgatcctgctggcccagctgaagcccgagaaggatagcgacgaagccgtgacatatagcctgggaaagtttgggcagagggccctggatttctacagcattcatgtgaccaaggagtccacccaccccgtgaagcccctggcccagatcgccggaaacagatacgcctccggacctgtgggaaaggccctgagcgacgcatgtatgggcacaatcgcctccttcctgtctaagtaccaggacatcatcatcgaacaccagaaggtggtgaagggcaaccagaagagactggagagcctgcgggagctggccggcaaggaaaacctggaataccctagcgtgaccctgccacctcagcctcacaccaaggagggcgttgatgcctacaacgaagtgatcgcccgggtgcgaatgtgggtgaacctgaacctgtggcagaagctgaagctaagcagagatgatgccaagcctctgctgagactgaagggattcccttcctttcctctggtcgagagacaggccaacgaagtggactggtgggacatggtgtgtaacgtgaagaagctgatcaacgagaaaaaggaggatggcaaggtgttttggcagaatctggctggctacaagagacaggaagccctgagaccatacctgagcagcgaggaagatcggaagaagggaaagaaattcgctcggtaccagctgggcgacctgctgctgcacctggaaaagaagcacggcgaggactggggaaaggtgtacgacgaggcctgggagcggattgacaagaaagtggaaggcctgagcaagcacatcaagctggaagaggaacggagaagcgaggacgcccagagcaaggccgccctgaccgactggctgcgggctaaggccagcttcgtgatcgagggcctgaaggaggccgacaaggacgagttctgcagatgcgagctgaagctgcagaagtggtacggggacctgcggggaaagcccttcgccatcgaagccgagaacagcatcctggacatcagcggcttcagcaagcagtacaactgtgccttcatctggcagaaggacggcgtgaagaagctgaacctgtacctgatcatcaactacttcaagggcggcaagctgcggttcaagaagatcaaacctgaagccttcgaagccaacagattctacaccgtgatcaacaaaaagagcggcgagatcgtgcccatggaggtgaacttcaacttcgacgaccccaacctgatcatcctgcctctggcctttggcaagagacagggcagagaattcatctggaacgacctgctgtccctggaaaccggcagcctgaagctggccaacggaagagtgatcgagaagacactgtacaacagaagaacccggcaggatgagcctgccctgttcgtggccctgaccttcgagcggcgggaggtcctggactcctccaatatcaaaccaatgaacctgatcggcgtggcaagaggcgaaaacatccccgccgtgatcgccctgaccgaccccgagggctgcccactgagccggtttaaggatagcctgggaaacccaacccacatcctgagaatcggcgagagctataaggagaagcagcggaccatccaggccaagaaggaggtggagcagcggagagccggcggctacagccggaagtacgccagcaaagccaagaatctggcagacgatatggtgagaaacaccgctagagatctgctgtactacgccgtgacccaggatgccatgctgatcttcgccaacctgagccggggcttcggccggcagggcaagcggaccttcatggccgagagacagtacacacggatggaggactggctgaccgccaagctggcctacgagggcctgagcaagacctacctgtccaagacactggcccagtacacctccaagacatgcagcaactgtgggtttaccatcaccagcgccgactacgacagggtgctggagaagctgaagaagacagcaacaggctggatgaccacaattaacggcaaggagctgaaggtggagggccagattacctactacaacagatacaagagacagaacgtagtcaaggacctgtccgtcgagctggatagactgagcgaagaatctgtgaacaacgacatctcctcctggacaaagggcagaagcggagaagctctgagcctcctgaagaaaagattctcccatagacccgtgcaggagaagttcgtgtgcctgaactgcggcttcgagacacacgcagccgagcaagccgccctgaacatcgccagatcctggctgttcctgcggagccaggagtacaagaaataccagacaaacaagacaaccggcaacaccgataagagagccttcgtcgagacctggcagtccttttaccggaagaagcttaaggaggtgtggaaacctgccgtgcggtctggcggatctggcggaggctccaccagccccaagaaaaagagaaaagtctaagctgccttctgcggggcttgccttctggccatgcccttcttctctcccttgcacctgtacctcttggtctttgaataaagcctgagtaggaaggctagcaaaaaaaaaaaaaaaaaaaaaaaaaaaaaaaaaaaaaaaaaaaaaaaaaaaaaaaaaaaaaaaaaaaaaaaaaaaaaaaa

SEQ ID NO: 13327 - RNA, 5785 nt, synthetic construct
  source 1..5785: mol_type = other RNA
aggaaataagagagaaaagaagagtaagaagaaatataagagccaccatggcccctaagaagaagcgtaaagtgagccggatggaacgcctcgtctacgaggtgcggcagaagtgcagaaacatcgaggacatctgcatctcctgcggatctctgaacgtgaccctggagcacccactgttcatcggcggcatgtgccagaactgtaaaaactgttttctggagtgtgcctatcaatacgacgatgacggctaccagagctactgcaccatctgttgcggcggaagagaggtgctgatgtgtggaaataacaactgctgccggtgcttctgcgtggaatgcgtggacctgctggtgggccccggcgccgcccaggccgctattaaggaagatccttggaactgctacatgtgcggccacaagggcacatacggcctgctgagacggagagaggactggcctagcagactgcagatgttcttcgccaataaccacgaccaggagttcgacccccctaaggtgtaccctcccgtccccgccgagaagagaaagcccatccgggtcctgagcctgttcgatggcatcgccaccggtctgctggtgctgaaggacctgggcatccaggtggataggtacattgcctccgaggtgtgcgaggactccatcaccgtgggaatggtgcgtcatcagggcaagatcatgtacgtgggcgacgtgcggagcgtgacacagaagcatatccaggagtggggccctttcgacctggtgatcggcggcagcccttgcaatgacctgagcatcgtgaacccagcccggaagggcctgtacgagggaaccggcagactgttcttcgagttttacagactgctgcacgacgcccggcctaaggaaggcgacgaccggcccttcttttggctgttcgagaatgtggtggccatgggagtcagcgacaagcgggatattagccggttcctggagagcaaccccgtgatgatcgatgccaaggaagtgagcgccgcccaccgggccagatacttctggggcaatctgcctggcatgaacagacccctggccagcaccgtgaacgacaagctggagctgcaggagtgcctggagcacggccggatcgccaagttcagcaaggtgagaaccatcaccacccgaagcaacagcatcaaacaaggcaaggaccagcactttcctgtgttcatgaacgagaaggaggacatcctgtggtgtaccgagatggagagagtgttcgggttcccagtccactacacagatgtcagcaacatgtctagactggccagacagagactgctgggaagaagctggtccgtccctgtgatcagacacctgttcgcccctctgaaggagtacttcgcctgcgtgagcagcggcaacagcaacgccaacagccggggccccagcttctctagcggcctggtgccactgtccctgagagggagccacatgggccccatggagatctacaaaaccgtgagcgcctggaagcggcagcctgtgcgcgtgctgagcctgtttcggaatatcgataaagtcctgaaaagcctgggattcctggagagcggctctggctccggcggtggcaccctgaagtacgtggaggatgtgacaaacgtggtcagacgggatgtggagaagtggggccccttcgatctggtgtacggcagcacccaacccctgggcagctcttgtgaccggtgccctggctggtacatgtttcagttccaccggatcctgcagtacgccctgccgagacaggagtcccagcggccattcttttggattttcatggacaacttgctgctgaccgaggatgaccaggaaactaccactcggttcctgcagaccgaagccgtgaccctgcaggacgtgagaggccgggactaccagaacgccatgcgggtgtggtccaacatccctggactgaaaagcaagcacgcacctctgacccctaaagaagaggagtacctgcaggcccaggtgcggagcagaagcaagctggacgcccctaaggtggatctgctggtgaagaattgcctcctgcccctgagagagtacttcaagtatttcagccagaatagtctgcccctgggaggcagcggcggcggcttccaccagctggtgaccttcgaggacgtggccgtgtacctgagcaaggaggagtggaagaggctgaacctggcccagagggagctgtacagggacgtgatgctggagaactacgagaacctgctgagcctgggcttccccgtgagcaagcccgacatcatcagccagctggagcagaggaaggaggcctggatcgtgcagggccccgagaagaggaagttcagccagaacgcccacagggacggcggcccaagcagcggcgcccctcctcccagcggcggcagcccagccggctccccaacctctaccgaggagggcacctctgagtccgccacccccgagagcggccctggcacctccaccgagcccagcgagggcagcgcacccggcagccctgccggcagccccacctccacagaggagggaaccagcaccgagcccagcgaaggcagcgccccaggcaccagcaccgagcctagtgagcaggagattaaacggatcaacaagatcagaagaagacttgtgaaagacagcaacaccaagaaggccggcaagacaggccccatgaaaaccctgctggttagagtgatgacacccgatctgagagagcggctggaaaacctgagaaagaagcctgaaaatatcccccagcccatcagcaatacatctagagccaacctgaataagctgctgaccgattacaccgaaatgaagaaggcgatcctgcatgtgtactgggaagagttccagaaggaccctgtgggcctgatgagccgggtggcccagcctgccagcaagaagatcgatcagaacaagctgaaacctgagatggacgagaagggcaacctgaccaccgccggctttgcctgctctcagtgtggccagcccctgttcgtgtacaagctggagcaggtgtctgagaagggcaaggcttacaccaactacttcggacggtgcaatgtggccgagcacgaaaagctgatcctgctggcccagctgaagcccgagaaggatagcgacgaagccgtgacatatagcctgggaaagtttgggcagagggccctggatttctacagcattcatgtgaccaaggagtccacccaccccgtgaagcccctggcccagatcgccggaaacagatacgcctccggacctgtgggaaaggccctgagcgacgcatgtatgggcacaatcgcctccttcctgtctaagtaccaggacatcatcatcgaacaccagaaggtggtgaagggcaaccagaagagactggagagcctgcgggagctggccggcaaggaaaacctggaataccctagcgtgaccctgccacctcagcctcacaccaaggagggcgttgatgcctacaacgaagtgatcgcccgggtgcgaatgtgggtgaacctgaacctgtggcagaagctgaagctaagcagagatgatgccaagcctctgctgagactgaagggattcccttcctttcctctggtcgagagacaggccaacgaagtggactggtgggacatggtgtgtaacgtgaagaagctgatcaacgagaaaaaggaggatggcaaggtgttttggcagaatctggctggctacaagagacaggaagccctgagaccatacctgagcagcgaggaagatcggaagaagggaaagaaattcgctcggtaccagctgggcgacctgctgctgcacctggaaaagaagcacggcgaggactggggaaaggtgtacgacgaggcctgggagcggattgacaagaaagtggaaggcctgagcaagcacatcaagctggaagaggaacggagaagcgaggacgcccagagcaaggccgccctgaccgactggctgcgggctaaggccagcttcgtgatcgagggcctgaaggaggccgacaaggacgagttctgcagatgcgagctgaagctgcagaagtggtacggggacctgcggggaaagcccttcgccatcgaagccgagaacagcatcctggacatcagcggcttcagcaagcagtacaactgtgccttcatctggcagaaggacggcgtgaagaagctgaacctgtacctgatcatcaactacttcaagggcggcaagctgcggttcaagaagatcaaacctgaagccttcgaagccaacagattctacaccgtgatcaacaaaaagagcggcgagatcgtgcccatggaggtgaacttcaacttcgacgaccccaacctgatcatcctgcctctggcctttggcaagagacagggcagagaattcatctggaacgacctgctgtccctggaaaccggcagcctgaagctggccaacggaagagtgatcgagaagacactgtacaacagaagaacccggcaggatgagcctgccctgttcgtggccctgaccttcgagcggcgggaggtcctggactcctccaatatcaaaccaatgaacctgatcggcgtggcaagaggcgaaaacatccccgccgtgatcgccctgaccgaccccgagggctgcccactgagccggtttaaggatagcctgggaaacccaacccacatcctgagaatcggcgagagctataaggagaagcagcggaccatccaggccaagaaggaggtggagcagcggagagccggcggctacagccggaagtacgccagcaaagccaagaatctggcagacgatatggtgagaaacaccgctagagatctgctgtactacgccgtgacccaggatgccatgctgatcttcgccaacctgagccggggcttcggccggcagggcaagcggaccttcatggccgagagacagtacacacggatggaggactggctgaccgccaagctggcctacgagggcctgagcaagacctacctgtccaagacactggcccagtacacctccaagacatgcagcaactgtgggtttaccatcaccagcgccgactacgacagggtgctggagaagctgaagaagacagcaacaggctggatgaccacaattaacggcaaggagctgaaggtggagggccagattacctactacaacagatacaagagacagaacgtagtcaaggacctgtccgtcgagctggatagactgagcgaagaatctgtgaacaacgacatctcctcctggacaaagggcagaagcggagaagctctgagcctcctgaagaaaagattctcccatagacccgtgcaggagaagttcgtgtgcctgaactgcggcttcgagacacacgcagccgagcaagccgccctgaacatcgccagatcctggctgttcctgcggagccaggagtacaagaaataccagacaaacaagacaaccggcaacaccgataagagagccttcgtcgagacctggcagtccttttaccggaagaagcttaaggaggtgtggaaacctgccgtgcggtctggcggatctggcggaggctccaccagccccaagaaaaagagaaaagtctaagctgccttctgcggggcttgccttctggccatgcccttcttctctcccttgcacctgtacctcttggtctttgaataaagcctgagtaggaaggctagcaaaaaaaaaaaaaaaaaaaaaaaaaaaaaaaaaaaaaaaaaaaaaaaaaaaaaaaaaaaaaaaaaaaaaaaaaaaaaaaa

SEQ ID NO: 13328 - RNA, 5785 nt, synthetic construct
  source 1..5785: mol_type = other RNA
aggaaataagagagaaaagaagagtaagaagaaatataagagccaccatggcccctaagaagaagcgtaaagtgagccggatggaacgcctcgtctacgaggtgcggcagaagtgcagaaacatcgaggacatctgcatctcctgcggatctctgaacgtgaccctggagcacccactgttcatcggcggcatgtgccagaactgtaaaaactgttttctggagtgtgcctatcaatacgacgatgacggctaccagagctactgcaccatctgttgcggcggaagagaggtgctgatgtgtggaaataacaactgctgccggtgcttctgcgtggaatgcgtggacctgctggtgggccccggcgccgcccaggccgctattaaggaagatccttggaactgctacatgtgcggccacaagggcacatacggcctgctgagacggagagaggactggcctagcagactgcagatgttcttcgccaataaccacgaccaggagttcgacccccctaaggtgtaccctcccgtccccgccgagaagagaaagcccatccgggtcctgagcctgttcgatggcatcgccaccggtctgctggtgctgaaggacctgggcatccaggtggataggtacattgcctccgaggtgtgcgaggactccatcaccgtgggaatggtgcgtcatcagggcaagatcatgtacgtgggcgacgtgcggagcgtgacacagaagcatatccaggagtggggccctttcgacctggtgatcggcggcagcccttgcaatgacctgagcatcgtgaacccagcccggaagggcctgtacgagggaaccggcagactgttcttcgagttttacagactgctgcacgacgcccggcctaaggaaggcgacgaccggcccttcttttggctgttcgagaatgtggtggccatgggagtcagcgacaagcgggatattagccggttcctggagagcaaccccgtgatgatcgatgccaaggaagtgagcgccgcccaccgggccagatacttctggggcaatctgcctggcatgaacagacccctggccagcaccgtgaacgacaagctggagctgcaggagtgcctggagcacggccggatcgccaagttcagcaaggtgagaaccatcaccacccgaagcaacagcatcaaacaaggcaaggaccagcactttcctgtgttcatgaacgagaaggaggacatcctgtggtgtaccgagatggagagagtgttcgggttcccagtccactacacagatgtcagcaacatgtctagactggccagacagagactgctgggaagaagctggtccgtccctgtgatcagacacctgttcgcccctctgaaggagtacttcgcctgcgtgagcagcggcaacagcaacgccaacagccggggccccagcttctctagcggcctggtgccactgtccctgagagggagccacatgggccccatggagatctacaaaaccgtgagcgcctggaagcggcagcctgtgcgcgtgctgagcctgtttcggaatatcgataaagtcctgaaaagcctgggattcctggagagcggctctggctccggcggtggcaccctgaagtacgtggaggatgtgacaaacgtggtcagacgggatgtggagaagtggggccccttcgatctggtgtacggcagcacccaacccctgggcagctcttgtgaccggtgccctggctggtacatgtttcagttccaccggatcctgcagtacgccctgccgagacaggagtcccagcggccattcttttggattttcatggacaacttgctgctgaccgaggatgaccaggaaactaccactcggttcctgcagaccgaagccgtgaccctgcaggacgtgagaggccgggactaccagaacgccatgcgggtgtggtccaacatccctggactgaaaagcaagcacgcacctctgacccctaaagaagaggagtacctgcaggcccaggtgcggagcagaagcaagctggacgcccctaaggtggatctgctggtgaagaattgcctcctgcccctgagagagtacttcaagtatttcagccagaatagtctgcccctgggaggcagcggcggcggcgccagggccagcctgagcttcgaggacgtggccgtgggcttcagctgggaggagtggcagctgctggcccccagccagaaggacctgtacagggacgtgatgctggagaactacaggaacctggtgagcgtgggctaccaggccagcaagctggacagcctgttccagagcgagcagggcggccccccctggaccgtggagggcgccgcccagagccagacctgccccgaggagatctgggagggcggcccaagcagcggcgcccctcctcccagcggcggcagcccagccggctccccaacctctaccgaggagggcacctctgagtccgccacccccgagagcggccctggcacctccaccgagcccagcgagggcagcgcacccggcagccctgccggcagccccacctccacagaggagggaaccagcaccgagcccagcgaaggcagcgccccaggcaccagcaccgagcctagtgagcaggagattaaacggatcaacaagatcagaagaagacttgtgaaagacagcaacaccaagaaggccggcaagacaggccccatgaaaaccctgctggttagagtgatgacacccgatctgagagagcggctggaaaacctgagaaagaagcctgaaaatatcccccagcccatcagcaatacatctagagccaacctgaataagctgctgaccgattacaccgaaatgaagaaggcgatcctgcatgtgtactgggaagagttccagaaggaccctgtgggcctgatgagccgggtggcccagcctgccagcaagaagatcgatcagaacaagctgaaacctgagatggacgagaagggcaacctgaccaccgccggctttgcctgctctcagtgtggccagcccctgttcgtgtacaagctggagcaggtgtctgagaagggcaaggcttacaccaactacttcggacggtgcaatgtggccgagcacgaaaagctgatcctgctggcccagctgaagcccgagaaggatagcgacgaagccgtgacatatagcctgggaaagtttgggcagagggccctggatttctacagcattcatgtgaccaaggagtccacccaccccgtgaagcccctggcccagatcgccggaaacagatacgcctccggacctgtgggaaaggccctgagcgacgcatgtatgggcacaatcgcctccttcctgtctaagtaccaggacatcatcatcgaacaccagaaggtggtgaagggcaaccagaagagactggagagcctgcgggagctggccggcaaggaaaacctggaataccctagcgtgaccctgccacctcagcctcacaccaaggagggcgttgatgcctacaacgaagtgatcgcccgggtgcgaatgtgggtgaacctgaacctgtggcagaagctgaagctaagcagagatgatgccaagcctctgctgagactgaagggattcccttcctttcctctggtcgagagacaggccaacgaagtggactggtgggacatggtgtgtaacgtgaagaagctgatcaacgagaaaaaggaggatggcaaggtgttttggcagaatctggctggctacaagagacaggaagccctgagaccatacctgagcagcgaggaagatcggaagaagggaaagaaattcgctcggtaccagctgggcgacctgctgctgcacctggaaaagaagcacggcgaggactggggaaaggtgtacgacgaggcctgggagcggattgacaagaaagtggaaggcctgagcaagcacatcaagctggaagaggaacggagaagcgaggacgcccagagcaaggccgccctgaccgactggctgcgggctaaggccagcttcgtgatcgagggcctgaaggaggccgacaaggacgagttctgcagatgcgagctgaagctgcagaagtggtacggggacctgcggggaaagcccttcgccatcgaagccgagaacagcatcctggacatcagcggcttcagcaagcagtacaactgtgccttcatctggcagaaggacggcgtgaagaagctgaacctgtacctgatcatcaactacttcaagggcggcaagctgcggttcaagaagatcaaacctgaagccttcgaagccaacagattctacaccgtgatcaacaaaaagagcggcgagatcgtgcccatggaggtgaacttcaacttcgacgaccccaacctgatcatcctgcctctggcctttggcaagagacagggcagagaattcatctggaacgacctgctgtccctggaaaccggcagcctgaagctggccaacggaagagtgatcgagaagacactgtacaacagaagaacccggcaggatgagcctgccctgttcgtggccctgaccttcgagcggcgggaggtcctggactcctccaatatcaaaccaatgaacctgatcggcgtggcaagaggcgaaaacatccccgccgtgatcgccctgaccgaccccgagggctgcccactgagccggtttaaggatagcctgggaaacccaacccacatcctgagaatcggcgagagctataaggagaagcagcggaccatccaggccaagaaggaggtggagcagcggagagccggcggctacagccggaagtacgccagcaaagccaagaatctggcagacgatatggtgagaaacaccgctagagatctgctgtactacgccgtgacccaggatgccatgctgatcttcgccaacctgagccggggcttcggccggcagggcaagcggaccttcatggccgagagacagtacacacggatggaggactggctgaccgccaagctggcctacgagggcctgagcaagacctacctgtccaagacactggcccagtacacctccaagacatgcagcaactgtgggtttaccatcaccagcgccgactacgacagggtgctggagaagctgaagaagacagcaacaggctggatgaccacaattaacggcaaggagctgaaggtggagggccagattacctactacaacagatacaagagacagaacgtagtcaaggacctgtccgtcgagctggatagactgagcgaagaatctgtgaacaacgacatctcctcctggacaaagggcagaagcggagaagctctgagcctcctgaagaaaagattctcccatagacccgtgcaggagaagttcgtgtgcctgaactgcggcttcgagacacacgcagccgagcaagccgccctgaacatcgccagatcctggctgttcctgcggagccaggagtacaagaaataccagacaaacaagacaaccggcaacaccgataagagagccttcgtcgagacctggcagtccttttaccggaagaagcttaaggaggtgtggaaacctgccgtgcggtctggcggatctggcggaggctccaccagccccaagaaaaagagaaaagtctaagctgccttctgcggggcttgccttctggccatgcccttcttctctcccttgcacctgtacctcttggtctttgaataaagcctgagtaggaaggctagcaaaaaaaaaaaaaaaaaaaaaaaaaaaaaaaaaaaaaaaaaaaaaaaaaaaaaaaaaaaaaaaaaaaaaaaaaaaaaaaa

SEQ ID NO: 13329 - RNA, 5782 nt, synthetic construct
  source 1..5782: mol_type = other RNA
aggaaataagagagaaaagaagagtaagaagaaatataagagccaccatggcccctaagaagaagcgtaaagtgagccggatggaacgcctcgtctacgaggtgcggcagaagtgcagaaacatcgaggacatctgcatctcctgcggatctctgaacgtgaccctggagcacccactgttcatcggcggcatgtgccagaactgtaaaaactgttttctggagtgtgcctatcaatacgacgatgacggctaccagagctactgcaccatctgttgcggcggaagagaggtgctgatgtgtggaaataacaactgctgccggtgcttctgcgtggaatgcgtggacctgctggtgggccccggcgccgcccaggccgctattaaggaagatccttggaactgctacatgtgcggccacaagggcacatacggcctgctgagacggagagaggactggcctagcagactgcagatgttcttcgccaataaccacgaccaggagttcgacccccctaaggtgtaccctcccgtccccgccgagaagagaaagcccatccgggtcctgagcctgttcgatggcatcgccaccggtctgctggtgctgaaggacctgggcatccaggtggataggtacattgcctccgaggtgtgcgaggactccatcaccgtgggaatggtgcgtcatcagggcaagatcatgtacgtgggcgacgtgcggagcgtgacacagaagcatatccaggagtggggccctttcgacctggtgatcggcggcagcccttgcaatgacctgagcatcgtgaacccagcccggaagggcctgtacgagggaaccggcagactgttcttcgagttttacagactgctgcacgacgcccggcctaaggaaggcgacgaccggcccttcttttggctgttcgagaatgtggtggccatgggagtcagcgacaagcgggatattagccggttcctggagagcaaccccgtgatgatcgatgccaaggaagtgagcgccgcccaccgggccagatacttctggggcaatctgcctggcatgaacagacccctggccagcaccgtgaacgacaagctggagctgcaggagtgcctggagcacggccggatcgccaagttcagcaaggtgagaaccatcaccacccgaagcaacagcatcaaacaaggcaaggaccagcactttcctgtgttcatgaacgagaaggaggacatcctgtggtgtaccgagatggagagagtgttcgggttcccagtccactacacagatgtcagcaacatgtctagactggccagacagagactgctgggaagaagctggtccgtccctgtgatcagacacctgttcgcccctctgaaggagtacttcgcctgcgtgagcagcggcaacagcaacgccaacagccggggccccagcttctctagcggcctggtgccactgtccctgagagggagccacatgggccccatggagatctacaaaaccgtgagcgcctggaagcggcagcctgtgcgcgtgctgagcctgtttcggaatatcgataaagtcctgaaaagcctgggattcctggagagcggctctggctccggcggtggcaccctgaagtacgtggaggatgtgacaaacgtggtcagacgggatgtggagaagtggggccccttcgatctggtgtacggcagcacccaacccctgggcagctcttgtgaccggtgccctggctggtacatgtttcagttccaccggatcctgcagtacgccctgccgagacaggagtcccagcggccattcttttggattttcatggacaacttgctgctgaccgaggatgaccaggaaactaccactcggttcctgcagaccgaagccgtgaccctgcaggacgtgagaggccgggactaccagaacgccatgcgggtgtggtccaacatccctggactgaaaagcaagcacgcacctctgacccctaaagaagaggagtacctgcaggcccaggtgcggagcagaagcaagctggacgcccctaaggtggatctgctggtgaagaattgcctcctgcccctgagagagtacttcaagtatttcagccagaatagtctgcccctgggaggcagcggcggcggcacccagcccgacgaggacctgcacctgcaggccgaggagacccagctggtgaaggagagcgtgaccttcaaggacgtggccatcgacttcaccctggaggagtggagactgatggaccccacccagagaaacctgcacaaggacgtgatgctggagaactacagaaacctggtgagcctgggcctggccgtgagcaagcccgacatgatcagccacctggagaacggcaagggcccctggggcggcccaagcagcggcgcccctcctcccagcggcggcagcccagccggctccccaacctctaccgaggagggcacctctgagtccgccacccccgagagcggccctggcacctccaccgagcccagcgagggcagcgcacccggcagccctgccggcagccccacctccacagaggagggaaccagcaccgagcccagcgaaggcagcgccccaggcaccagcaccgagcctagtgagcaggagattaaacggatcaacaagatcagaagaagacttgtgaaagacagcaacaccaagaaggccggcaagacaggccccatgaaaaccctgctggttagagtgatgacacccgatctgagagagcggctggaaaacctgagaaagaagcctgaaaatatcccccagcccatcagcaatacatctagagccaacctgaataagctgctgaccgattacaccgaaatgaagaaggcgatcctgcatgtgtactgggaagagttccagaaggaccctgtgggcctgatgagccgggtggcccagcctgccagcaagaagatcgatcagaacaagctgaaacctgagatggacgagaagggcaacctgaccaccgccggctttgcctgctctcagtgtggccagcccctgttcgtgtacaagctggagcaggtgtctgagaagggcaaggcttacaccaactacttcggacggtgcaatgtggccgagcacgaaaagctgatcctgctggcccagctgaagcccgagaaggatagcgacgaagccgtgacatatagcctgggaaagtttgggcagagggccctggatttctacagcattcatgtgaccaaggagtccacccaccccgtgaagcccctggcccagatcgccggaaacagatacgcctccggacctgtgggaaaggccctgagcgacgcatgtatgggcacaatcgcctccttcctgtctaagtaccaggacatcatcatcgaacaccagaaggtggtgaagggcaaccagaagagactggagagcctgcgggagctggccggcaaggaaaacctggaataccctagcgtgaccctgccacctcagcctcacaccaaggagggcgttgatgcctacaacgaagtgatcgcccgggtgcgaatgtgggtgaacctgaacctgtggcagaagctgaagctaagcagagatgatgccaagcctctgctgagactgaagggattcccttcctttcctctggtcgagagacaggccaacgaagtggactggtgggacatggtgtgtaacgtgaagaagctgatcaacgagaaaaaggaggatggcaaggtgttttggcagaatctggctggctacaagagacaggaagccctgagaccatacctgagcagcgaggaagatcggaagaagggaaagaaattcgctcggtaccagctgggcgacctgctgctgcacctggaaaagaagcacggcgaggactggggaaaggtgtacgacgaggcctgggagcggattgacaagaaagtggaaggcctgagcaagcacatcaagctggaagaggaacggagaagcgaggacgcccagagcaaggccgccctgaccgactggctgcgggctaaggccagcttcgtgatcgagggcctgaaggaggccgacaaggacgagttctgcagatgcgagctgaagctgcagaagtggtacggggacctgcggggaaagcccttcgccatcgaagccgagaacagcatcctggacatcagcggcttcagcaagcagtacaactgtgccttcatctggcagaaggacggcgtgaagaagctgaacctgtacctgatcatcaactacttcaagggcggcaagctgcggttcaagaagatcaaacctgaagccttcgaagccaacagattctacaccgtgatcaacaaaaagagcggcgagatcgtgcccatggaggtgaacttcaacttcgacgaccccaacctgatcatcctgcctctggcctttggcaagagacagggcagagaattcatctggaacgacctgctgtccctggaaaccggcagcctgaagctggccaacggaagagtgatcgagaagacactgtacaacagaagaacccggcaggatgagcctgccctgttcgtggccctgaccttcgagcggcgggaggtcctggactcctccaatatcaaaccaatgaacctgatcggcgtggcaagaggcgaaaacatccccgccgtgatcgccctgaccgaccccgagggctgcccactgagccggtttaaggatagcctgggaaacccaacccacatcctgagaatcggcgagagctataaggagaagcagcggaccatccaggccaagaaggaggtggagcagcggagagccggcggctacagccggaagtacgccagcaaagccaagaatctggcagacgatatggtgagaaacaccgctagagatctgctgtactacgccgtgacccaggatgccatgctgatcttcgccaacctgagccggggcttcggccggcagggcaagcggaccttcatggccgagagacagtacacacggatggaggactggctgaccgccaagctggcctacgagggcctgagcaagacctacctgtccaagacactggcccagtacacctccaagacatgcagcaactgtgggtttaccatcaccagcgccgactacgacagggtgctggagaagctgaagaagacagcaacaggctggatgaccacaattaacggcaaggagctgaaggtggagggccagattacctactacaacagatacaagagacagaacgtagtcaaggacctgtccgtcgagctggatagactgagcgaagaatctgtgaacaacgacatctcctcctggacaaagggcagaagcggagaagctctgagcctcctgaagaaaagattctcccatagacccgtgcaggagaagttcgtgtgcctgaactgcggcttcgagacacacgcagccgagcaagccgccctgaacatcgccagatcctggctgttcctgcggagccaggagtacaagaaataccagacaaacaagacaaccggcaacaccgataagagagccttcgtcgagacctggcagtccttttaccggaagaagcttaaggaggtgtggaaacctgccgtgcggtctggcggatctggcggaggctccaccagccccaagaaaaagagaaaagtctaagctgccttctgcggggcttgccttctggccatgcccttcttctctcccttgcacctgtacctcttggtctttgaataaagcctgagtaggaaggctagcaaaaaaaaaaaaaaaaaaaaaaaaaaaaaaaaaaaaaaaaaaaaaaaaaaaaaaaaaaaaaaaaaaaaaaaaaaaaaaaa

SEQ ID NO: 13330 - RNA, 5785 nt, synthetic construct
  source 1..5785: mol_type = other RNA
aggaaataagagagaaaagaagagtaagaagaaatataagagccaccatggcccctaagaagaagcgtaaagtgagccggatggaacgcctcgtctacgaggtgcggcagaagtgcagaaacatcgaggacatctgcatctcctgcggatctctgaacgtgaccctggagcacccactgttcatcggcggcatgtgccagaactgtaaaaactgttttctggagtgtgcctatcaatacgacgatgacggctaccagagctactgcaccatctgttgcggcggaagagaggtgctgatgtgtggaaataacaactgctgccggtgcttctgcgtggaatgcgtggacctgctggtgggccccggcgccgcccaggccgctattaaggaagatccttggaactgctacatgtgcggccacaagggcacatacggcctgctgagacggagagaggactggcctagcagactgcagatgttcttcgccaataaccacgaccaggagttcgacccccctaaggtgtaccctcccgtccccgccgagaagagaaagcccatccgggtcctgagcctgttcgatggcatcgccaccggtctgctggtgctgaaggacctgggcatccaggtggataggtacattgcctccgaggtgtgcgaggactccatcaccgtgggaatggtgcgtcatcagggcaagatcatgtacgtgggcgacgtgcggagcgtgacacagaagcatatccaggagtggggccctttcgacctggtgatcggcggcagcccttgcaatgacctgagcatcgtgaacccagcccggaagggcctgtacgagggaaccggcagactgttcttcgagttttacagactgctgcacgacgcccggcctaaggaaggcgacgaccggcccttcttttggctgttcgagaatgtggtggccatgggagtcagcgacaagcgggatattagccggttcctggagagcaaccccgtgatgatcgatgccaaggaagtgagcgccgcccaccgggccagatacttctggggcaatctgcctggcatgaacagacccctggccagcaccgtgaacgacaagctggagctgcaggagtgcctggagcacggccggatcgccaagttcagcaaggtgagaaccatcaccacccgaagcaacagcatcaaacaaggcaaggaccagcactttcctgtgttcatgaacgagaaggaggacatcctgtggtgtaccgagatggagagagtgttcgggttcccagtccactacacagatgtcagcaacatgtctagactggccagacagagactgctgggaagaagctggtccgtccctgtgatcagacacctgttcgcccctctgaaggagtacttcgcctgcgtgagcagcggcaacagcaacgccaacagccggggccccagcttctctagcggcctggtgccactgtccctgagagggagccacatgggccccatggagatctacaaaaccgtgagcgcctggaagcggcagcctgtgcgcgtgctgagcctgtttcggaatatcgataaagtcctgaaaagcctgggattcctggagagcggctctggctccggcggtggcaccctgaagtacgtggaggatgtgacaaacgtggtcagacgggatgtggagaagtggggccccttcgatctggtgtacggcagcacccaacccctgggcagctcttgtgaccggtgccctggctggtacatgtttcagttccaccggatcctgcagtacgccctgccgagacaggagtcccagcggccattcttttggattttcatggacaacttgctgctgaccgaggatgaccaggaaactaccactcggttcctgcagaccgaagccgtgaccctgcaggacgtgagaggccgggactaccagaacgccatgcgggtgtggtccaacatccctggactgaaaagcaagcacgcacctctgacccctaaagaagaggagtacctgcaggcccaggtgcggagcagaagcaagctggacgcccctaaggtggatctgctggtgaagaattgcctcctgcccctgagagagtacttcaagtatttcagccagaatagtctgcccctgggaggcagcggcggcggcagctacaggagcaagaccatggcccagggcagcctgaccttcagcgacgtggccatcggcttcagccagcaggagtgggagtgcctggaccccgtgcagaagaccctgtacagggacgtgatgatggagaactacggcaacctggtgagcctgggccacagcatcagcaagcccaacgtgatcaccctgctggagcagggcaaggagccctggatcgtggtgagggaggagaccaggagctggggcggcccaagcagcggcgcccctcctcccagcggcggcagcccagccggctccccaacctctaccgaggagggcacctctgagtccgccacccccgagagcggccctggcacctccaccgagcccagcgagggcagcgcacccggcagccctgccggcagccccacctccacagaggagggaaccagcaccgagcccagcgaaggcagcgccccaggcaccagcaccgagcctagtgagcaggagattaaacggatcaacaagatcagaagaagacttgtgaaagacagcaacaccaagaaggccggcaagacaggccccatgaaaaccctgctggttagagtgatgacacccgatctgagagagcggctggaaaacctgagaaagaagcctgaaaatatcccccagcccatcagcaatacatctagagccaacctgaataagctgctgaccgattacaccgaaatgaagaaggcgatcctgcatgtgtactgggaagagttccagaaggaccctgtgggcctgatgagccgggtggcccagcctgccagcaagaagatcgatcagaacaagctgaaacctgagatggacgagaagggcaacctgaccaccgccggctttgcctgctctcagtgtggccagcccctgttcgtgtacaagctggagcaggtgtctgagaagggcaaggcttacaccaactacttcggacggtgcaatgtggccgagcacgaaaagctgatcctgctggcccagctgaagcccgagaaggatagcgacgaagccgtgacatatagcctgggaaagtttgggcagagggccctggatttctacagcattcatgtgaccaaggagtccacccaccccgtgaagcccctggcccagatcgccggaaacagatacgcctccggacctgtgggaaaggccctgagcgacgcatgtatgggcacaatcgcctccttcctgtctaagtaccaggacatcatcatcgaacaccagaaggtggtgaagggcaaccagaagagactggagagcctgcgggagctggccggcaaggaaaacctggaataccctagcgtgaccctgccacctcagcctcacaccaaggagggcgttgatgcctacaacgaagtgatcgcccgggtgcgaatgtgggtgaacctgaacctgtggcagaagctgaagctaagcagagatgatgccaagcctctgctgagactgaagggattcccttcctttcctctggtcgagagacaggccaacgaagtggactggtgggacatggtgtgtaacgtgaagaagctgatcaacgagaaaaaggaggatggcaaggtgttttggcagaatctggctggctacaagagacaggaagccctgagaccatacctgagcagcgaggaagatcggaagaagggaaagaaattcgctcggtaccagctgggcgacctgctgctgcacctggaaaagaagcacggcgaggactggggaaaggtgtacgacgaggcctgggagcggattgacaagaaagtggaaggcctgagcaagcacatcaagctggaagaggaacggagaagcgaggacgcccagagcaaggccgccctgaccgactggctgcgggctaaggccagcttcgtgatcgagggcctgaaggaggccgacaaggacgagttctgcagatgcgagctgaagctgcagaagtggtacggggacctgcggggaaagcccttcgccatcgaagccgagaacagcatcctggacatcagcggcttcagcaagcagtacaactgtgccttcatctggcagaaggacggcgtgaagaagctgaacctgtacctgatcatcaactacttcaagggcggcaagctgcggttcaagaagatcaaacctgaagccttcgaagccaacagattctacaccgtgatcaacaaaaagagcggcgagatcgtgcccatggaggtgaacttcaacttcgacgaccccaacctgatcatcctgcctctggcctttggcaagagacagggcagagaattcatctggaacgacctgctgtccctggaaaccggcagcctgaagctggccaacggaagagtgatcgagaagacactgtacaacagaagaacccggcaggatgagcctgccctgttcgtggccctgaccttcgagcggcgggaggtcctggactcctccaatatcaaaccaatgaacctgatcggcgtggcaagaggcgaaaacatccccgccgtgatcgccctgaccgaccccgagggctgcccactgagccggtttaaggatagcctgggaaacccaacccacatcctgagaatcggcgagagctataaggagaagcagcggaccatccaggccaagaaggaggtggagcagcggagagccggcggctacagccggaagtacgccagcaaagccaagaatctggcagacgatatggtgagaaacaccgctagagatctgctgtactacgccgtgacccaggatgccatgctgatcttcgccaacctgagccggggcttcggccggcagggcaagcggaccttcatggccgagagacagtacacacggatggaggactggctgaccgccaagctggcctacgagggcctgagcaagacctacctgtccaagacactggcccagtacacctccaagacatgcagcaactgtgggtttaccatcaccagcgccgactacgacagggtgctggagaagctgaagaagacagcaacaggctggatgaccacaattaacggcaaggagctgaaggtggagggccagattacctactacaacagatacaagagacagaacgtagtcaaggacctgtccgtcgagctggatagactgagcgaagaatctgtgaacaacgacatctcctcctggacaaagggcagaagcggagaagctctgagcctcctgaagaaaagattctcccatagacccgtgcaggagaagttcgtgtgcctgaactgcggcttcgagacacacgcagccgagcaagccgccctgaacatcgccagatcctggctgttcctgcggagccaggagtacaagaaataccagacaaacaagacaaccggcaacaccgataagagagccttcgtcgagacctggcagtccttttaccggaagaagcttaaggaggtgtggaaacctgccgtgcggtctggcggatctggcggaggctccaccagccccaagaaaaagagaaaagtctaagctgccttctgcggggcttgccttctggccatgcccttcttctctcccttgcacctgtacctcttggtctttgaataaagcctgagtaggaaggctagcaaaaaaaaaaaaaaaaaaaaaaaaaaaaaaaaaaaaaaaaaaaaaaaaaaaaaaaaaaaaaaaaaaaaaaaaaaaaaaaa

SEQ ID NO: 13331 - RNA, 5785 nt, synthetic construct
  source 1..5785: mol_type = other RNA
aggaaataagagagaaaagaagagtaagaagaaatataagagccaccatggcccctaagaagaagcgtaaagtgagccggatggaacgcctcgtctacgaggtgcggcagaagtgcagaaacatcgaggacatctgcatctcctgcggatctctgaacgtgaccctggagcacccactgttcatcggcggcatgtgccagaactgtaaaaactgttttctggagtgtgcctatcaatacgacgatgacggctaccagagctactgcaccatctgttgcggcggaagagaggtgctgatgtgtggaaataacaactgctgccggtgcttctgcgtggaatgcgtggacctgctggtgggccccggcgccgcccaggccgctattaaggaagatccttggaactgctacatgtgcggccacaagggcacatacggcctgctgagacggagagaggactggcctagcagactgcagatgttcttcgccaataaccacgaccaggagttcgacccccctaaggtgtaccctcccgtccccgccgagaagagaaagcccatccgggtcctgagcctgttcgatggcatcgccaccggtctgctggtgctgaaggacctgggcatccaggtggataggtacattgcctccgaggtgtgcgaggactccatcaccgtgggaatggtgcgtcatcagggcaagatcatgtacgtgggcgacgtgcggagcgtgacacagaagcatatccaggagtggggccctttcgacctggtgatcggcggcagcccttgcaatgacctgagcatcgtgaacccagcccggaagggcctgtacgagggaaccggcagactgttcttcgagttttacagactgctgcacgacgcccggcctaaggaaggcgacgaccggcccttcttttggctgttcgagaatgtggtggccatgggagtcagcgacaagcgggatattagccggttcctggagagcaaccccgtgatgatcgatgccaaggaagtgagcgccgcccaccgggccagatacttctggggcaatctgcctggcatgaacagacccctggccagcaccgtgaacgacaagctggagctgcaggagtgcctggagcacggccggatcgccaagttcagcaaggtgagaaccatcaccacccgaagcaacagcatcaaacaaggcaaggaccagcactttcctgtgttcatgaacgagaaggaggacatcctgtggtgtaccgagatggagagagtgttcgggttcccagtccactacacagatgtcagcaacatgtctagactggccagacagagactgctgggaagaagctggtccgtccctgtgatcagacacctgttcgcccctctgaaggagtacttcgcctgcgtgagcagcggcaacagcaacgccaacagccggggccccagcttctctagcggcctggtgccactgtccctgagagggagccacatgggccccatggagatctacaaaaccgtgagcgcctggaagcggcagcctgtgcgcgtgctgagcctgtttcggaatatcgataaagtcctgaaaagcctgggattcctggagagcggctctggctccggcggtggcaccctgaagtacgtggaggatgtgacaaacgtggtcagacgggatgtggagaagtggggccccttcgatctggtgtacggcagcacccaacccctgggcagctcttgtgaccggtgccctggctggtacatgtttcagttccaccggatcctgcagtacgccctgccgagacaggagtcccagcggccattcttttggattttcatggacaacttgctgctgaccgaggatgaccaggaaactaccactcggttcctgcagaccgaagccgtgaccctgcaggacgtgagaggccgggactaccagaacgccatgcgggtgtggtccaacatccctggactgaaaagcaagcacgcacctctgacccctaaagaagaggagtacctgcaggcccaggtgcggagcagaagcaagctggacgcccctaaggtggatctgctggtgaagaattgcctcctgcccctgagagagtacttcaagtatttcagccagaatagtctgcccctgggaggcagcggcggcggcgaggaggtgcccgtggtgttcgaggacgtggccgtgtacttcaccagggaggagtggggcaccctggacaagaggcagaaggagctgtacagggacgtgatgaggatgaactacgagctgctggccagcctgggccccgccgccgccaagcccgccctgatcagcaagctggagaggagggccgccccctggatccaggaccccaacggccccaagtggggcaagggcaggccccccggcaagggcggcccaagcagcggcgcccctcctcccagcggcggcagcccagccggctccccaacctctaccgaggagggcacctctgagtccgccacccccgagagcggccctggcacctccaccgagcccagcgagggcagcgcacccggcagccctgccggcagccccacctccacagaggagggaaccagcaccgagcccagcgaaggcagcgccccaggcaccagcaccgagcctagtgagcaggagattaaacggatcaacaagatcagaagaagacttgtgaaagacagcaacaccaagaaggccggcaagacaggccccatgaaaaccctgctggttagagtgatgacacccgatctgagagagcggctggaaaacctgagaaagaagcctgaaaatatcccccagcccatcagcaatacatctagagccaacctgaataagctgctgaccgattacaccgaaatgaagaaggcgatcctgcatgtgtactgggaagagttccagaaggaccctgtgggcctgatgagccgggtggcccagcctgccagcaagaagatcgatcagaacaagctgaaacctgagatggacgagaagggcaacctgaccaccgccggctttgcctgctctcagtgtggccagcccctgttcgtgtacaagctggagcaggtgtctgagaagggcaaggcttacaccaactacttcggacggtgcaatgtggccgagcacgaaaagctgatcctgctggcccagctgaagcccgagaaggatagcgacgaagccgtgacatatagcctgggaaagtttgggcagagggccctggatttctacagcattcatgtgaccaaggagtccacccaccccgtgaagcccctggcccagatcgccggaaacagatacgcctccggacctgtgggaaaggccctgagcgacgcatgtatgggcacaatcgcctccttcctgtctaagtaccaggacatcatcatcgaacaccagaaggtggtgaagggcaaccagaagagactggagagcctgcgggagctggccggcaaggaaaacctggaataccctagcgtgaccctgccacctcagcctcacaccaaggagggcgttgatgcctacaacgaagtgatcgcccgggtgcgaatgtgggtgaacctgaacctgtggcagaagctgaagctaagcagagatgatgccaagcctctgctgagactgaagggattcccttcctttcctctggtcgagagacaggccaacgaagtggactggtgggacatggtgtgtaacgtgaagaagctgatcaacgagaaaaaggaggatggcaaggtgttttggcagaatctggctggctacaagagacaggaagccctgagaccatacctgagcagcgaggaagatcggaagaagggaaagaaattcgctcggtaccagctgggcgacctgctgctgcacctggaaaagaagcacggcgaggactggggaaaggtgtacgacgaggcctgggagcggattgacaagaaagtggaaggcctgagcaagcacatcaagctggaagaggaacggagaagcgaggacgcccagagcaaggccgccctgaccgactggctgcgggctaaggccagcttcgtgatcgagggcctgaaggaggccgacaaggacgagttctgcagatgcgagctgaagctgcagaagtggtacggggacctgcggggaaagcccttcgccatcgaagccgagaacagcatcctggacatcagcggcttcagcaagcagtacaactgtgccttcatctggcagaaggacggcgtgaagaagctgaacctgtacctgatcatcaactacttcaagggcggcaagctgcggttcaagaagatcaaacctgaagccttcgaagccaacagattctacaccgtgatcaacaaaaagagcggcgagatcgtgcccatggaggtgaacttcaacttcgacgaccccaacctgatcatcctgcctctggcctttggcaagagacagggcagagaattcatctggaacgacctgctgtccctggaaaccggcagcctgaagctggccaacggaagagtgatcgagaagacactgtacaacagaagaacccggcaggatgagcctgccctgttcgtggccctgaccttcgagcggcgggaggtcctggactcctccaatatcaaaccaatgaacctgatcggcgtggcaagaggcgaaaacatccccgccgtgatcgccctgaccgaccccgagggctgcccactgagccggtttaaggatagcctgggaaacccaacccacatcctgagaatcggcgagagctataaggagaagcagcggaccatccaggccaagaaggaggtggagcagcggagagccggcggctacagccggaagtacgccagcaaagccaagaatctggcagacgatatggtgagaaacaccgctagagatctgctgtactacgccgtgacccaggatgccatgctgatcttcgccaacctgagccggggcttcggccggcagggcaagcggaccttcatggccgagagacagtacacacggatggaggactggctgaccgccaagctggcctacgagggcctgagcaagacctacctgtccaagacactggcccagtacacctccaagacatgcagcaactgtgggtttaccatcaccagcgccgactacgacagggtgctggagaagctgaagaagacagcaacaggctggatgaccacaattaacggcaaggagctgaaggtggagggccagattacctactacaacagatacaagagacagaacgtagtcaaggacctgtccgtcgagctggatagactgagcgaagaatctgtgaacaacgacatctcctcctggacaaagggcagaagcggagaagctctgagcctcctgaagaaaagattctcccatagacccgtgcaggagaagttcgtgtgcctgaactgcggcttcgagacacacgcagccgagcaagccgccctgaacatcgccagatcctggctgttcctgcggagccaggagtacaagaaataccagacaaacaagacaaccggcaacaccgataagagagccttcgtcgagacctggcagtccttttaccggaagaagcttaaggaggtgtggaaacctgccgtgcggtctggcggatctggcggaggctccaccagccccaagaaaaagagaaaagtctaagctgccttctgcggggcttgccttctggccatgcccttcttctctcccttgcacctgtacctcttggtctttgaataaagcctgagtaggaaggctagcaaaaaaaaaaaaaaaaaaaaaaaaaaaaaaaaaaaaaaaaaaaaaaaaaaaaaaaaaaaaaaaaaaaaaaaaaaaaaaaa

SEQ ID NO: 13332 - RNA, 5785 nt, synthetic construct
  source 1..5785: mol_type = other RNA
aggaaataagagagaaaagaagagtaagaagaaatataagagccaccatggcccctaagaagaagcgtaaagtgagccggatggaacgcctcgtctacgaggtgcggcagaagtgcagaaacatcgaggacatctgcatctcctgcggatctctgaacgtgaccctggagcacccactgttcatcggcggcatgtgccagaactgtaaaaactgttttctggagtgtgcctatcaatacgacgatgacggctaccagagctactgcaccatctgttgcggcggaagagaggtgctgatgtgtggaaataacaactgctgccggtgcttctgcgtggaatgcgtggacctgctggtgggccccggcgccgcccaggccgctattaaggaagatccttggaactgctacatgtgcggccacaagggcacatacggcctgctgagacggagagaggactggcctagcagactgcagatgttcttcgccaataaccacgaccaggagttcgacccccctaaggtgtaccctcccgtccccgccgagaagagaaagcccatccgggtcctgagcctgttcgatggcatcgccaccggtctgctggtgctgaaggacctgggcatccaggtggataggtacattgcctccgaggtgtgcgaggactccatcaccgtgggaatggtgcgtcatcagggcaagatcatgtacgtgggcgacgtgcggagcgtgacacagaagcatatccaggagtggggccctttcgacctggtgatcggcggcagcccttgcaatgacctgagcatcgtgaacccagcccggaagggcctgtacgagggaaccggcagactgttcttcgagttttacagactgctgcacgacgcccggcctaaggaaggcgacgaccggcccttcttttggctgttcgagaatgtggtggccatgggagtcagcgacaagcgggatattagccggttcctggagagcaaccccgtgatgatcgatgccaaggaagtgagcgccgcccaccgggccagatacttctggggcaatctgcctggcatgaacagacccctggccagcaccgtgaacgacaagctggagctgcaggagtgcctggagcacggccggatcgccaagttcagcaaggtgagaaccatcaccacccgaagcaacagcatcaaacaaggcaaggaccagcactttcctgtgttcatgaacgagaaggaggacatcctgtggtgtaccgagatggagagagtgttcgggttcccagtccactacacagatgtcagcaacatgtctagactggccagacagagactgctgggaagaagctggtccgtccctgtgatcagacacctgttcgcccctctgaaggagtacttcgcctgcgtgagcagcggcaacagcaacgccaacagccggggccccagcttctctagcggcctggtgccactgtccctgagagggagccacatgggccccatggagatctacaaaaccgtgagcgcctggaagcggcagcctgtgcgcgtgctgagcctgtttcggaatatcgataaagtcctgaaaagcctgggattcctggagagcggctctggctccggcggtggcaccctgaagtacgtggaggatgtgacaaacgtggtcagacgggatgtggagaagtggggccccttcgatctggtgtacggcagcacccaacccctgggcagctcttgtgaccggtgccctggctggtacatgtttcagttccaccggatcctgcagtacgccctgccgagacaggagtcccagcggccattcttttggattttcatggacaacttgctgctgaccgaggatgaccaggaaactaccactcggttcctgcagaccgaagccgtgaccctgcaggacgtgagaggccgggactaccagaacgccatgcgggtgtggtccaacatccctggactgaaaagcaagcacgcacctctgacccctaaagaagaggagtacctgcaggcccaggtgcggagcagaagcaagctggacgcccctaaggtggatctgctggtgaagaattgcctcctgcccctgagagagtacttcaagtatttcagccagaatagtctgcccctgggaggcagcggcggcggcatgatcgagagccagatcagcttcgaggacgtggccgtggacttcaccctggaggagtggcagctgctgaaccccacccagaagaacctgtacagggacgtgatgctggagaactacagcaacctggccttcctgggctaccagatcatcaagcccgacgccgtgttccagctggagcaggaggagcagtggatcaccgacgaggagatcctgaaccacagctgccccgaggaggtgtggctgggcggcccaagcagcggcgcccctcctcccagcggcggcagcccagccggctccccaacctctaccgaggagggcacctctgagtccgccacccccgagagcggccctggcacctccaccgagcccagcgagggcagcgcacccggcagccctgccggcagccccacctccacagaggagggaaccagcaccgagcccagcgaaggcagcgccccaggcaccagcaccgagcctagtgagcaggagattaaacggatcaacaagatcagaagaagacttgtgaaagacagcaacaccaagaaggccggcaagacaggccccatgaaaaccctgctggttagagtgatgacacccgatctgagagagcggctggaaaacctgagaaagaagcctgaaaatatcccccagcccatcagcaatacatctagagccaacctgaataagctgctgaccgattacaccgaaatgaagaaggcgatcctgcatgtgtactgggaagagttccagaaggaccctgtgggcctgatgagccgggtggcccagcctgccagcaagaagatcgatcagaacaagctgaaacctgagatggacgagaagggcaacctgaccaccgccggctttgcctgctctcagtgtggccagcccctgttcgtgtacaagctggagcaggtgtctgagaagggcaaggcttacaccaactacttcggacggtgcaatgtggccgagcacgaaaagctgatcctgctggcccagctgaagcccgagaaggatagcgacgaagccgtgacatatagcctgggaaagtttgggcagagggccctggatttctacagcattcatgtgaccaaggagtccacccaccccgtgaagcccctggcccagatcgccggaaacagatacgcctccggacctgtgggaaaggccctgagcgacgcatgtatgggcacaatcgcctccttcctgtctaagtaccaggacatcatcatcgaacaccagaaggtggtgaagggcaaccagaagagactggagagcctgcgggagctggccggcaaggaaaacctggaataccctagcgtgaccctgccacctcagcctcacaccaaggagggcgttgatgcctacaacgaagtgatcgcccgggtgcgaatgtgggtgaacctgaacctgtggcagaagctgaagctaagcagagatgatgccaagcctctgctgagactgaagggattcccttcctttcctctggtcgagagacaggccaacgaagtggactggtgggacatggtgtgtaacgtgaagaagctgatcaacgagaaaaaggaggatggcaaggtgttttggcagaatctggctggctacaagagacaggaagccctgagaccatacctgagcagcgaggaagatcggaagaagggaaagaaattcgctcggtaccagctgggcgacctgctgctgcacctggaaaagaagcacggcgaggactggggaaaggtgtacgacgaggcctgggagcggattgacaagaaagtggaaggcctgagcaagcacatcaagctggaagaggaacggagaagcgaggacgcccagagcaaggccgccctgaccgactggctgcgggctaaggccagcttcgtgatcgagggcctgaaggaggccgacaaggacgagttctgcagatgcgagctgaagctgcagaagtggtacggggacctgcggggaaagcccttcgccatcgaagccgagaacagcatcctggacatcagcggcttcagcaagcagtacaactgtgccttcatctggcagaaggacggcgtgaagaagctgaacctgtacctgatcatcaactacttcaagggcggcaagctgcggttcaagaagatcaaacctgaagccttcgaagccaacagattctacaccgtgatcaacaaaaagagcggcgagatcgtgcccatggaggtgaacttcaacttcgacgaccccaacctgatcatcctgcctctggcctttggcaagagacagggcagagaattcatctggaacgacctgctgtccctggaaaccggcagcctgaagctggccaacggaagagtgatcgagaagacactgtacaacagaagaacccggcaggatgagcctgccctgttcgtggccctgaccttcgagcggcgggaggtcctggactcctccaatatcaaaccaatgaacctgatcggcgtggcaagaggcgaaaacatccccgccgtgatcgccctgaccgaccccgagggctgcccactgagccggtttaaggatagcctgggaaacccaacccacatcctgagaatcggcgagagctataaggagaagcagcggaccatccaggccaagaaggaggtggagcagcggagagccggcggctacagccggaagtacgccagcaaagccaagaatctggcagacgatatggtgagaaacaccgctagagatctgctgtactacgccgtgacccaggatgccatgctgatcttcgccaacctgagccggggcttcggccggcagggcaagcggaccttcatggccgagagacagtacacacggatggaggactggctgaccgccaagctggcctacgagggcctgagcaagacctacctgtccaagacactggcccagtacacctccaagacatgcagcaactgtgggtttaccatcaccagcgccgactacgacagggtgctggagaagctgaagaagacagcaacaggctggatgaccacaattaacggcaaggagctgaaggtggagggccagattacctactacaacagatacaagagacagaacgtagtcaaggacctgtccgtcgagctggatagactgagcgaagaatctgtgaacaacgacatctcctcctggacaaagggcagaagcggagaagctctgagcctcctgaagaaaagattctcccatagacccgtgcaggagaagttcgtgtgcctgaactgcggcttcgagacacacgcagccgagcaagccgccctgaacatcgccagatcctggctgttcctgcggagccaggagtacaagaaataccagacaaacaagacaaccggcaacaccgataagagagccttcgtcgagacctggcagtccttttaccggaagaagcttaaggaggtgtggaaacctgccgtgcggtctggcggatctggcggaggctccaccagccccaagaaaaagagaaaagtctaagctgccttctgcggggcttgccttctggccatgcccttcttctctcccttgcacctgtacctcttggtctttgaataaagcctgagtaggaaggctagcaaaaaaaaaaaaaaaaaaaaaaaaaaaaaaaaaaaaaaaaaaaaaaaaaaaaaaaaaaaaaaaaaaaaaaaaaaaaaaaa

SEQ ID NO: 13333 - RNA, 5785 nt, synthetic construct
  source 1..5785: mol_type = other RNA
aggaaataagagagaaaagaagagtaagaagaaatataagagccaccatggcccctaagaagaagcgtaaagtgagccggatggaacgcctcgtctacgaggtgcggcagaagtgcagaaacatcgaggacatctgcatctcctgcggatctctgaacgtgaccctggagcacccactgttcatcggcggcatgtgccagaactgtaaaaactgttttctggagtgtgcctatcaatacgacgatgacggctaccagagctactgcaccatctgttgcggcggaagagaggtgctgatgtgtggaaataacaactgctgccggtgcttctgcgtggaatgcgtggacctgctggtgggccccggcgccgcccaggccgctattaaggaagatccttggaactgctacatgtgcggccacaagggcacatacggcctgctgagacggagagaggactggcctagcagactgcagatgttcttcgccaataaccacgaccaggagttcgacccccctaaggtgtaccctcccgtccccgccgagaagagaaagcccatccgggtcctgagcctgttcgatggcatcgccaccggtctgctggtgctgaaggacctgggcatccaggtggataggtacattgcctccgaggtgtgcgaggactccatcaccgtgggaatggtgcgtcatcagggcaagatcatgtacgtgggcgacgtgcggagcgtgacacagaagcatatccaggagtggggccctttcgacctggtgatcggcggcagcccttgcaatgacctgagcatcgtgaacccagcccggaagggcctgtacgagggaaccggcagactgttcttcgagttttacagactgctgcacgacgcccggcctaaggaaggcgacgaccggcccttcttttggctgttcgagaatgtggtggccatgggagtcagcgacaagcgggatattagccggttcctggagagcaaccccgtgatgatcgatgccaaggaagtgagcgccgcccaccgggccagatacttctggggcaatctgcctggcatgaacagacccctggccagcaccgtgaacgacaagctggagctgcaggagtgcctggagcacggccggatcgccaagttcagcaaggtgagaaccatcaccacccgaagcaacagcatcaaacaaggcaaggaccagcactttcctgtgttcatgaacgagaaggaggacatcctgtggtgtaccgagatggagagagtgttcgggttcccagtccactacacagatgtcagcaacatgtctagactggccagacagagactgctgggaagaagctggtccgtccctgtgatcagacacctgttcgcccctctgaaggagtacttcgcctgcgtgagcagcggcaacagcaacgccaacagccggggccccagcttctctagcggcctggtgccactgtccctgagagggagccacatgggccccatggagatctacaaaaccgtgagcgcctggaagcggcagcctgtgcgcgtgctgagcctgtttcggaatatcgataaagtcctgaaaagcctgggattcctggagagcggctctggctccggcggtggcaccctgaagtacgtggaggatgtgacaaacgtggtcagacgggatgtggagaagtggggccccttcgatctggtgtacggcagcacccaacccctgggcagctcttgtgaccggtgccctggctggtacatgtttcagttccaccggatcctgcagtacgccctgccgagacaggagtcccagcggccattcttttggattttcatggacaacttgctgctgaccgaggatgaccaggaaactaccactcggttcctgcagaccgaagccgtgaccctgcaggacgtgagaggccgggactaccagaacgccatgcgggtgtggtccaacatccctggactgaaaagcaagcacgcacctctgacccctaaagaagaggagtacctgcaggcccaggtgcggagcagaagcaagctggacgcccctaaggtggatctgctggtgaagaattgcctcctgcccctgagagagtacttcaagtatttcagccagaatagtctgcccctgggaggcagcggcggcggccagatgcccgtgaagttcgaggacatcgccgtgagcttcagccaggaggagtgggagtacctggacgaggagcagaaggagctgtacagggaggtgatgaaggagaactaccagaccctgatcagcctgggcaccggcagccccagcatcacccccgacatcatcagccacatcgagaggggcgaggagccctacatcagggaggagcccggcagcgaggagagggagcccggcaggagcagcggcggcccaagcagcggcgcccctcctcccagcggcggcagcccagccggctccccaacctctaccgaggagggcacctctgagtccgccacccccgagagcggccctggcacctccaccgagcccagcgagggcagcgcacccggcagccctgccggcagccccacctccacagaggagggaaccagcaccgagcccagcgaaggcagcgccccaggcaccagcaccgagcctagtgagcaggagattaaacggatcaacaagatcagaagaagacttgtgaaagacagcaacaccaagaaggccggcaagacaggccccatgaaaaccctgctggttagagtgatgacacccgatctgagagagcggctggaaaacctgagaaagaagcctgaaaatatcccccagcccatcagcaatacatctagagccaacctgaataagctgctgaccgattacaccgaaatgaagaaggcgatcctgcatgtgtactgggaagagttccagaaggaccctgtgggcctgatgagccgggtggcccagcctgccagcaagaagatcgatcagaacaagctgaaacctgagatggacgagaagggcaacctgaccaccgccggctttgcctgctctcagtgtggccagcccctgttcgtgtacaagctggagcaggtgtctgagaagggcaaggcttacaccaactacttcggacggtgcaatgtggccgagcacgaaaagctgatcctgctggcccagctgaagcccgagaaggatagcgacgaagccgtgacatatagcctgggaaagtttgggcagagggccctggatttctacagcattcatgtgaccaaggagtccacccaccccgtgaagcccctggcccagatcgccggaaacagatacgcctccggacctgtgggaaaggccctgagcgacgcatgtatgggcacaatcgcctccttcctgtctaagtaccaggacatcatcatcgaacaccagaaggtggtgaagggcaaccagaagagactggagagcctgcgggagctggccggcaaggaaaacctggaataccctagcgtgaccctgccacctcagcctcacaccaaggagggcgttgatgcctacaacgaagtgatcgcccgggtgcgaatgtgggtgaacctgaacctgtggcagaagctgaagctaagcagagatgatgccaagcctctgctgagactgaagggattcccttcctttcctctggtcgagagacaggccaacgaagtggactggtgggacatggtgtgtaacgtgaagaagctgatcaacgagaaaaaggaggatggcaaggtgttttggcagaatctggctggctacaagagacaggaagccctgagaccatacctgagcagcgaggaagatcggaagaagggaaagaaattcgctcggtaccagctgggcgacctgctgctgcacctggaaaagaagcacggcgaggactggggaaaggtgtacgacgaggcctgggagcggattgacaagaaagtggaaggcctgagcaagcacatcaagctggaagaggaacggagaagcgaggacgcccagagcaaggccgccctgaccgactggctgcgggctaaggccagcttcgtgatcgagggcctgaaggaggccgacaaggacgagttctgcagatgcgagctgaagctgcagaagtggtacggggacctgcggggaaagcccttcgccatcgaagccgagaacagcatcctggacatcagcggcttcagcaagcagtacaactgtgccttcatctggcagaaggacggcgtgaagaagctgaacctgtacctgatcatcaactacttcaagggcggcaagctgcggttcaagaagatcaaacctgaagccttcgaagccaacagattctacaccgtgatcaacaaaaagagcggcgagatcgtgcccatggaggtgaacttcaacttcgacgaccccaacctgatcatcctgcctctggcctttggcaagagacagggcagagaattcatctggaacgacctgctgtccctggaaaccggcagcctgaagctggccaacggaagagtgatcgagaagacactgtacaacagaagaacccggcaggatgagcctgccctgttcgtggccctgaccttcgagcggcgggaggtcctggactcctccaatatcaaaccaatgaacctgatcggcgtggcaagaggcgaaaacatccccgccgtgatcgccctgaccgaccccgagggctgcccactgagccggtttaaggatagcctgggaaacccaacccacatcctgagaatcggcgagagctataaggagaagcagcggaccatccaggccaagaaggaggtggagcagcggagagccggcggctacagccggaagtacgccagcaaagccaagaatctggcagacgatatggtgagaaacaccgctagagatctgctgtactacgccgtgacccaggatgccatgctgatcttcgccaacctgagccggggcttcggccggcagggcaagcggaccttcatggccgagagacagtacacacggatggaggactggctgaccgccaagctggcctacgagggcctgagcaagacctacctgtccaagacactggcccagtacacctccaagacatgcagcaactgtgggtttaccatcaccagcgccgactacgacagggtgctggagaagctgaagaagacagcaacaggctggatgaccacaattaacggcaaggagctgaaggtggagggccagattacctactacaacagatacaagagacagaacgtagtcaaggacctgtccgtcgagctggatagactgagcgaagaatctgtgaacaacgacatctcctcctggacaaagggcagaagcggagaagctctgagcctcctgaagaaaagattctcccatagacccgtgcaggagaagttcgtgtgcctgaactgcggcttcgagacacacgcagccgagcaagccgccctgaacatcgccagatcctggctgttcctgcggagccaggagtacaagaaataccagacaaacaagacaaccggcaacaccgataagagagccttcgtcgagacctggcagtccttttaccggaagaagcttaaggaggtgtggaaacctgccgtgcggtctggcggatctggcggaggctccaccagccccaagaaaaagagaaaagtctaagctgccttctgcggggcttgccttctggccatgcccttcttctctcccttgcacctgtacctcttggtctttgaataaagcctgagtaggaaggctagcaaaaaaaaaaaaaaaaaaaaaaaaaaaaaaaaaaaaaaaaaaaaaaaaaaaaaaaaaaaaaaaaaaaaaaaaaaaaaaaa

SEQ ID NO: 13334 - RNA, 5785 nt, synthetic construct
  source 1..5785: mol_type = other RNA
aggaaataagagagaaaagaagagtaagaagaaatataagagccaccatggcccctaagaagaagcgtaaagtgagccggatggaacgcctcgtctacgaggtgcggcagaagtgcagaaacatcgaggacatctgcatctcctgcggatctctgaacgtgaccctggagcacccactgttcatcggcggcatgtgccagaactgtaaaaactgttttctggagtgtgcctatcaatacgacgatgacggctaccagagctactgcaccatctgttgcggcggaagagaggtgctgatgtgtggaaataacaactgctgccggtgcttctgcgtggaatgcgtggacctgctggtgggccccggcgccgcccaggccgctattaaggaagatccttggaactgctacatgtgcggccacaagggcacatacggcctgctgagacggagagaggactggcctagcagactgcagatgttcttcgccaataaccacgaccaggagttcgacccccctaaggtgtaccctcccgtccccgccgagaagagaaagcccatccgggtcctgagcctgttcgatggcatcgccaccggtctgctggtgctgaaggacctgggcatccaggtggataggtacattgcctccgaggtgtgcgaggactccatcaccgtgggaatggtgcgtcatcagggcaagatcatgtacgtgggcgacgtgcggagcgtgacacagaagcatatccaggagtggggccctttcgacctggtgatcggcggcagcccttgcaatgacctgagcatcgtgaacccagcccggaagggcctgtacgagggaaccggcagactgttcttcgagttttacagactgctgcacgacgcccggcctaaggaaggcgacgaccggcccttcttttggctgttcgagaatgtggtggccatgggagtcagcgacaagcgggatattagccggttcctggagagcaaccccgtgatgatcgatgccaaggaagtgagcgccgcccaccgggccagatacttctggggcaatctgcctggcatgaacagacccctggccagcaccgtgaacgacaagctggagctgcaggagtgcctggagcacggccggatcgccaagttcagcaaggtgagaaccatcaccacccgaagcaacagcatcaaacaaggcaaggaccagcactttcctgtgttcatgaacgagaaggaggacatcctgtggtgtaccgagatggagagagtgttcgggttcccagtccactacacagatgtcagcaacatgtctagactggccagacagagactgctgggaagaagctggtccgtccctgtgatcagacacctgttcgcccctctgaaggagtacttcgcctgcgtgagcagcggcaacagcaacgccaacagccggggccccagcttctctagcggcctggtgccactgtccctgagagggagccacatgggccccatggagatctacaaaaccgtgagcgcctggaagcggcagcctgtgcgcgtgctgagcctgtttcggaatatcgataaagtcctgaaaagcctgggattcctggagagcggctctggctccggcggtggcaccctgaagtacgtggaggatgtgacaaacgtggtcagacgggatgtggagaagtggggccccttcgatctggtgtacggcagcacccaacccctgggcagctcttgtgaccggtgccctggctggtacatgtttcagttccaccggatcctgcagtacgccctgccgagacaggagtcccagcggccattcttttggattttcatggacaacttgctgctgaccgaggatgaccaggaaactaccactcggttcctgcagaccgaagccgtgaccctgcaggacgtgagaggccgggactaccagaacgccatgcgggtgtggtccaacatccctggactgaaaagcaagcacgcacctctgacccctaaagaagaggagtacctgcaggcccaggtgcggagcagaagcaagctggacgcccctaaggtggatctgctggtgaagaattgcctcctgcccctgagagagtacttcaagtatttcagccagaatagtctgcccctgggaggcagcggcggcggccaccaggaggtggtgaccttcgaggacgtggccgtgtacttcacccagaccgagtgggccggcctgagccccgcccagagggccctgtacaggagcgtgatgctggagatctacggcaacctgaccagcctgggctaccccgtgcccaagcccgccctggtgagcctgctggagaggggcgacctgccctggggcctggagacccaggacgacccccccgcccagggcaccaagcacatctgcggcggcccaagcagcggcgcccctcctcccagcggcggcagcccagccggctccccaacctctaccgaggagggcacctctgagtccgccacccccgagagcggccctggcacctccaccgagcccagcgagggcagcgcacccggcagccctgccggcagccccacctccacagaggagggaaccagcaccgagcccagcgaaggcagcgccccaggcaccagcaccgagcctagtgagcaggagattaaacggatcaacaagatcagaagaagacttgtgaaagacagcaacaccaagaaggccggcaagacaggccccatgaaaaccctgctggttagagtgatgacacccgatctgagagagcggctggaaaacctgagaaagaagcctgaaaatatcccccagcccatcagcaatacatctagagccaacctgaataagctgctgaccgattacaccgaaatgaagaaggcgatcctgcatgtgtactgggaagagttccagaaggaccctgtgggcctgatgagccgggtggcccagcctgccagcaagaagatcgatcagaacaagctgaaacctgagatggacgagaagggcaacctgaccaccgccggctttgcctgctctcagtgtggccagcccctgttcgtgtacaagctggagcaggtgtctgagaagggcaaggcttacaccaactacttcggacggtgcaatgtggccgagcacgaaaagctgatcctgctggcccagctgaagcccgagaaggatagcgacgaagccgtgacatatagcctgggaaagtttgggcagagggccctggatttctacagcattcatgtgaccaaggagtccacccaccccgtgaagcccctggcccagatcgccggaaacagatacgcctccggacctgtgggaaaggccctgagcgacgcatgtatgggcacaatcgcctccttcctgtctaagtaccaggacatcatcatcgaacaccagaaggtggtgaagggcaaccagaagagactggagagcctgcgggagctggccggcaaggaaaacctggaataccctagcgtgaccctgccacctcagcctcacaccaaggagggcgttgatgcctacaacgaagtgatcgcccgggtgcgaatgtgggtgaacctgaacctgtggcagaagctgaagctaagcagagatgatgccaagcctctgctgagactgaagggattcccttcctttcctctggtcgagagacaggccaacgaagtggactggtgggacatggtgtgtaacgtgaagaagctgatcaacgagaaaaaggaggatggcaaggtgttttggcagaatctggctggctacaagagacaggaagccctgagaccatacctgagcagcgaggaagatcggaagaagggaaagaaattcgctcggtaccagctgggcgacctgctgctgcacctggaaaagaagcacggcgaggactggggaaaggtgtacgacgaggcctgggagcggattgacaagaaagtggaaggcctgagcaagcacatcaagctggaagaggaacggagaagcgaggacgcccagagcaaggccgccctgaccgactggctgcgggctaaggccagcttcgtgatcgagggcctgaaggaggccgacaaggacgagttctgcagatgcgagctgaagctgcagaagtggtacggggacctgcggggaaagcccttcgccatcgaagccgagaacagcatcctggacatcagcggcttcagcaagcagtacaactgtgccttcatctggcagaaggacggcgtgaagaagctgaacctgtacctgatcatcaactacttcaagggcggcaagctgcggttcaagaagatcaaacctgaagccttcgaagccaacagattctacaccgtgatcaacaaaaagagcggcgagatcgtgcccatggaggtgaacttcaacttcgacgaccccaacctgatcatcctgcctctggcctttggcaagagacagggcagagaattcatctggaacgacctgctgtccctggaaaccggcagcctgaagctggccaacggaagagtgatcgagaagacactgtacaacagaagaacccggcaggatgagcctgccctgttcgtggccctgaccttcgagcggcgggaggtcctggactcctccaatatcaaaccaatgaacctgatcggcgtggcaagaggcgaaaacatccccgccgtgatcgccctgaccgaccccgagggctgcccactgagccggtttaaggatagcctgggaaacccaacccacatcctgagaatcggcgagagctataaggagaagcagcggaccatccaggccaagaaggaggtggagcagcggagagccggcggctacagccggaagtacgccagcaaagccaagaatctggcagacgatatggtgagaaacaccgctagagatctgctgtactacgccgtgacccaggatgccatgctgatcttcgccaacctgagccggggcttcggccggcagggcaagcggaccttcatggccgagagacagtacacacggatggaggactggctgaccgccaagctggcctacgagggcctgagcaagacctacctgtccaagacactggcccagtacacctccaagacatgcagcaactgtgggtttaccatcaccagcgccgactacgacagggtgctggagaagctgaagaagacagcaacaggctggatgaccacaattaacggcaaggagctgaaggtggagggccagattacctactacaacagatacaagagacagaacgtagtcaaggacctgtccgtcgagctggatagactgagcgaagaatctgtgaacaacgacatctcctcctggacaaagggcagaagcggagaagctctgagcctcctgaagaaaagattctcccatagacccgtgcaggagaagttcgtgtgcctgaactgcggcttcgagacacacgcagccgagcaagccgccctgaacatcgccagatcctggctgttcctgcggagccaggagtacaagaaataccagacaaacaagacaaccggcaacaccgataagagagccttcgtcgagacctggcagtccttttaccggaagaagcttaaggaggtgtggaaacctgccgtgcggtctggcggatctggcggaggctccaccagccccaagaaaaagagaaaagtctaagctgccttctgcggggcttgccttctggccatgcccttcttctctcccttgcacctgtacctcttggtctttgaataaagcctgagtaggaaggctagcaaaaaaaaaaaaaaaaaaaaaaaaaaaaaaaaaaaaaaaaaaaaaaaaaaaaaaaaaaaaaaaaaaaaaaaaaaaaaaaa

SEQ ID NO: 13335 - RNA, 5785 nt, synthetic construct
  source 1..5785: mol_type = other RNA
aggaaataagagagaaaagaagagtaagaagaaatataagagccaccatggcccctaagaagaagcgtaaagtgagccggatggaacgcctcgtctacgaggtgcggcagaagtgcagaaacatcgaggacatctgcatctcctgcggatctctgaacgtgaccctggagcacccactgttcatcggcggcatgtgccagaactgtaaaaactgttttctggagtgtgcctatcaatacgacgatgacggctaccagagctactgcaccatctgttgcggcggaagagaggtgctgatgtgtggaaataacaactgctgccggtgcttctgcgtggaatgcgtggacctgctggtgggccccggcgccgcccaggccgctattaaggaagatccttggaactgctacatgtgcggccacaagggcacatacggcctgctgagacggagagaggactggcctagcagactgcagatgttcttcgccaataaccacgaccaggagttcgacccccctaaggtgtaccctcccgtccccgccgagaagagaaagcccatccgggtcctgagcctgttcgatggcatcgccaccggtctgctggtgctgaaggacctgggcatccaggtggataggtacattgcctccgaggtgtgcgaggactccatcaccgtgggaatggtgcgtcatcagggcaagatcatgtacgtgggcgacgtgcggagcgtgacacagaagcatatccaggagtggggccctttcgacctggtgatcggcggcagcccttgcaatgacctgagcatcgtgaacccagcccggaagggcctgtacgagggaaccggcagactgttcttcgagttttacagactgctgcacgacgcccggcctaaggaaggcgacgaccggcccttcttttggctgttcgagaatgtggtggccatgggagtcagcgacaagcgggatattagccggttcctggagagcaaccccgtgatgatcgatgccaaggaagtgagcgccgcccaccgggccagatacttctggggcaatctgcctggcatgaacagacccctggccagcaccgtgaacgacaagctggagctgcaggagtgcctggagcacggccggatcgccaagttcagcaaggtgagaaccatcaccacccgaagcaacagcatcaaacaaggcaaggaccagcactttcctgtgttcatgaacgagaaggaggacatcctgtggtgtaccgagatggagagagtgttcgggttcccagtccactacacagatgtcagcaacatgtctagactggccagacagagactgctgggaagaagctggtccgtccctgtgatcagacacctgttcgcccctctgaaggagtacttcgcctgcgtgagcagcggcaacagcaacgccaacagccggggccccagcttctctagcggcctggtgccactgtccctgagagggagccacatgggccccatggagatctacaaaaccgtgagcgcctggaagcggcagcctgtgcgcgtgctgagcctgtttcggaatatcgataaagtcctgaaaagcctgggattcctggagagcggctctggctccggcggtggcaccctgaagtacgtggaggatgtgacaaacgtggtcagacgggatgtggagaagtggggccccttcgatctggtgtacggcagcacccaacccctgggcagctcttgtgaccggtgccctggctggtacatgtttcagttccaccggatcctgcagtacgccctgccgagacaggagtcccagcggccattcttttggattttcatggacaacttgctgctgaccgaggatgaccaggaaactaccactcggttcctgcagaccgaagccgtgaccctgcaggacgtgagaggccgggactaccagaacgccatgcgggtgtggtccaacatccctggactgaaaagcaagcacgcacctctgacccctaaagaagaggagtacctgcaggcccaggtgcggagcagaagcaagctggacgcccctaaggtggatctgctggtgaagaattgcctcctgcccctgagagagtacttcaagtatttcagccagaatagtctgcccctgggaggcagcggcggcggcagcctggagagcgacctgttcagggacgtggccgtggtgttcagccaggaggagtgggagcagctggtgcccacccagagggacctgtacagggacgtgatgctggagacctacaacaacctggtgagcctgggcctggccatcagcaagcccgacgtgatcagcttcctggagcagggcaaggagccctggatggtggagaaggccgccaccggcggcctgtgccccgtgctggagagcaggggcggcccaagcagcggcgcccctcctcccagcggcggcagcccagccggctccccaacctctaccgaggagggcacctctgagtccgccacccccgagagcggccctggcacctccaccgagcccagcgagggcagcgcacccggcagccctgccggcagccccacctccacagaggagggaaccagcaccgagcccagcgaaggcagcgccccaggcaccagcaccgagcctagtgagcaggagattaaacggatcaacaagatcagaagaagacttgtgaaagacagcaacaccaagaaggccggcaagacaggccccatgaaaaccctgctggttagagtgatgacacccgatctgagagagcggctggaaaacctgagaaagaagcctgaaaatatcccccagcccatcagcaatacatctagagccaacctgaataagctgctgaccgattacaccgaaatgaagaaggcgatcctgcatgtgtactgggaagagttccagaaggaccctgtgggcctgatgagccgggtggcccagcctgccagcaagaagatcgatcagaacaagctgaaacctgagatggacgagaagggcaacctgaccaccgccggctttgcctgctctcagtgtggccagcccctgttcgtgtacaagctggagcaggtgtctgagaagggcaaggcttacaccaactacttcggacggtgcaatgtggccgagcacgaaaagctgatcctgctggcccagctgaagcccgagaaggatagcgacgaagccgtgacatatagcctgggaaagtttgggcagagggccctggatttctacagcattcatgtgaccaaggagtccacccaccccgtgaagcccctggcccagatcgccggaaacagatacgcctccggacctgtgggaaaggccctgagcgacgcatgtatgggcacaatcgcctccttcctgtctaagtaccaggacatcatcatcgaacaccagaaggtggtgaagggcaaccagaagagactggagagcctgcgggagctggccggcaaggaaaacctggaataccctagcgtgaccctgccacctcagcctcacaccaaggagggcgttgatgcctacaacgaagtgatcgcccgggtgcgaatgtgggtgaacctgaacctgtggcagaagctgaagctaagcagagatgatgccaagcctctgctgagactgaagggattcccttcctttcctctggtcgagagacaggccaacgaagtggactggtgggacatggtgtgtaacgtgaagaagctgatcaacgagaaaaaggaggatggcaaggtgttttggcagaatctggctggctacaagagacaggaagccctgagaccatacctgagcagcgaggaagatcggaagaagggaaagaaattcgctcggtaccagctgggcgacctgctgctgcacctggaaaagaagcacggcgaggactggggaaaggtgtacgacgaggcctgggagcggattgacaagaaagtggaaggcctgagcaagcacatcaagctggaagaggaacggagaagcgaggacgcccagagcaaggccgccctgaccgactggctgcgggctaaggccagcttcgtgatcgagggcctgaaggaggccgacaaggacgagttctgcagatgcgagctgaagctgcagaagtggtacggggacctgcggggaaagcccttcgccatcgaagccgagaacagcatcctggacatcagcggcttcagcaagcagtacaactgtgccttcatctggcagaaggacggcgtgaagaagctgaacctgtacctgatcatcaactacttcaagggcggcaagctgcggttcaagaagatcaaacctgaagccttcgaagccaacagattctacaccgtgatcaacaaaaagagcggcgagatcgtgcccatggaggtgaacttcaacttcgacgaccccaacctgatcatcctgcctctggcctttggcaagagacagggcagagaattcatctggaacgacctgctgtccctggaaaccggcagcctgaagctggccaacggaagagtgatcgagaagacactgtacaacagaagaacccggcaggatgagcctgccctgttcgtggccctgaccttcgagcggcgggaggtcctggactcctccaatatcaaaccaatgaacctgatcggcgtggcaagaggcgaaaacatccccgccgtgatcgccctgaccgaccccgagggctgcccactgagccggtttaaggatagcctgggaaacccaacccacatcctgagaatcggcgagagctataaggagaagcagcggaccatccaggccaagaaggaggtggagcagcggagagccggcggctacagccggaagtacgccagcaaagccaagaatctggcagacgatatggtgagaaacaccgctagagatctgctgtactacgccgtgacccaggatgccatgctgatcttcgccaacctgagccggggcttcggccggcagggcaagcggaccttcatggccgagagacagtacacacggatggaggactggctgaccgccaagctggcctacgagggcctgagcaagacctacctgtccaagacactggcccagtacacctccaagacatgcagcaactgtgggtttaccatcaccagcgccgactacgacagggtgctggagaagctgaagaagacagcaacaggctggatgaccacaattaacggcaaggagctgaaggtggagggccagattacctactacaacagatacaagagacagaacgtagtcaaggacctgtccgtcgagctggatagactgagcgaagaatctgtgaacaacgacatctcctcctggacaaagggcagaagcggagaagctctgagcctcctgaagaaaagattctcccatagacccgtgcaggagaagttcgtgtgcctgaactgcggcttcgagacacacgcagccgagcaagccgccctgaacatcgccagatcctggctgttcctgcggagccaggagtacaagaaataccagacaaacaagacaaccggcaacaccgataagagagccttcgtcgagacctggcagtccttttaccggaagaagcttaaggaggtgtggaaacctgccgtgcggtctggcggatctggcggaggctccaccagccccaagaaaaagagaaaagtctaagctgccttctgcggggcttgccttctggccatgcccttcttctctcccttgcacctgtacctcttggtctttgaataaagcctgagtaggaaggctagcaaaaaaaaaaaaaaaaaaaaaaaaaaaaaaaaaaaaaaaaaaaaaaaaaaaaaaaaaaaaaaaaaaaaaaaaaaaaaaaa

SEQ ID NO: 13336 - RNA, 5785 nt, synthetic construct
  source 1..5785: mol_type = other RNA
aggaaataagagagaaaagaagagtaagaagaaatataagagccaccatggcccctaagaagaagcgtaaagtgagccggatggaacgcctcgtctacgaggtgcggcagaagtgcagaaacatcgaggacatctgcatctcctgcggatctctgaacgtgaccctggagcacccactgttcatcggcggcatgtgccagaactgtaaaaactgttttctggagtgtgcctatcaatacgacgatgacggctaccagagctactgcaccatctgttgcggcggaagagaggtgctgatgtgtggaaataacaactgctgccggtgcttctgcgtggaatgcgtggacctgctggtgggccccggcgccgcccaggccgctattaaggaagatccttggaactgctacatgtgcggccacaagggcacatacggcctgctgagacggagagaggactggcctagcagactgcagatgttcttcgccaataaccacgaccaggagttcgacccccctaaggtgtaccctcccgtccccgccgagaagagaaagcccatccgggtcctgagcctgttcgatggcatcgccaccggtctgctggtgctgaaggacctgggcatccaggtggataggtacattgcctccgaggtgtgcgaggactccatcaccgtgggaatggtgcgtcatcagggcaagatcatgtacgtgggcgacgtgcggagcgtgacacagaagcatatccaggagtggggccctttcgacctggtgatcggcggcagcccttgcaatgacctgagcatcgtgaacccagcccggaagggcctgtacgagggaaccggcagactgttcttcgagttttacagactgctgcacgacgcccggcctaaggaaggcgacgaccggcccttcttttggctgttcgagaatgtggtggccatgggagtcagcgacaagcgggatattagccggttcctggagagcaaccccgtgatgatcgatgccaaggaagtgagcgccgcccaccgggccagatacttctggggcaatctgcctggcatgaacagacccctggccagcaccgtgaacgacaagctggagctgcaggagtgcctggagcacggccggatcgccaagttcagcaaggtgagaaccatcaccacccgaagcaacagcatcaaacaaggcaaggaccagcactttcctgtgttcatgaacgagaaggaggacatcctgtggtgtaccgagatggagagagtgttcgggttcccagtccactacacagatgtcagcaacatgtctagactggccagacagagactgctgggaagaagctggtccgtccctgtgatcagacacctgttcgcccctctgaaggagtacttcgcctgcgtgagcagcggcaacagcaacgccaacagccggggccccagcttctctagcggcctggtgccactgtccctgagagggagccacatgggccccatggagatctacaaaaccgtgagcgcctggaagcggcagcctgtgcgcgtgctgagcctgtttcggaatatcgataaagtcctgaaaagcctgggattcctggagagcggctctggctccggcggtggcaccctgaagtacgtggaggatgtgacaaacgtggtcagacgggatgtggagaagtggggccccttcgatctggtgtacggcagcacccaacccctgggcagctcttgtgaccggtgccctggctggtacatgtttcagttccaccggatcctgcagtacgccctgccgagacaggagtcccagcggccattcttttggattttcatggacaacttgctgctgaccgaggatgaccaggaaactaccactcggttcctgcagaccgaagccgtgaccctgcaggacgtgagaggccgggactaccagaacgccatgcgggtgtggtccaacatccctggactgaaaagcaagcacgcacctctgacccctaaagaagaggagtacctgcaggcccaggtgcggagcagaagcaagctggacgcccctaaggtggatctgctggtgaagaattgcctcctgcccctgagagagtacttcaagtatttcagccagaatagtctgcccctgggaggcagcggcggcggccaggccggcagcgacctgttcagggacgtggccgtggtgttcagccaggaggagtgggagcagctggcccccacccagagggacctgtacagggacgtgatgctggagacctacagcaacctggtgagcctgggcctggccgtgagcaagcccgacgtgatcagcttcctggagcagggcaaggagccctggaccgtggagggcgtggccaccggcggcctgtgccccgtgctgaagagcaggggcggcccaagcagcggcgcccctcctcccagcggcggcagcccagccggctccccaacctctaccgaggagggcacctctgagtccgccacccccgagagcggccctggcacctccaccgagcccagcgagggcagcgcacccggcagccctgccggcagccccacctccacagaggagggaaccagcaccgagcccagcgaaggcagcgccccaggcaccagcaccgagcctagtgagcaggagattaaacggatcaacaagatcagaagaagacttgtgaaagacagcaacaccaagaaggccggcaagacaggccccatgaaaaccctgctggttagagtgatgacacccgatctgagagagcggctggaaaacctgagaaagaagcctgaaaatatcccccagcccatcagcaatacatctagagccaacctgaataagctgctgaccgattacaccgaaatgaagaaggcgatcctgcatgtgtactgggaagagttccagaaggaccctgtgggcctgatgagccgggtggcccagcctgccagcaagaagatcgatcagaacaagctgaaacctgagatggacgagaagggcaacctgaccaccgccggctttgcctgctctcagtgtggccagcccctgttcgtgtacaagctggagcaggtgtctgagaagggcaaggcttacaccaactacttcggacggtgcaatgtggccgagcacgaaaagctgatcctgctggcccagctgaagcccgagaaggatagcgacgaagccgtgacatatagcctgggaaagtttgggcagagggccctggatttctacagcattcatgtgaccaaggagtccacccaccccgtgaagcccctggcccagatcgccggaaacagatacgcctccggacctgtgggaaaggccctgagcgacgcatgtatgggcacaatcgcctccttcctgtctaagtaccaggacatcatcatcgaacaccagaaggtggtgaagggcaaccagaagagactggagagcctgcgggagctggccggcaaggaaaacctggaataccctagcgtgaccctgccacctcagcctcacaccaaggagggcgttgatgcctacaacgaagtgatcgcccgggtgcgaatgtgggtgaacctgaacctgtggcagaagctgaagctaagcagagatgatgccaagcctctgctgagactgaagggattcccttcctttcctctggtcgagagacaggccaacgaagtggactggtgggacatggtgtgtaacgtgaagaagctgatcaacgagaaaaaggaggatggcaaggtgttttggcagaatctggctggctacaagagacaggaagccctgagaccatacctgagcagcgaggaagatcggaagaagggaaagaaattcgctcggtaccagctgggcgacctgctgctgcacctggaaaagaagcacggcgaggactggggaaaggtgtacgacgaggcctgggagcggattgacaagaaagtggaaggcctgagcaagcacatcaagctggaagaggaacggagaagcgaggacgcccagagcaaggccgccctgaccgactggctgcgggctaaggccagcttcgtgatcgagggcctgaaggaggccgacaaggacgagttctgcagatgcgagctgaagctgcagaagtggtacggggacctgcggggaaagcccttcgccatcgaagccgagaacagcatcctggacatcagcggcttcagcaagcagtacaactgtgccttcatctggcagaaggacggcgtgaagaagctgaacctgtacctgatcatcaactacttcaagggcggcaagctgcggttcaagaagatcaaacctgaagccttcgaagccaacagattctacaccgtgatcaacaaaaagagcggcgagatcgtgcccatggaggtgaacttcaacttcgacgaccccaacctgatcatcctgcctctggcctttggcaagagacagggcagagaattcatctggaacgacctgctgtccctggaaaccggcagcctgaagctggccaacggaagagtgatcgagaagacactgtacaacagaagaacccggcaggatgagcctgccctgttcgtggccctgaccttcgagcggcgggaggtcctggactcctccaatatcaaaccaatgaacctgatcggcgtggcaagaggcgaaaacatccccgccgtgatcgccctgaccgaccccgagggctgcccactgagccggtttaaggatagcctgggaaacccaacccacatcctgagaatcggcgagagctataaggagaagcagcggaccatccaggccaagaaggaggtggagcagcggagagccggcggctacagccggaagtacgccagcaaagccaagaatctggcagacgatatggtgagaaacaccgctagagatctgctgtactacgccgtgacccaggatgccatgctgatcttcgccaacctgagccggggcttcggccggcagggcaagcggaccttcatggccgagagacagtacacacggatggaggactggctgaccgccaagctggcctacgagggcctgagcaagacctacctgtccaagacactggcccagtacacctccaagacatgcagcaactgtgggtttaccatcaccagcgccgactacgacagggtgctggagaagctgaagaagacagcaacaggctggatgaccacaattaacggcaaggagctgaaggtggagggccagattacctactacaacagatacaagagacagaacgtagtcaaggacctgtccgtcgagctggatagactgagcgaagaatctgtgaacaacgacatctcctcctggacaaagggcagaagcggagaagctctgagcctcctgaagaaaagattctcccatagacccgtgcaggagaagttcgtgtgcctgaactgcggcttcgagacacacgcagccgagcaagccgccctgaacatcgccagatcctggctgttcctgcggagccaggagtacaagaaataccagacaaacaagacaaccggcaacaccgataagagagccttcgtcgagacctggcagtccttttaccggaagaagcttaaggaggtgtggaaacctgccgtgcggtctggcggatctggcggaggctccaccagccccaagaaaaagagaaaagtctaagctgccttctgcggggcttgccttctggccatgcccttcttctctcccttgcacctgtacctcttggtctttgaataaagcctgagtaggaaggctagcaaaaaaaaaaaaaaaaaaaaaaaaaaaaaaaaaaaaaaaaaaaaaaaaaaaaaaaaaaaaaaaaaaaaaaaaaaaaaaaa

SEQ ID NO: 13337 - RNA, 5785 nt, synthetic construct
  source 1..5785: mol_type = other RNA
aggaaataagagagaaaagaagagtaagaagaaatataagagccaccatggcccctaagaagaagcgtaaagtgagccggatggaacgcctcgtctacgaggtgcggcagaagtgcagaaacatcgaggacatctgcatctcctgcggatctctgaacgtgaccctggagcacccactgttcatcggcggcatgtgccagaactgtaaaaactgttttctggagtgtgcctatcaatacgacgatgacggctaccagagctactgcaccatctgttgcggcggaagagaggtgctgatgtgtggaaataacaactgctgccggtgcttctgcgtggaatgcgtggacctgctggtgggccccggcgccgcccaggccgctattaaggaagatccttggaactgctacatgtgcggccacaagggcacatacggcctgctgagacggagagaggactggcctagcagactgcagatgttcttcgccaataaccacgaccaggagttcgacccccctaaggtgtaccctcccgtccccgccgagaagagaaagcccatccgggtcctgagcctgttcgatggcatcgccaccggtctgctggtgctgaaggacctgggcatccaggtggataggtacattgcctccgaggtgtgcgaggactccatcaccgtgggaatggtgcgtcatcagggcaagatcatgtacgtgggcgacgtgcggagcgtgacacagaagcatatccaggagtggggccctttcgacctggtgatcggcggcagcccttgcaatgacctgagcatcgtgaacccagcccggaagggcctgtacgagggaaccggcagactgttcttcgagttttacagactgctgcacgacgcccggcctaaggaaggcgacgaccggcccttcttttggctgttcgagaatgtggtggccatgggagtcagcgacaagcgggatattagccggttcctggagagcaaccccgtgatgatcgatgccaaggaagtgagcgccgcccaccgggccagatacttctggggcaatctgcctggcatgaacagacccctggccagcaccgtgaacgacaagctggagctgcaggagtgcctggagcacggccggatcgccaagttcagcaaggtgagaaccatcaccacccgaagcaacagcatcaaacaaggcaaggaccagcactttcctgtgttcatgaacgagaaggaggacatcctgtggtgtaccgagatggagagagtgttcgggttcccagtccactacacagatgtcagcaacatgtctagactggccagacagagactgctgggaagaagctggtccgtccctgtgatcagacacctgttcgcccctctgaaggagtacttcgcctgcgtgagcagcggcaacagcaacgccaacagccggggccccagcttctctagcggcctggtgccactgtccctgagagggagccacatgggccccatggagatctacaaaaccgtgagcgcctggaagcggcagcctgtgcgcgtgctgagcctgtttcggaatatcgataaagtcctgaaaagcctgggattcctggagagcggctctggctccggcggtggcaccctgaagtacgtggaggatgtgacaaacgtggtcagacgggatgtggagaagtggggccccttcgatctggtgtacggcagcacccaacccctgggcagctcttgtgaccggtgccctggctggtacatgtttcagttccaccggatcctgcagtacgccctgccgagacaggagtcccagcggccattcttttggattttcatggacaacttgctgctgaccgaggatgaccaggaaactaccactcggttcctgcagaccgaagccgtgaccctgcaggacgtgagaggccgggactaccagaacgccatgcgggtgtggtccaacatccctggactgaaaagcaagcacgcacctctgacccctaaagaagaggagtacctgcaggcccaggtgcggagcagaagcaagctggacgcccctaaggtggatctgctggtgaagaattgcctcctgcccctgagagagtacttcaagtatttcagccagaatagtctgcccctgggaggcagcggcggcggcagccaggagcccgtgaccttcgccgacgtggccgtggtgttcacccccgaggagtgggtgttcctggacagcacccagaggagcctgtacagggacgtgatgctggagaactacaggaacctggccagcgtggccggcgaccagctgaggaagcccaacgccagcagcgacctggagcagaggggcgagcagtggaacaccgagaggggcgtgatcagcgacacctgccccgagccccagctgggcggcccaagcagcggcgcccctcctcccagcggcggcagcccagccggctccccaacctctaccgaggagggcacctctgagtccgccacccccgagagcggccctggcacctccaccgagcccagcgagggcagcgcacccggcagccctgccggcagccccacctccacagaggagggaaccagcaccgagcccagcgaaggcagcgccccaggcaccagcaccgagcctagtgagcaggagattaaacggatcaacaagatcagaagaagacttgtgaaagacagcaacaccaagaaggccggcaagacaggccccatgaaaaccctgctggttagagtgatgacacccgatctgagagagcggctggaaaacctgagaaagaagcctgaaaatatcccccagcccatcagcaatacatctagagccaacctgaataagctgctgaccgattacaccgaaatgaagaaggcgatcctgcatgtgtactgggaagagttccagaaggaccctgtgggcctgatgagccgggtggcccagcctgccagcaagaagatcgatcagaacaagctgaaacctgagatggacgagaagggcaacctgaccaccgccggctttgcctgctctcagtgtggccagcccctgttcgtgtacaagctggagcaggtgtctgagaagggcaaggcttacaccaactacttcggacggtgcaatgtggccgagcacgaaaagctgatcctgctggcccagctgaagcccgagaaggatagcgacgaagccgtgacatatagcctgggaaagtttgggcagagggccctggatttctacagcattcatgtgaccaaggagtccacccaccccgtgaagcccctggcccagatcgccggaaacagatacgcctccggacctgtgggaaaggccctgagcgacgcatgtatgggcacaatcgcctccttcctgtctaagtaccaggacatcatcatcgaacaccagaaggtggtgaagggcaaccagaagagactggagagcctgcgggagctggccggcaaggaaaacctggaataccctagcgtgaccctgccacctcagcctcacaccaaggagggcgttgatgcctacaacgaagtgatcgcccgggtgcgaatgtgggtgaacctgaacctgtggcagaagctgaagctaagcagagatgatgccaagcctctgctgagactgaagggattcccttcctttcctctggtcgagagacaggccaacgaagtggactggtgggacatggtgtgtaacgtgaagaagctgatcaacgagaaaaaggaggatggcaaggtgttttggcagaatctggctggctacaagagacaggaagccctgagaccatacctgagcagcgaggaagatcggaagaagggaaagaaattcgctcggtaccagctgggcgacctgctgctgcacctggaaaagaagcacggcgaggactggggaaaggtgtacgacgaggcctgggagcggattgacaagaaagtggaaggcctgagcaagcacatcaagctggaagaggaacggagaagcgaggacgcccagagcaaggccgccctgaccgactggctgcgggctaaggccagcttcgtgatcgagggcctgaaggaggccgacaaggacgagttctgcagatgcgagctgaagctgcagaagtggtacggggacctgcggggaaagcccttcgccatcgaagccgagaacagcatcctggacatcagcggcttcagcaagcagtacaactgtgccttcatctggcagaaggacggcgtgaagaagctgaacctgtacctgatcatcaactacttcaagggcggcaagctgcggttcaagaagatcaaacctgaagccttcgaagccaacagattctacaccgtgatcaacaaaaagagcggcgagatcgtgcccatggaggtgaacttcaacttcgacgaccccaacctgatcatcctgcctctggcctttggcaagagacagggcagagaattcatctggaacgacctgctgtccctggaaaccggcagcctgaagctggccaacggaagagtgatcgagaagacactgtacaacagaagaacccggcaggatgagcctgccctgttcgtggccctgaccttcgagcggcgggaggtcctggactcctccaatatcaaaccaatgaacctgatcggcgtggcaagaggcgaaaacatccccgccgtgatcgccctgaccgaccccgagggctgcccactgagccggtttaaggatagcctgggaaacccaacccacatcctgagaatcggcgagagctataaggagaagcagcggaccatccaggccaagaaggaggtggagcagcggagagccggcggctacagccggaagtacgccagcaaagccaagaatctggcagacgatatggtgagaaacaccgctagagatctgctgtactacgccgtgacccaggatgccatgctgatcttcgccaacctgagccggggcttcggccggcagggcaagcggaccttcatggccgagagacagtacacacggatggaggactggctgaccgccaagctggcctacgagggcctgagcaagacctacctgtccaagacactggcccagtacacctccaagacatgcagcaactgtgggtttaccatcaccagcgccgactacgacagggtgctggagaagctgaagaagacagcaacaggctggatgaccacaattaacggcaaggagctgaaggtggagggccagattacctactacaacagatacaagagacagaacgtagtcaaggacctgtccgtcgagctggatagactgagcgaagaatctgtgaacaacgacatctcctcctggacaaagggcagaagcggagaagctctgagcctcctgaagaaaagattctcccatagacccgtgcaggagaagttcgtgtgcctgaactgcggcttcgagacacacgcagccgagcaagccgccctgaacatcgccagatcctggctgttcctgcggagccaggagtacaagaaataccagacaaacaagacaaccggcaacaccgataagagagccttcgtcgagacctggcagtccttttaccggaagaagcttaaggaggtgtggaaacctgccgtgcggtctggcggatctggcggaggctccaccagccccaagaaaaagagaaaagtctaagctgccttctgcggggcttgccttctggccatgcccttcttctctcccttgcacctgtacctcttggtctttgaataaagcctgagtaggaaggctagcaaaaaaaaaaaaaaaaaaaaaaaaaaaaaaaaaaaaaaaaaaaaaaaaaaaaaaaaaaaaaaaaaaaaaaaaaaaaaaaa

SEQ ID NO: 13338 - RNA, 5785 nt, synthetic construct
  source 1..5785: mol_type = other RNA
aggaaataagagagaaaagaagagtaagaagaaatataagagccaccatggcccctaagaagaagcgtaaagtgagccggatggaacgcctcgtctacgaggtgcggcagaagtgcagaaacatcgaggacatctgcatctcctgcggatctctgaacgtgaccctggagcacccactgttcatcggcggcatgtgccagaactgtaaaaactgttttctggagtgtgcctatcaatacgacgatgacggctaccagagctactgcaccatctgttgcggcggaagagaggtgctgatgtgtggaaataacaactgctgccggtgcttctgcgtggaatgcgtggacctgctggtgggccccggcgccgcccaggccgctattaaggaagatccttggaactgctacatgtgcggccacaagggcacatacggcctgctgagacggagagaggactggcctagcagactgcagatgttcttcgccaataaccacgaccaggagttcgacccccctaaggtgtaccctcccgtccccgccgagaagagaaagcccatccgggtcctgagcctgttcgatggcatcgccaccggtctgctggtgctgaaggacctgggcatccaggtggataggtacattgcctccgaggtgtgcgaggactccatcaccgtgggaatggtgcgtcatcagggcaagatcatgtacgtgggcgacgtgcggagcgtgacacagaagcatatccaggagtggggccctttcgacctggtgatcggcggcagcccttgcaatgacctgagcatcgtgaacccagcccggaagggcctgtacgagggaaccggcagactgttcttcgagttttacagactgctgcacgacgcccggcctaaggaaggcgacgaccggcccttcttttggctgttcgagaatgtggtggccatgggagtcagcgacaagcgggatattagccggttcctggagagcaaccccgtgatgatcgatgccaaggaagtgagcgccgcccaccgggccagatacttctggggcaatctgcctggcatgaacagacccctggccagcaccgtgaacgacaagctggagctgcaggagtgcctggagcacggccggatcgccaagttcagcaaggtgagaaccatcaccacccgaagcaacagcatcaaacaaggcaaggaccagcactttcctgtgttcatgaacgagaaggaggacatcctgtggtgtaccgagatggagagagtgttcgggttcccagtccactacacagatgtcagcaacatgtctagactggccagacagagactgctgggaagaagctggtccgtccctgtgatcagacacctgttcgcccctctgaaggagtacttcgcctgcgtgagcagcggcaacagcaacgccaacagccggggccccagcttctctagcggcctggtgccactgtccctgagagggagccacatgggccccatggagatctacaaaaccgtgagcgcctggaagcggcagcctgtgcgcgtgctgagcctgtttcggaatatcgataaagtcctgaaaagcctgggattcctggagagcggctctggctccggcggtggcaccctgaagtacgtggaggatgtgacaaacgtggtcagacgggatgtggagaagtggggccccttcgatctggtgtacggcagcacccaacccctgggcagctcttgtgaccggtgccctggctggtacatgtttcagttccaccggatcctgcagtacgccctgccgagacaggagtcccagcggccattcttttggattttcatggacaacttgctgctgaccgaggatgaccaggaaactaccactcggttcctgcagaccgaagccgtgaccctgcaggacgtgagaggccgggactaccagaacgccatgcgggtgtggtccaacatccctggactgaaaagcaagcacgcacctctgacccctaaagaagaggagtacctgcaggcccaggtgcggagcagaagcaagctggacgcccctaaggtggatctgctggtgaagaattgcctcctgcccctgagagagtacttcaagtatttcagccagaatagtctgcccctgggaggcagcggcggcggccccctgaccttcgaggacgtggccctgtacttcagcgaggaggagtggctgatcatggaccccaaccagaggaccctgtacctggacgtgatgcaggagctgtacgagaacgtgaccagcctgggcctgaagctgaagaacgacaccggcaacgacccccccgtgagcctgcccaccctggagatccagcccagcggctgcgaggtggtgaggaaggccaccatgaaggacgccgagaccaccggcggcccaagcagcggcgcccctcctcccagcggcggcagcccagccggctccccaacctctaccgaggagggcacctctgagtccgccacccccgagagcggccctggcacctccaccgagcccagcgagggcagcgcacccggcagccctgccggcagccccacctccacagaggagggaaccagcaccgagcccagcgaaggcagcgccccaggcaccagcaccgagcctagtgagcaggagattaaacggatcaacaagatcagaagaagacttgtgaaagacagcaacaccaagaaggccggcaagacaggccccatgaaaaccctgctggttagagtgatgacacccgatctgagagagcggctggaaaacctgagaaagaagcctgaaaatatcccccagcccatcagcaatacatctagagccaacctgaataagctgctgaccgattacaccgaaatgaagaaggcgatcctgcatgtgtactgggaagagttccagaaggaccctgtgggcctgatgagccgggtggcccagcctgccagcaagaagatcgatcagaacaagctgaaacctgagatggacgagaagggcaacctgaccaccgccggctttgcctgctctcagtgtggccagcccctgttcgtgtacaagctggagcaggtgtctgagaagggcaaggcttacaccaactacttcggacggtgcaatgtggccgagcacgaaaagctgatcctgctggcccagctgaagcccgagaaggatagcgacgaagccgtgacatatagcctgggaaagtttgggcagagggccctggatttctacagcattcatgtgaccaaggagtccacccaccccgtgaagcccctggcccagatcgccggaaacagatacgcctccggacctgtgggaaaggccctgagcgacgcatgtatgggcacaatcgcctccttcctgtctaagtaccaggacatcatcatcgaacaccagaaggtggtgaagggcaaccagaagagactggagagcctgcgggagctggccggcaaggaaaacctggaataccctagcgtgaccctgccacctcagcctcacaccaaggagggcgttgatgcctacaacgaagtgatcgcccgggtgcgaatgtgggtgaacctgaacctgtggcagaagctgaagctaagcagagatgatgccaagcctctgctgagactgaagggattcccttcctttcctctggtcgagagacaggccaacgaagtggactggtgggacatggtgtgtaacgtgaagaagctgatcaacgagaaaaaggaggatggcaaggtgttttggcagaatctggctggctacaagagacaggaagccctgagaccatacctgagcagcgaggaagatcggaagaagggaaagaaattcgctcggtaccagctgggcgacctgctgctgcacctggaaaagaagcacggcgaggactggggaaaggtgtacgacgaggcctgggagcggattgacaagaaagtggaaggcctgagcaagcacatcaagctggaagaggaacggagaagcgaggacgcccagagcaaggccgccctgaccgactggctgcgggctaaggccagcttcgtgatcgagggcctgaaggaggccgacaaggacgagttctgcagatgcgagctgaagctgcagaagtggtacggggacctgcggggaaagcccttcgccatcgaagccgagaacagcatcctggacatcagcggcttcagcaagcagtacaactgtgccttcatctggcagaaggacggcgtgaagaagctgaacctgtacctgatcatcaactacttcaagggcggcaagctgcggttcaagaagatcaaacctgaagccttcgaagccaacagattctacaccgtgatcaacaaaaagagcggcgagatcgtgcccatggaggtgaacttcaacttcgacgaccccaacctgatcatcctgcctctggcctttggcaagagacagggcagagaattcatctggaacgacctgctgtccctggaaaccggcagcctgaagctggccaacggaagagtgatcgagaagacactgtacaacagaagaacccggcaggatgagcctgccctgttcgtggccctgaccttcgagcggcgggaggtcctggactcctccaatatcaaaccaatgaacctgatcggcgtggcaagaggcgaaaacatccccgccgtgatcgccctgaccgaccccgagggctgcccactgagccggtttaaggatagcctgggaaacccaacccacatcctgagaatcggcgagagctataaggagaagcagcggaccatccaggccaagaaggaggtggagcagcggagagccggcggctacagccggaagtacgccagcaaagccaagaatctggcagacgatatggtgagaaacaccgctagagatctgctgtactacgccgtgacccaggatgccatgctgatcttcgccaacctgagccggggcttcggccggcagggcaagcggaccttcatggccgagagacagtacacacggatggaggactggctgaccgccaagctggcctacgagggcctgagcaagacctacctgtccaagacactggcccagtacacctccaagacatgcagcaactgtgggtttaccatcaccagcgccgactacgacagggtgctggagaagctgaagaagacagcaacaggctggatgaccacaattaacggcaaggagctgaaggtggagggccagattacctactacaacagatacaagagacagaacgtagtcaaggacctgtccgtcgagctggatagactgagcgaagaatctgtgaacaacgacatctcctcctggacaaagggcagaagcggagaagctctgagcctcctgaagaaaagattctcccatagacccgtgcaggagaagttcgtgtgcctgaactgcggcttcgagacacacgcagccgagcaagccgccctgaacatcgccagatcctggctgttcctgcggagccaggagtacaagaaataccagacaaacaagacaaccggcaacaccgataagagagccttcgtcgagacctggcagtccttttaccggaagaagcttaaggaggtgtggaaacctgccgtgcggtctggcggatctggcggaggctccaccagccccaagaaaaagagaaaagtctaagctgccttctgcggggcttgccttctggccatgcccttcttctctcccttgcacctgtacctcttggtctttgaataaagcctgagtaggaaggctagcaaaaaaaaaaaaaaaaaaaaaaaaaaaaaaaaaaaaaaaaaaaaaaaaaaaaaaaaaaaaaaaaaaaaaaaaaaaaaaaa

SEQ ID NO: 13339 - RNA, 5785 nt, synthetic construct
  source 1..5785: mol_type = other RNA
aggaaataagagagaaaagaagagtaagaagaaatataagagccaccatggcccctaagaagaagcgtaaagtgagccggatggaacgcctcgtctacgaggtgcggcagaagtgcagaaacatcgaggacatctgcatctcctgcggatctctgaacgtgaccctggagcacccactgttcatcggcggcatgtgccagaactgtaaaaactgttttctggagtgtgcctatcaatacgacgatgacggctaccagagctactgcaccatctgttgcggcggaagagaggtgctgatgtgtggaaataacaactgctgccggtgcttctgcgtggaatgcgtggacctgctggtgggccccggcgccgcccaggccgctattaaggaagatccttggaactgctacatgtgcggccacaagggcacatacggcctgctgagacggagagaggactggcctagcagactgcagatgttcttcgccaataaccacgaccaggagttcgacccccctaaggtgtaccctcccgtccccgccgagaagagaaagcccatccgggtcctgagcctgttcgatggcatcgccaccggtctgctggtgctgaaggacctgggcatccaggtggataggtacattgcctccgaggtgtgcgaggactccatcaccgtgggaatggtgcgtcatcagggcaagatcatgtacgtgggcgacgtgcggagcgtgacacagaagcatatccaggagtggggccctttcgacctggtgatcggcggcagcccttgcaatgacctgagcatcgtgaacccagcccggaagggcctgtacgagggaaccggcagactgttcttcgagttttacagactgctgcacgacgcccggcctaaggaaggcgacgaccggcccttcttttggctgttcgagaatgtggtggccatgggagtcagcgacaagcgggatattagccggttcctggagagcaaccccgtgatgatcgatgccaaggaagtgagcgccgcccaccgggccagatacttctggggcaatctgcctggcatgaacagacccctggccagcaccgtgaacgacaagctggagctgcaggagtgcctggagcacggccggatcgccaagttcagcaaggtgagaaccatcaccacccgaagcaacagcatcaaacaaggcaaggaccagcactttcctgtgttcatgaacgagaaggaggacatcctgtggtgtaccgagatggagagagtgttcgggttcccagtccactacacagatgtcagcaacatgtctagactggccagacagagactgctgggaagaagctggtccgtccctgtgatcagacacctgttcgcccctctgaaggagtacttcgcctgcgtgagcagcggcaacagcaacgccaacagccggggccccagcttctctagcggcctggtgccactgtccctgagagggagccacatgggccccatggagatctacaaaaccgtgagcgcctggaagcggcagcctgtgcgcgtgctgagcctgtttcggaatatcgataaagtcctgaaaagcctgggattcctggagagcggctctggctccggcggtggcaccctgaagtacgtggaggatgtgacaaacgtggtcagacgggatgtggagaagtggggccccttcgatctggtgtacggcagcacccaacccctgggcagctcttgtgaccggtgccctggctggtacatgtttcagttccaccggatcctgcagtacgccctgccgagacaggagtcccagcggccattcttttggattttcatggacaacttgctgctgaccgaggatgaccaggaaactaccactcggttcctgcagaccgaagccgtgaccctgcaggacgtgagaggccgggactaccagaacgccatgcgggtgtggtccaacatccctggactgaaaagcaagcacgcacctctgacccctaaagaagaggagtacctgcaggcccaggtgcggagcagaagcaagctggacgcccctaaggtggatctgctggtgaagaattgcctcctgcccctgagagagtacttcaagtatttcagccagaatagtctgcccctgggaggcagcggcggcggcagcaggaagcccgtgagcttcgccgacgtggccgtgtacttcagccccgaggagtggggctgcctgaggcccgtgcagagggccctgtacagggacgtgatgagggagacctacggccacctgggcgccctgggcttccaggacaccaagcccgccctgatcagctggatggaggaggaggccgagctgtggggcagcgacgccagggaccccgagctgggcgagtgcctgagcgaggacaccggcggcccaagcagcggcgcccctcctcccagcggcggcagcccagccggctccccaacctctaccgaggagggcacctctgagtccgccacccccgagagcggccctggcacctccaccgagcccagcgagggcagcgcacccggcagccctgccggcagccccacctccacagaggagggaaccagcaccgagcccagcgaaggcagcgccccaggcaccagcaccgagcctagtgagcaggagattaaacggatcaacaagatcagaagaagacttgtgaaagacagcaacaccaagaaggccggcaagacaggccccatgaaaaccctgctggttagagtgatgacacccgatctgagagagcggctggaaaacctgagaaagaagcctgaaaatatcccccagcccatcagcaatacatctagagccaacctgaataagctgctgaccgattacaccgaaatgaagaaggcgatcctgcatgtgtactgggaagagttccagaaggaccctgtgggcctgatgagccgggtggcccagcctgccagcaagaagatcgatcagaacaagctgaaacctgagatggacgagaagggcaacctgaccaccgccggctttgcctgctctcagtgtggccagcccctgttcgtgtacaagctggagcaggtgtctgagaagggcaaggcttacaccaactacttcggacggtgcaatgtggccgagcacgaaaagctgatcctgctggcccagctgaagcccgagaaggatagcgacgaagccgtgacatatagcctgggaaagtttgggcagagggccctggatttctacagcattcatgtgaccaaggagtccacccaccccgtgaagcccctggcccagatcgccggaaacagatacgcctccggacctgtgggaaaggccctgagcgacgcatgtatgggcacaatcgcctccttcctgtctaagtaccaggacatcatcatcgaacaccagaaggtggtgaagggcaaccagaagagactggagagcctgcgggagctggccggcaaggaaaacctggaataccctagcgtgaccctgccacctcagcctcacaccaaggagggcgttgatgcctacaacgaagtgatcgcccgggtgcgaatgtgggtgaacctgaacctgtggcagaagctgaagctaagcagagatgatgccaagcctctgctgagactgaagggattcccttcctttcctctggtcgagagacaggccaacgaagtggactggtgggacatggtgtgtaacgtgaagaagctgatcaacgagaaaaaggaggatggcaaggtgttttggcagaatctggctggctacaagagacaggaagccctgagaccatacctgagcagcgaggaagatcggaagaagggaaagaaattcgctcggtaccagctgggcgacctgctgctgcacctggaaaagaagcacggcgaggactggggaaaggtgtacgacgaggcctgggagcggattgacaagaaagtggaaggcctgagcaagcacatcaagctggaagaggaacggagaagcgaggacgcccagagcaaggccgccctgaccgactggctgcgggctaaggccagcttcgtgatcgagggcctgaaggaggccgacaaggacgagttctgcagatgcgagctgaagctgcagaagtggtacggggacctgcggggaaagcccttcgccatcgaagccgagaacagcatcctggacatcagcggcttcagcaagcagtacaactgtgccttcatctggcagaaggacggcgtgaagaagctgaacctgtacctgatcatcaactacttcaagggcggcaagctgcggttcaagaagatcaaacctgaagccttcgaagccaacagattctacaccgtgatcaacaaaaagagcggcgagatcgtgcccatggaggtgaacttcaacttcgacgaccccaacctgatcatcctgcctctggcctttggcaagagacagggcagagaattcatctggaacgacctgctgtccctggaaaccggcagcctgaagctggccaacggaagagtgatcgagaagacactgtacaacagaagaacccggcaggatgagcctgccctgttcgtggccctgaccttcgagcggcgggaggtcctggactcctccaatatcaaaccaatgaacctgatcggcgtggcaagaggcgaaaacatccccgccgtgatcgccctgaccgaccccgagggctgcccactgagccggtttaaggatagcctgggaaacccaacccacatcctgagaatcggcgagagctataaggagaagcagcggaccatccaggccaagaaggaggtggagcagcggagagccggcggctacagccggaagtacgccagcaaagccaagaatctggcagacgatatggtgagaaacaccgctagagatctgctgtactacgccgtgacccaggatgccatgctgatcttcgccaacctgagccggggcttcggccggcagggcaagcggaccttcatggccgagagacagtacacacggatggaggactggctgaccgccaagctggcctacgagggcctgagcaagacctacctgtccaagacactggcccagtacacctccaagacatgcagcaactgtgggtttaccatcaccagcgccgactacgacagggtgctggagaagctgaagaagacagcaacaggctggatgaccacaattaacggcaaggagctgaaggtggagggccagattacctactacaacagatacaagagacagaacgtagtcaaggacctgtccgtcgagctggatagactgagcgaagaatctgtgaacaacgacatctcctcctggacaaagggcagaagcggagaagctctgagcctcctgaagaaaagattctcccatagacccgtgcaggagaagttcgtgtgcctgaactgcggcttcgagacacacgcagccgagcaagccgccctgaacatcgccagatcctggctgttcctgcggagccaggagtacaagaaataccagacaaacaagacaaccggcaacaccgataagagagccttcgtcgagacctggcagtccttttaccggaagaagcttaaggaggtgtggaaacctgccgtgcggtctggcggatctggcggaggctccaccagccccaagaaaaagagaaaagtctaagctgccttctgcggggcttgccttctggccatgcccttcttctctcccttgcacctgtacctcttggtctttgaataaagcctgagtaggaaggctagcaaaaaaaaaaaaaaaaaaaaaaaaaaaaaaaaaaaaaaaaaaaaaaaaaaaaaaaaaaaaaaaaaaaaaaaaaaaaaaaa

SEQ ID NO: 13340 - RNA, 5785 nt, synthetic construct
  source 1..5785: mol_type = other RNA
aggaaataagagagaaaagaagagtaagaagaaatataagagccaccatggcccctaagaagaagcgtaaagtgagccggatggaacgcctcgtctacgaggtgcggcagaagtgcagaaacatcgaggacatctgcatctcctgcggatctctgaacgtgaccctggagcacccactgttcatcggcggcatgtgccagaactgtaaaaactgttttctggagtgtgcctatcaatacgacgatgacggctaccagagctactgcaccatctgttgcggcggaagagaggtgctgatgtgtggaaataacaactgctgccggtgcttctgcgtggaatgcgtggacctgctggtgggccccggcgccgcccaggccgctattaaggaagatccttggaactgctacatgtgcggccacaagggcacatacggcctgctgagacggagagaggactggcctagcagactgcagatgttcttcgccaataaccacgaccaggagttcgacccccctaaggtgtaccctcccgtccccgccgagaagagaaagcccatccgggtcctgagcctgttcgatggcatcgccaccggtctgctggtgctgaaggacctgggcatccaggtggataggtacattgcctccgaggtgtgcgaggactccatcaccgtgggaatggtgcgtcatcagggcaagatcatgtacgtgggcgacgtgcggagcgtgacacagaagcatatccaggagtggggccctttcgacctggtgatcggcggcagcccttgcaatgacctgagcatcgtgaacccagcccggaagggcctgtacgagggaaccggcagactgttcttcgagttttacagactgctgcacgacgcccggcctaaggaaggcgacgaccggcccttcttttggctgttcgagaatgtggtggccatgggagtcagcgacaagcgggatattagccggttcctggagagcaaccccgtgatgatcgatgccaaggaagtgagcgccgcccaccgggccagatacttctggggcaatctgcctggcatgaacagacccctggccagcaccgtgaacgacaagctggagctgcaggagtgcctggagcacggccggatcgccaagttcagcaaggtgagaaccatcaccacccgaagcaacagcatcaaacaaggcaaggaccagcactttcctgtgttcatgaacgagaaggaggacatcctgtggtgtaccgagatggagagagtgttcgggttcccagtccactacacagatgtcagcaacatgtctagactggccagacagagactgctgggaagaagctggtccgtccctgtgatcagacacctgttcgcccctctgaaggagtacttcgcctgcgtgagcagcggcaacagcaacgccaacagccggggccccagcttctctagcggcctggtgccactgtccctgagagggagccacatgggccccatggagatctacaaaaccgtgagcgcctggaagcggcagcctgtgcgcgtgctgagcctgtttcggaatatcgataaagtcctgaaaagcctgggattcctggagagcggctctggctccggcggtggcaccctgaagtacgtggaggatgtgacaaacgtggtcagacgggatgtggagaagtggggccccttcgatctggtgtacggcagcacccaacccctgggcagctcttgtgaccggtgccctggctggtacatgtttcagttccaccggatcctgcagtacgccctgccgagacaggagtcccagcggccattcttttggattttcatggacaacttgctgctgaccgaggatgaccaggaaactaccactcggttcctgcagaccgaagccgtgaccctgcaggacgtgagaggccgggactaccagaacgccatgcgggtgtggtccaacatccctggactgaaaagcaagcacgcacctctgacccctaaagaagaggagtacctgcaggcccaggtgcggagcagaagcaagctggacgcccctaaggtggatctgctggtgaagaattgcctcctgcccctgagagagtacttcaagtatttcagccagaatagtctgcccctgggaggcagcggcggcggcagccaggagcccgtgagcttcctggacgtggccgtggacttcacccaggaggagtggcagcagctggaccccgtgcagaggaccacctacagggacgtgatgctggagaactacagccacctggtggccctgggctacgacagcgccaagcccaacgtgatcgtgaagctggagcagggcgaggagccctgggtggccgagggcgacctgccctgcaggagcaggcccgaggaggtgtggcagggcggcccaagcagcggcgcccctcctcccagcggcggcagcccagccggctccccaacctctaccgaggagggcacctctgagtccgccacccccgagagcggccctggcacctccaccgagcccagcgagggcagcgcacccggcagccctgccggcagccccacctccacagaggagggaaccagcaccgagcccagcgaaggcagcgccccaggcaccagcaccgagcctagtgagcaggagattaaacggatcaacaagatcagaagaagacttgtgaaagacagcaacaccaagaaggccggcaagacaggccccatgaaaaccctgctggttagagtgatgacacccgatctgagagagcggctggaaaacctgagaaagaagcctgaaaatatcccccagcccatcagcaatacatctagagccaacctgaataagctgctgaccgattacaccgaaatgaagaaggcgatcctgcatgtgtactgggaagagttccagaaggaccctgtgggcctgatgagccgggtggcccagcctgccagcaagaagatcgatcagaacaagctgaaacctgagatggacgagaagggcaacctgaccaccgccggctttgcctgctctcagtgtggccagcccctgttcgtgtacaagctggagcaggtgtctgagaagggcaaggcttacaccaactacttcggacggtgcaatgtggccgagcacgaaaagctgatcctgctggcccagctgaagcccgagaaggatagcgacgaagccgtgacatatagcctgggaaagtttgggcagagggccctggatttctacagcattcatgtgaccaaggagtccacccaccccgtgaagcccctggcccagatcgccggaaacagatacgcctccggacctgtgggaaaggccctgagcgacgcatgtatgggcacaatcgcctccttcctgtctaagtaccaggacatcatcatcgaacaccagaaggtggtgaagggcaaccagaagagactggagagcctgcgggagctggccggcaaggaaaacctggaataccctagcgtgaccctgccacctcagcctcacaccaaggagggcgttgatgcctacaacgaagtgatcgcccgggtgcgaatgtgggtgaacctgaacctgtggcagaagctgaagctaagcagagatgatgccaagcctctgctgagactgaagggattcccttcctttcctctggtcgagagacaggccaacgaagtggactggtgggacatggtgtgtaacgtgaagaagctgatcaacgagaaaaaggaggatggcaaggtgttttggcagaatctggctggctacaagagacaggaagccctgagaccatacctgagcagcgaggaagatcggaagaagggaaagaaattcgctcggtaccagctgggcgacctgctgctgcacctggaaaagaagcacggcgaggactggggaaaggtgtacgacgaggcctgggagcggattgacaagaaagtggaaggcctgagcaagcacatcaagctggaagaggaacggagaagcgaggacgcccagagcaaggccgccctgaccgactggctgcgggctaaggccagcttcgtgatcgagggcctgaaggaggccgacaaggacgagttctgcagatgcgagctgaagctgcagaagtggtacggggacctgcggggaaagcccttcgccatcgaagccgagaacagcatcctggacatcagcggcttcagcaagcagtacaactgtgccttcatctggcagaaggacggcgtgaagaagctgaacctgtacctgatcatcaactacttcaagggcggcaagctgcggttcaagaagatcaaacctgaagccttcgaagccaacagattctacaccgtgatcaacaaaaagagcggcgagatcgtgcccatggaggtgaacttcaacttcgacgaccccaacctgatcatcctgcctctggcctttggcaagagacagggcagagaattcatctggaacgacctgctgtccctggaaaccggcagcctgaagctggccaacggaagagtgatcgagaagacactgtacaacagaagaacccggcaggatgagcctgccctgttcgtggccctgaccttcgagcggcgggaggtcctggactcctccaatatcaaaccaatgaacctgatcggcgtggcaagaggcgaaaacatccccgccgtgatcgccctgaccgaccccgagggctgcccactgagccggtttaaggatagcctgggaaacccaacccacatcctgagaatcggcgagagctataaggagaagcagcggaccatccaggccaagaaggaggtggagcagcggagagccggcggctacagccggaagtacgccagcaaagccaagaatctggcagacgatatggtgagaaacaccgctagagatctgctgtactacgccgtgacccaggatgccatgctgatcttcgccaacctgagccggggcttcggccggcagggcaagcggaccttcatggccgagagacagtacacacggatggaggactggctgaccgccaagctggcctacgagggcctgagcaagacctacctgtccaagacactggcccagtacacctccaagacatgcagcaactgtgggtttaccatcaccagcgccgactacgacagggtgctggagaagctgaagaagacagcaacaggctggatgaccacaattaacggcaaggagctgaaggtggagggccagattacctactacaacagatacaagagacagaacgtagtcaaggacctgtccgtcgagctggatagactgagcgaagaatctgtgaacaacgacatctcctcctggacaaagggcagaagcggagaagctctgagcctcctgaagaaaagattctcccatagacccgtgcaggagaagttcgtgtgcctgaactgcggcttcgagacacacgcagccgagcaagccgccctgaacatcgccagatcctggctgttcctgcggagccaggagtacaagaaataccagacaaacaagacaaccggcaacaccgataagagagccttcgtcgagacctggcagtccttttaccggaagaagcttaaggaggtgtggaaacctgccgtgcggtctggcggatctggcggaggctccaccagccccaagaaaaagagaaaagtctaagctgccttctgcggggcttgccttctggccatgcccttcttctctcccttgcacctgtacctcttggtctttgaataaagcctgagtaggaaggctagcaaaaaaaaaaaaaaaaaaaaaaaaaaaaaaaaaaaaaaaaaaaaaaaaaaaaaaaaaaaaaaaaaaaaaaaaaaaaaaaa

SEQ ID NO: 13341 - RNA, 5785 nt, synthetic construct
  source 1..5785: mol_type = other RNA
aggaaataagagagaaaagaagagtaagaagaaatataagagccaccatggcccctaagaagaagcgtaaagtgagccggatggaacgcctcgtctacgaggtgcggcagaagtgcagaaacatcgaggacatctgcatctcctgcggatctctgaacgtgaccctggagcacccactgttcatcggcggcatgtgccagaactgtaaaaactgttttctggagtgtgcctatcaatacgacgatgacggctaccagagctactgcaccatctgttgcggcggaagagaggtgctgatgtgtggaaataacaactgctgccggtgcttctgcgtggaatgcgtggacctgctggtgggccccggcgccgcccaggccgctattaaggaagatccttggaactgctacatgtgcggccacaagggcacatacggcctgctgagacggagagaggactggcctagcagactgcagatgttcttcgccaataaccacgaccaggagttcgacccccctaaggtgtaccctcccgtccccgccgagaagagaaagcccatccgggtcctgagcctgttcgatggcatcgccaccggtctgctggtgctgaaggacctgggcatccaggtggataggtacattgcctccgaggtgtgcgaggactccatcaccgtgggaatggtgcgtcatcagggcaagatcatgtacgtgggcgacgtgcggagcgtgacacagaagcatatccaggagtggggccctttcgacctggtgatcggcggcagcccttgcaatgacctgagcatcgtgaacccagcccggaagggcctgtacgagggaaccggcagactgttcttcgagttttacagactgctgcacgacgcccggcctaaggaaggcgacgaccggcccttcttttggctgttcgagaatgtggtggccatgggagtcagcgacaagcgggatattagccggttcctggagagcaaccccgtgatgatcgatgccaaggaagtgagcgccgcccaccgggccagatacttctggggcaatctgcctggcatgaacagacccctggccagcaccgtgaacgacaagctggagctgcaggagtgcctggagcacggccggatcgccaagttcagcaaggtgagaaccatcaccacccgaagcaacagcatcaaacaaggcaaggaccagcactttcctgtgttcatgaacgagaaggaggacatcctgtggtgtaccgagatggagagagtgttcgggttcccagtccactacacagatgtcagcaacatgtctagactggccagacagagactgctgggaagaagctggtccgtccctgtgatcagacacctgttcgcccctctgaaggagtacttcgcctgcgtgagcagcggcaacagcaacgccaacagccggggccccagcttctctagcggcctggtgccactgtccctgagagggagccacatgggccccatggagatctacaaaaccgtgagcgcctggaagcggcagcctgtgcgcgtgctgagcctgtttcggaatatcgataaagtcctgaaaagcctgggattcctggagagcggctctggctccggcggtggcaccctgaagtacgtggaggatgtgacaaacgtggtcagacgggatgtggagaagtggggccccttcgatctggtgtacggcagcacccaacccctgggcagctcttgtgaccggtgccctggctggtacatgtttcagttccaccggatcctgcagtacgccctgccgagacaggagtcccagcggccattcttttggattttcatggacaacttgctgctgaccgaggatgaccaggaaactaccactcggttcctgcagaccgaagccgtgaccctgcaggacgtgagaggccgggactaccagaacgccatgcgggtgtggtccaacatccctggactgaaaagcaagcacgcacctctgacccctaaagaagaggagtacctgcaggcccaggtgcggagcagaagcaagctggacgcccctaaggtggatctgctggtgaagaattgcctcctgcccctgagagagtacttcaagtatttcagccagaatagtctgcccctgggaggcagcggcggcggcagccagggcctggtgaccttcgaggacgtggccgtgtacttcagcctggaggagtgggagaggctggacgccgcccagagggacctgtacaaggaggtgatgcaggagaactacggcatcctggtgagcctgggctaccccatccccaagcccgacctgatcttcaggctggagcagggcgaggagccctgggtgcccgacagccccaggcccgaggagggcgacatcgtgaccggcgtgtacggcggcccaagcagcggcgcccctcctcccagcggcggcagcccagccggctccccaacctctaccgaggagggcacctctgagtccgccacccccgagagcggccctggcacctccaccgagcccagcgagggcagcgcacccggcagccctgccggcagccccacctccacagaggagggaaccagcaccgagcccagcgaaggcagcgccccaggcaccagcaccgagcctagtgagcaggagattaaacggatcaacaagatcagaagaagacttgtgaaagacagcaacaccaagaaggccggcaagacaggccccatgaaaaccctgctggttagagtgatgacacccgatctgagagagcggctggaaaacctgagaaagaagcctgaaaatatcccccagcccatcagcaatacatctagagccaacctgaataagctgctgaccgattacaccgaaatgaagaaggcgatcctgcatgtgtactgggaagagttccagaaggaccctgtgggcctgatgagccgggtggcccagcctgccagcaagaagatcgatcagaacaagctgaaacctgagatggacgagaagggcaacctgaccaccgccggctttgcctgctctcagtgtggccagcccctgttcgtgtacaagctggagcaggtgtctgagaagggcaaggcttacaccaactacttcggacggtgcaatgtggccgagcacgaaaagctgatcctgctggcccagctgaagcccgagaaggatagcgacgaagccgtgacatatagcctgggaaagtttgggcagagggccctggatttctacagcattcatgtgaccaaggagtccacccaccccgtgaagcccctggcccagatcgccggaaacagatacgcctccggacctgtgggaaaggccctgagcgacgcatgtatgggcacaatcgcctccttcctgtctaagtaccaggacatcatcatcgaacaccagaaggtggtgaagggcaaccagaagagactggagagcctgcgggagctggccggcaaggaaaacctggaataccctagcgtgaccctgccacctcagcctcacaccaaggagggcgttgatgcctacaacgaagtgatcgcccgggtgcgaatgtgggtgaacctgaacctgtggcagaagctgaagctaagcagagatgatgccaagcctctgctgagactgaagggattcccttcctttcctctggtcgagagacaggccaacgaagtggactggtgggacatggtgtgtaacgtgaagaagctgatcaacgagaaaaaggaggatggcaaggtgttttggcagaatctggctggctacaagagacaggaagccctgagaccatacctgagcagcgaggaagatcggaagaagggaaagaaattcgctcggtaccagctgggcgacctgctgctgcacctggaaaagaagcacggcgaggactggggaaaggtgtacgacgaggcctgggagcggattgacaagaaagtggaaggcctgagcaagcacatcaagctggaagaggaacggagaagcgaggacgcccagagcaaggccgccctgaccgactggctgcgggctaaggccagcttcgtgatcgagggcctgaaggaggccgacaaggacgagttctgcagatgcgagctgaagctgcagaagtggtacggggacctgcggggaaagcccttcgccatcgaagccgagaacagcatcctggacatcagcggcttcagcaagcagtacaactgtgccttcatctggcagaaggacggcgtgaagaagctgaacctgtacctgatcatcaactacttcaagggcggcaagctgcggttcaagaagatcaaacctgaagccttcgaagccaacagattctacaccgtgatcaacaaaaagagcggcgagatcgtgcccatggaggtgaacttcaacttcgacgaccccaacctgatcatcctgcctctggcctttggcaagagacagggcagagaattcatctggaacgacctgctgtccctggaaaccggcagcctgaagctggccaacggaagagtgatcgagaagacactgtacaacagaagaacccggcaggatgagcctgccctgttcgtggccctgaccttcgagcggcgggaggtcctggactcctccaatatcaaaccaatgaacctgatcggcgtggcaagaggcgaaaacatccccgccgtgatcgccctgaccgaccccgagggctgcccactgagccggtttaaggatagcctgggaaacccaacccacatcctgagaatcggcgagagctataaggagaagcagcggaccatccaggccaagaaggaggtggagcagcggagagccggcggctacagccggaagtacgccagcaaagccaagaatctggcagacgatatggtgagaaacaccgctagagatctgctgtactacgccgtgacccaggatgccatgctgatcttcgccaacctgagccggggcttcggccggcagggcaagcggaccttcatggccgagagacagtacacacggatggaggactggctgaccgccaagctggcctacgagggcctgagcaagacctacctgtccaagacactggcccagtacacctccaagacatgcagcaactgtgggtttaccatcaccagcgccgactacgacagggtgctggagaagctgaagaagacagcaacaggctggatgaccacaattaacggcaaggagctgaaggtggagggccagattacctactacaacagatacaagagacagaacgtagtcaaggacctgtccgtcgagctggatagactgagcgaagaatctgtgaacaacgacatctcctcctggacaaagggcagaagcggagaagctctgagcctcctgaagaaaagattctcccatagacccgtgcaggagaagttcgtgtgcctgaactgcggcttcgagacacacgcagccgagcaagccgccctgaacatcgccagatcctggctgttcctgcggagccaggagtacaagaaataccagacaaacaagacaaccggcaacaccgataagagagccttcgtcgagacctggcagtccttttaccggaagaagcttaaggaggtgtggaaacctgccgtgcggtctggcggatctggcggaggctccaccagccccaagaaaaagagaaaagtctaagctgccttctgcggggcttgccttctggccatgcccttcttctctcccttgcacctgtacctcttggtctttgaataaagcctgagtaggaaggctagcaaaaaaaaaaaaaaaaaaaaaaaaaaaaaaaaaaaaaaaaaaaaaaaaaaaaaaaaaaaaaaaaaaaaaaaaaaaaaaaa

SEQ ID NO: 13342 - RNA, 5785 nt, synthetic construct
  source 1..5785: mol_type = other RNA
aggaaataagagagaaaagaagagtaagaagaaatataagagccaccatggcccctaagaagaagcgtaaagtgagccggatggaacgcctcgtctacgaggtgcggcagaagtgcagaaacatcgaggacatctgcatctcctgcggatctctgaacgtgaccctggagcacccactgttcatcggcggcatgtgccagaactgtaaaaactgttttctggagtgtgcctatcaatacgacgatgacggctaccagagctactgcaccatctgttgcggcggaagagaggtgctgatgtgtggaaataacaactgctgccggtgcttctgcgtggaatgcgtggacctgctggtgggccccggcgccgcccaggccgctattaaggaagatccttggaactgctacatgtgcggccacaagggcacatacggcctgctgagacggagagaggactggcctagcagactgcagatgttcttcgccaataaccacgaccaggagttcgacccccctaaggtgtaccctcccgtccccgccgagaagagaaagcccatccgggtcctgagcctgttcgatggcatcgccaccggtctgctggtgctgaaggacctgggcatccaggtggataggtacattgcctccgaggtgtgcgaggactccatcaccgtgggaatggtgcgtcatcagggcaagatcatgtacgtgggcgacgtgcggagcgtgacacagaagcatatccaggagtggggccctttcgacctggtgatcggcggcagcccttgcaatgacctgagcatcgtgaacccagcccggaagggcctgtacgagggaaccggcagactgttcttcgagttttacagactgctgcacgacgcccggcctaaggaaggcgacgaccggcccttcttttggctgttcgagaatgtggtggccatgggagtcagcgacaagcgggatattagccggttcctggagagcaaccccgtgatgatcgatgccaaggaagtgagcgccgcccaccgggccagatacttctggggcaatctgcctggcatgaacagacccctggccagcaccgtgaacgacaagctggagctgcaggagtgcctggagcacggccggatcgccaagttcagcaaggtgagaaccatcaccacccgaagcaacagcatcaaacaaggcaaggaccagcactttcctgtgttcatgaacgagaaggaggacatcctgtggtgtaccgagatggagagagtgttcgggttcccagtccactacacagatgtcagcaacatgtctagactggccagacagagactgctgggaagaagctggtccgtccctgtgatcagacacctgttcgcccctctgaaggagtacttcgcctgcgtgagcagcggcaacagcaacgccaacagccggggccccagcttctctagcggcctggtgccactgtccctgagagggagccacatgggccccatggagatctacaaaaccgtgagcgcctggaagcggcagcctgtgcgcgtgctgagcctgtttcggaatatcgataaagtcctgaaaagcctgggattcctggagagcggctctggctccggcggtggcaccctgaagtacgtggaggatgtgacaaacgtggtcagacgggatgtggagaagtggggccccttcgatctggtgtacggcagcacccaacccctgggcagctcttgtgaccggtgccctggctggtacatgtttcagttccaccggatcctgcagtacgccctgccgagacaggagtcccagcggccattcttttggattttcatggacaacttgctgctgaccgaggatgaccaggaaactaccactcggttcctgcagaccgaagccgtgaccctgcaggacgtgagaggccgggactaccagaacgccatgcgggtgtggtccaacatccctggactgaaaagcaagcacgcacctctgacccctaaagaagaggagtacctgcaggcccaggtgcggagcagaagcaagctggacgcccctaaggtggatctgctggtgaagaattgcctcctgcccctgagagagtacttcaagtatttcagccagaatagtctgcccctgggaggcagcggcggcggcagccaggagagcgtgagcttcgaggacgtggccgtgtacttcaccaggaaccagtgggccagcctggacagcgcccagaggaccctgtacagggaggtgatgctggagaactacgccaacgtgaccagcctggccgccttccccttccccaagcccgacctgatcttccagctggagaggggcaaggcccccggcggcctggacccctggacccccatcaggagggaggtgaggggcgtgtgcggcggcccaagcagcggcgcccctcctcccagcggcggcagcccagccggctccccaacctctaccgaggagggcacctctgagtccgccacccccgagagcggccctggcacctccaccgagcccagcgagggcagcgcacccggcagccctgccggcagccccacctccacagaggagggaaccagcaccgagcccagcgaaggcagcgccccaggcaccagcaccgagcctagtgagcaggagattaaacggatcaacaagatcagaagaagacttgtgaaagacagcaacaccaagaaggccggcaagacaggccccatgaaaaccctgctggttagagtgatgacacccgatctgagagagcggctggaaaacctgagaaagaagcctgaaaatatcccccagcccatcagcaatacatctagagccaacctgaataagctgctgaccgattacaccgaaatgaagaaggcgatcctgcatgtgtactgggaagagttccagaaggaccctgtgggcctgatgagccgggtggcccagcctgccagcaagaagatcgatcagaacaagctgaaacctgagatggacgagaagggcaacctgaccaccgccggctttgcctgctctcagtgtggccagcccctgttcgtgtacaagctggagcaggtgtctgagaagggcaaggcttacaccaactacttcggacggtgcaatgtggccgagcacgaaaagctgatcctgctggcccagctgaagcccgagaaggatagcgacgaagccgtgacatatagcctgggaaagtttgggcagagggccctggatttctacagcattcatgtgaccaaggagtccacccaccccgtgaagcccctggcccagatcgccggaaacagatacgcctccggacctgtgggaaaggccctgagcgacgcatgtatgggcacaatcgcctccttcctgtctaagtaccaggacatcatcatcgaacaccagaaggtggtgaagggcaaccagaagagactggagagcctgcgggagctggccggcaaggaaaacctggaataccctagcgtgaccctgccacctcagcctcacaccaaggagggcgttgatgcctacaacgaagtgatcgcccgggtgcgaatgtgggtgaacctgaacctgtggcagaagctgaagctaagcagagatgatgccaagcctctgctgagactgaagggattcccttcctttcctctggtcgagagacaggccaacgaagtggactggtgggacatggtgtgtaacgtgaagaagctgatcaacgagaaaaaggaggatggcaaggtgttttggcagaatctggctggctacaagagacaggaagccctgagaccatacctgagcagcgaggaagatcggaagaagggaaagaaattcgctcggtaccagctgggcgacctgctgctgcacctggaaaagaagcacggcgaggactggggaaaggtgtacgacgaggcctgggagcggattgacaagaaagtggaaggcctgagcaagcacatcaagctggaagaggaacggagaagcgaggacgcccagagcaaggccgccctgaccgactggctgcgggctaaggccagcttcgtgatcgagggcctgaaggaggccgacaaggacgagttctgcagatgcgagctgaagctgcagaagtggtacggggacctgcggggaaagcccttcgccatcgaagccgagaacagcatcctggacatcagcggcttcagcaagcagtacaactgtgccttcatctggcagaaggacggcgtgaagaagctgaacctgtacctgatcatcaactacttcaagggcggcaagctgcggttcaagaagatcaaacctgaagccttcgaagccaacagattctacaccgtgatcaacaaaaagagcggcgagatcgtgcccatggaggtgaacttcaacttcgacgaccccaacctgatcatcctgcctctggcctttggcaagagacagggcagagaattcatctggaacgacctgctgtccctggaaaccggcagcctgaagctggccaacggaagagtgatcgagaagacactgtacaacagaagaacccggcaggatgagcctgccctgttcgtggccctgaccttcgagcggcgggaggtcctggactcctccaatatcaaaccaatgaacctgatcggcgtggcaagaggcgaaaacatccccgccgtgatcgccctgaccgaccccgagggctgcccactgagccggtttaaggatagcctgggaaacccaacccacatcctgagaatcggcgagagctataaggagaagcagcggaccatccaggccaagaaggaggtggagcagcggagagccggcggctacagccggaagtacgccagcaaagccaagaatctggcagacgatatggtgagaaacaccgctagagatctgctgtactacgccgtgacccaggatgccatgctgatcttcgccaacctgagccggggcttcggccggcagggcaagcggaccttcatggccgagagacagtacacacggatggaggactggctgaccgccaagctggcctacgagggcctgagcaagacctacctgtccaagacactggcccagtacacctccaagacatgcagcaactgtgggtttaccatcaccagcgccgactacgacagggtgctggagaagctgaagaagacagcaacaggctggatgaccacaattaacggcaaggagctgaaggtggagggccagattacctactacaacagatacaagagacagaacgtagtcaaggacctgtccgtcgagctggatagactgagcgaagaatctgtgaacaacgacatctcctcctggacaaagggcagaagcggagaagctctgagcctcctgaagaaaagattctcccatagacccgtgcaggagaagttcgtgtgcctgaactgcggcttcgagacacacgcagccgagcaagccgccctgaacatcgccagatcctggctgttcctgcggagccaggagtacaagaaataccagacaaacaagacaaccggcaacaccgataagagagccttcgtcgagacctggcagtccttttaccggaagaagcttaaggaggtgtggaaacctgccgtgcggtctggcggatctggcggaggctccaccagccccaagaaaaagagaaaagtctaagctgccttctgcggggcttgccttctggccatgcccttcttctctcccttgcacctgtacctcttggtctttgaataaagcctgagtaggaaggctagcaaaaaaaaaaaaaaaaaaaaaaaaaaaaaaaaaaaaaaaaaaaaaaaaaaaaaaaaaaaaaaaaaaaaaaaaaaaaaaaa

SEQ ID NO: 13343 - RNA, 5785 nt, synthetic construct
  source 1..5785: mol_type = other RNA
aggaaataagagagaaaagaagagtaagaagaaatataagagccaccatggcccctaagaagaagcgtaaagtgagccggatggaacgcctcgtctacgaggtgcggcagaagtgcagaaacatcgaggacatctgcatctcctgcggatctctgaacgtgaccctggagcacccactgttcatcggcggcatgtgccagaactgtaaaaactgttttctggagtgtgcctatcaatacgacgatgacggctaccagagctactgcaccatctgttgcggcggaagagaggtgctgatgtgtggaaataacaactgctgccggtgcttctgcgtggaatgcgtggacctgctggtgggccccggcgccgcccaggccgctattaaggaagatccttggaactgctacatgtgcggccacaagggcacatacggcctgctgagacggagagaggactggcctagcagactgcagatgttcttcgccaataaccacgaccaggagttcgacccccctaaggtgtaccctcccgtccccgccgagaagagaaagcccatccgggtcctgagcctgttcgatggcatcgccaccggtctgctggtgctgaaggacctgggcatccaggtggataggtacattgcctccgaggtgtgcgaggactccatcaccgtgggaatggtgcgtcatcagggcaagatcatgtacgtgggcgacgtgcggagcgtgacacagaagcatatccaggagtggggccctttcgacctggtgatcggcggcagcccttgcaatgacctgagcatcgtgaacccagcccggaagggcctgtacgagggaaccggcagactgttcttcgagttttacagactgctgcacgacgcccggcctaaggaaggcgacgaccggcccttcttttggctgttcgagaatgtggtggccatgggagtcagcgacaagcgggatattagccggttcctggagagcaaccccgtgatgatcgatgccaaggaagtgagcgccgcccaccgggccagatacttctggggcaatctgcctggcatgaacagacccctggccagcaccgtgaacgacaagctggagctgcaggagtgcctggagcacggccggatcgccaagttcagcaaggtgagaaccatcaccacccgaagcaacagcatcaaacaaggcaaggaccagcactttcctgtgttcatgaacgagaaggaggacatcctgtggtgtaccgagatggagagagtgttcgggttcccagtccactacacagatgtcagcaacatgtctagactggccagacagagactgctgggaagaagctggtccgtccctgtgatcagacacctgttcgcccctctgaaggagtacttcgcctgcgtgagcagcggcaacagcaacgccaacagccggggccccagcttctctagcggcctggtgccactgtccctgagagggagccacatgggccccatggagatctacaaaaccgtgagcgcctggaagcggcagcctgtgcgcgtgctgagcctgtttcggaatatcgataaagtcctgaaaagcctgggattcctggagagcggctctggctccggcggtggcaccctgaagtacgtggaggatgtgacaaacgtggtcagacgggatgtggagaagtggggccccttcgatctggtgtacggcagcacccaacccctgggcagctcttgtgaccggtgccctggctggtacatgtttcagttccaccggatcctgcagtacgccctgccgagacaggagtcccagcggccattcttttggattttcatggacaacttgctgctgaccgaggatgaccaggaaactaccactcggttcctgcagaccgaagccgtgaccctgcaggacgtgagaggccgggactaccagaacgccatgcgggtgtggtccaacatccctggactgaaaagcaagcacgcacctctgacccctaaagaagaggagtacctgcaggcccaggtgcggagcagaagcaagctggacgcccctaaggtggatctgctggtgaagaattgcctcctgcccctgagagagtacttcaagtatttcagccagaatagtctgcccctgggaggcagcggcggcggcggcatgagggtgaccttcgaggacatcgccgtgagcttcagccaggaggagtgggagtacctgggcgagggccagaaggagctgtacagggaggtgatgaaggagaactacgagaccctgatcagcctgggcaccgacagcagcgccctgacccccgagatcatcagcaggatcgagaggggcgaggagccctgcatcagggacaagcccggcagcgaggagagggagaccggcaagagcagcggcggcccaagcagcggcgcccctcctcccagcggcggcagcccagccggctccccaacctctaccgaggagggcacctctgagtccgccacccccgagagcggccctggcacctccaccgagcccagcgagggcagcgcacccggcagccctgccggcagccccacctccacagaggagggaaccagcaccgagcccagcgaaggcagcgccccaggcaccagcaccgagcctagtgagcaggagattaaacggatcaacaagatcagaagaagacttgtgaaagacagcaacaccaagaaggccggcaagacaggccccatgaaaaccctgctggttagagtgatgacacccgatctgagagagcggctggaaaacctgagaaagaagcctgaaaatatcccccagcccatcagcaatacatctagagccaacctgaataagctgctgaccgattacaccgaaatgaagaaggcgatcctgcatgtgtactgggaagagttccagaaggaccctgtgggcctgatgagccgggtggcccagcctgccagcaagaagatcgatcagaacaagctgaaacctgagatggacgagaagggcaacctgaccaccgccggctttgcctgctctcagtgtggccagcccctgttcgtgtacaagctggagcaggtgtctgagaagggcaaggcttacaccaactacttcggacggtgcaatgtggccgagcacgaaaagctgatcctgctggcccagctgaagcccgagaaggatagcgacgaagccgtgacatatagcctgggaaagtttgggcagagggccctggatttctacagcattcatgtgaccaaggagtccacccaccccgtgaagcccctggcccagatcgccggaaacagatacgcctccggacctgtgggaaaggccctgagcgacgcatgtatgggcacaatcgcctccttcctgtctaagtaccaggacatcatcatcgaacaccagaaggtggtgaagggcaaccagaagagactggagagcctgcgggagctggccggcaaggaaaacctggaataccctagcgtgaccctgccacctcagcctcacaccaaggagggcgttgatgcctacaacgaagtgatcgcccgggtgcgaatgtgggtgaacctgaacctgtggcagaagctgaagctaagcagagatgatgccaagcctctgctgagactgaagggattcccttcctttcctctggtcgagagacaggccaacgaagtggactggtgggacatggtgtgtaacgtgaagaagctgatcaacgagaaaaaggaggatggcaaggtgttttggcagaatctggctggctacaagagacaggaagccctgagaccatacctgagcagcgaggaagatcggaagaagggaaagaaattcgctcggtaccagctgggcgacctgctgctgcacctggaaaagaagcacggcgaggactggggaaaggtgtacgacgaggcctgggagcggattgacaagaaagtggaaggcctgagcaagcacatcaagctggaagaggaacggagaagcgaggacgcccagagcaaggccgccctgaccgactggctgcgggctaaggccagcttcgtgatcgagggcctgaaggaggccgacaaggacgagttctgcagatgcgagctgaagctgcagaagtggtacggggacctgcggggaaagcccttcgccatcgaagccgagaacagcatcctggacatcagcggcttcagcaagcagtacaactgtgccttcatctggcagaaggacggcgtgaagaagctgaacctgtacctgatcatcaactacttcaagggcggcaagctgcggttcaagaagatcaaacctgaagccttcgaagccaacagattctacaccgtgatcaacaaaaagagcggcgagatcgtgcccatggaggtgaacttcaacttcgacgaccccaacctgatcatcctgcctctggcctttggcaagagacagggcagagaattcatctggaacgacctgctgtccctggaaaccggcagcctgaagctggccaacggaagagtgatcgagaagacactgtacaacagaagaacccggcaggatgagcctgccctgttcgtggccctgaccttcgagcggcgggaggtcctggactcctccaatatcaaaccaatgaacctgatcggcgtggcaagaggcgaaaacatccccgccgtgatcgccctgaccgaccccgagggctgcccactgagccggtttaaggatagcctgggaaacccaacccacatcctgagaatcggcgagagctataaggagaagcagcggaccatccaggccaagaaggaggtggagcagcggagagccggcggctacagccggaagtacgccagcaaagccaagaatctggcagacgatatggtgagaaacaccgctagagatctgctgtactacgccgtgacccaggatgccatgctgatcttcgccaacctgagccggggcttcggccggcagggcaagcggaccttcatggccgagagacagtacacacggatggaggactggctgaccgccaagctggcctacgagggcctgagcaagacctacctgtccaagacactggcccagtacacctccaagacatgcagcaactgtgggtttaccatcaccagcgccgactacgacagggtgctggagaagctgaagaagacagcaacaggctggatgaccacaattaacggcaaggagctgaaggtggagggccagattacctactacaacagatacaagagacagaacgtagtcaaggacctgtccgtcgagctggatagactgagcgaagaatctgtgaacaacgacatctcctcctggacaaagggcagaagcggagaagctctgagcctcctgaagaaaagattctcccatagacccgtgcaggagaagttcgtgtgcctgaactgcggcttcgagacacacgcagccgagcaagccgccctgaacatcgccagatcctggctgttcctgcggagccaggagtacaagaaataccagacaaacaagacaaccggcaacaccgataagagagccttcgtcgagacctggcagtccttttaccggaagaagcttaaggaggtgtggaaacctgccgtgcggtctggcggatctggcggaggctccaccagccccaagaaaaagagaaaagtctaagctgccttctgcggggcttgccttctggccatgcccttcttctctcccttgcacctgtacctcttggtctttgaataaagcctgagtaggaaggctagcaaaaaaaaaaaaaaaaaaaaaaaaaaaaaaaaaaaaaaaaaaaaaaaaaaaaaaaaaaaaaaaaaaaaaaaaaaaaaaaa

SEQ ID NO: 13344 - RNA, 5785 nt, synthetic construct
  source 1..5785: mol_type = other RNA
aggaaataagagagaaaagaagagtaagaagaaatataagagccaccatggcccctaagaagaagcgtaaagtgagccggatggaacgcctcgtctacgaggtgcggcagaagtgcagaaacatcgaggacatctgcatctcctgcggatctctgaacgtgaccctggagcacccactgttcatcggcggcatgtgccagaactgtaaaaactgttttctggagtgtgcctatcaatacgacgatgacggctaccagagctactgcaccatctgttgcggcggaagagaggtgctgatgtgtggaaataacaactgctgccggtgcttctgcgtggaatgcgtggacctgctggtgggccccggcgccgcccaggccgctattaaggaagatccttggaactgctacatgtgcggccacaagggcacatacggcctgctgagacggagagaggactggcctagcagactgcagatgttcttcgccaataaccacgaccaggagttcgacccccctaaggtgtaccctcccgtccccgccgagaagagaaagcccatccgggtcctgagcctgttcgatggcatcgccaccggtctgctggtgctgaaggacctgggcatccaggtggataggtacattgcctccgaggtgtgcgaggactccatcaccgtgggaatggtgcgtcatcagggcaagatcatgtacgtgggcgacgtgcggagcgtgacacagaagcatatccaggagtggggccctttcgacctggtgatcggcggcagcccttgcaatgacctgagcatcgtgaacccagcccggaagggcctgtacgagggaaccggcagactgttcttcgagttttacagactgctgcacgacgcccggcctaaggaaggcgacgaccggcccttcttttggctgttcgagaatgtggtggccatgggagtcagcgacaagcgggatattagccggttcctggagagcaaccccgtgatgatcgatgccaaggaagtgagcgccgcccaccgggccagatacttctggggcaatctgcctggcatgaacagacccctggccagcaccgtgaacgacaagctggagctgcaggagtgcctggagcacggccggatcgccaagttcagcaaggtgagaaccatcaccacccgaagcaacagcatcaaacaaggcaaggaccagcactttcctgtgttcatgaacgagaaggaggacatcctgtggtgtaccgagatggagagagtgttcgggttcccagtccactacacagatgtcagcaacatgtctagactggccagacagagactgctgggaagaagctggtccgtccctgtgatcagacacctgttcgcccctctgaaggagtacttcgcctgcgtgagcagcggcaacagcaacgccaacagccggggccccagcttctctagcggcctggtgccactgtccctgagagggagccacatgggccccatggagatctacaaaaccgtgagcgcctggaagcggcagcctgtgcgcgtgctgagcctgtttcggaatatcgataaagtcctgaaaagcctgggattcctggagagcggctctggctccggcggtggcaccctgaagtacgtggaggatgtgacaaacgtggtcagacgggatgtggagaagtggggccccttcgatctggtgtacggcagcacccaacccctgggcagctcttgtgaccggtgccctggctggtacatgtttcagttccaccggatcctgcagtacgccctgccgagacaggagtcccagcggccattcttttggattttcatggacaacttgctgctgaccgaggatgaccaggaaactaccactcggttcctgcagaccgaagccgtgaccctgcaggacgtgagaggccgggactaccagaacgccatgcgggtgtggtccaacatccctggactgaaaagcaagcacgcacctctgacccctaaagaagaggagtacctgcaggcccaggtgcggagcagaagcaagctggacgcccctaaggtggatctgctggtgaagaattgcctcctgcccctgagagagtacttcaagtatttcagccagaatagtctgcccctgggaggcagcggcggcggcagccccgtgctggtgagcttcgacgacgtgttcgtgagcttcaccagggaggagtggcaggtgctggacaacgcccagagggccctgtacggcgacgtgatgctggagacctacaggagcctggtgctgctgggccagtgcatcaccaagcccgaggtgatcttcaagctggagcagggcgtggagccctggaccggcggcgagccccacaaccagagcccccccgacgtgcaggaggtggacggcggcccaagcagcggcgcccctcctcccagcggcggcagcccagccggctccccaacctctaccgaggagggcacctctgagtccgccacccccgagagcggccctggcacctccaccgagcccagcgagggcagcgcacccggcagccctgccggcagccccacctccacagaggagggaaccagcaccgagcccagcgaaggcagcgccccaggcaccagcaccgagcctagtgagcaggagattaaacggatcaacaagatcagaagaagacttgtgaaagacagcaacaccaagaaggccggcaagacaggccccatgaaaaccctgctggttagagtgatgacacccgatctgagagagcggctggaaaacctgagaaagaagcctgaaaatatcccccagcccatcagcaatacatctagagccaacctgaataagctgctgaccgattacaccgaaatgaagaaggcgatcctgcatgtgtactgggaagagttccagaaggaccctgtgggcctgatgagccgggtggcccagcctgccagcaagaagatcgatcagaacaagctgaaacctgagatggacgagaagggcaacctgaccaccgccggctttgcctgctctcagtgtggccagcccctgttcgtgtacaagctggagcaggtgtctgagaagggcaaggcttacaccaactacttcggacggtgcaatgtggccgagcacgaaaagctgatcctgctggcccagctgaagcccgagaaggatagcgacgaagccgtgacatatagcctgggaaagtttgggcagagggccctggatttctacagcattcatgtgaccaaggagtccacccaccccgtgaagcccctggcccagatcgccggaaacagatacgcctccggacctgtgggaaaggccctgagcgacgcatgtatgggcacaatcgcctccttcctgtctaagtaccaggacatcatcatcgaacaccagaaggtggtgaagggcaaccagaagagactggagagcctgcgggagctggccggcaaggaaaacctggaataccctagcgtgaccctgccacctcagcctcacaccaaggagggcgttgatgcctacaacgaagtgatcgcccgggtgcgaatgtgggtgaacctgaacctgtggcagaagctgaagctaagcagagatgatgccaagcctctgctgagactgaagggattcccttcctttcctctggtcgagagacaggccaacgaagtggactggtgggacatggtgtgtaacgtgaagaagctgatcaacgagaaaaaggaggatggcaaggtgttttggcagaatctggctggctacaagagacaggaagccctgagaccatacctgagcagcgaggaagatcggaagaagggaaagaaattcgctcggtaccagctgggcgacctgctgctgcacctggaaaagaagcacggcgaggactggggaaaggtgtacgacgaggcctgggagcggattgacaagaaagtggaaggcctgagcaagcacatcaagctggaagaggaacggagaagcgaggacgcccagagcaaggccgccctgaccgactggctgcgggctaaggccagcttcgtgatcgagggcctgaaggaggccgacaaggacgagttctgcagatgcgagctgaagctgcagaagtggtacggggacctgcggggaaagcccttcgccatcgaagccgagaacagcatcctggacatcagcggcttcagcaagcagtacaactgtgccttcatctggcagaaggacggcgtgaagaagctgaacctgtacctgatcatcaactacttcaagggcggcaagctgcggttcaagaagatcaaacctgaagccttcgaagccaacagattctacaccgtgatcaacaaaaagagcggcgagatcgtgcccatggaggtgaacttcaacttcgacgaccccaacctgatcatcctgcctctggcctttggcaagagacagggcagagaattcatctggaacgacctgctgtccctggaaaccggcagcctgaagctggccaacggaagagtgatcgagaagacactgtacaacagaagaacccggcaggatgagcctgccctgttcgtggccctgaccttcgagcggcgggaggtcctggactcctccaatatcaaaccaatgaacctgatcggcgtggcaagaggcgaaaacatccccgccgtgatcgccctgaccgaccccgagggctgcccactgagccggtttaaggatagcctgggaaacccaacccacatcctgagaatcggcgagagctataaggagaagcagcggaccatccaggccaagaaggaggtggagcagcggagagccggcggctacagccggaagtacgccagcaaagccaagaatctggcagacgatatggtgagaaacaccgctagagatctgctgtactacgccgtgacccaggatgccatgctgatcttcgccaacctgagccggggcttcggccggcagggcaagcggaccttcatggccgagagacagtacacacggatggaggactggctgaccgccaagctggcctacgagggcctgagcaagacctacctgtccaagacactggcccagtacacctccaagacatgcagcaactgtgggtttaccatcaccagcgccgactacgacagggtgctggagaagctgaagaagacagcaacaggctggatgaccacaattaacggcaaggagctgaaggtggagggccagattacctactacaacagatacaagagacagaacgtagtcaaggacctgtccgtcgagctggatagactgagcgaagaatctgtgaacaacgacatctcctcctggacaaagggcagaagcggagaagctctgagcctcctgaagaaaagattctcccatagacccgtgcaggagaagttcgtgtgcctgaactgcggcttcgagacacacgcagccgagcaagccgccctgaacatcgccagatcctggctgttcctgcggagccaggagtacaagaaataccagacaaacaagacaaccggcaacaccgataagagagccttcgtcgagacctggcagtccttttaccggaagaagcttaaggaggtgtggaaacctgccgtgcggtctggcggatctggcggaggctccaccagccccaagaaaaagagaaaagtctaagctgccttctgcggggcttgccttctggccatgcccttcttctctcccttgcacctgtacctcttggtctttgaataaagcctgagtaggaaggctagcaaaaaaaaaaaaaaaaaaaaaaaaaaaaaaaaaaaaaaaaaaaaaaaaaaaaaaaaaaaaaaaaaaaaaaaaaaaaaaaa
